United States Patent Application Publication US 2021/0170017 A1 - sequence listing, part 10

SEQ ID NO: 14086 - RNA, 2277 nt, Artificial Sequence
  mRNA product Design d-3 comprising derived and/or modified sequence from HRSV(Memphis-37)__AIY60640.1__F_DSCav1_mut1 (opt1)
gggagagggcgcuuggcuugcaaggacccugagcugcggcauugaagcacacccaacccaacucgacugaagucagccucacugaaccggaucugagaaucuucucucucugggcuugccagggcucuccgaaccuagcuagcauccucuucaauuccaacuagaaagcuuaccauggagcugcccauccucaagaccaacgccaucaccacgauccuggccgcggugacccugugcuucgccagcucccagaacaucaccgaggaguucuaccagagcacgugcuccgccgucagcaagggcuaccucggggcccugcgcaccggcugguacaccuccgugaucaccaucgagcugagcaacaucaaggagaacaagugcaacgggaccgacgccaaggugaagcucaucaagcaggagcuggacaaguacaagaacgcggucacggagcugcagcuccugaugcaguccaccccggccgccggcagcggguccgccaucugcagcggcaucgcggugugcaaggugcugcaccucgagggcgaggucaacaagaucaagaacgcccugcuguccaccaacaaggccguggugagccucuccaacggggucagcgugcugaccuucaaggugcuggaccucaagaacuacaucgacaagcagcugcugcccauccucaacaagcaguccugcagcauccccaacaucgagacggucaucgaguuccagcagaagaacaaccggcugcuggagaucacccgcgaguucuccgugaacgccggcgugaccacccccgucagcacguacaugcucaccaacuccgagcugcugagccucaucaacgacaugccgaucaccaacgaccagaagaagcugaugagcaacaacgugcagaucgugcggcagcaguccuacagcaucaugugcaucaucaaggaggagguccuggccuacguggugcagcucccccuguacggggucaucgacacccccugcuggaagcugcacacgagcccccucugcaccaccaacaccaaggagggcuccaacaucugccugacgcgcaccgaccgggggugguacugcgacaacgcgggcuccgugagcuucuucccgcaggccgagaccugcaaggugcaguccaaccgcgucuucugcgacaccaugaacagccugacgcuccccuccgaggugaaccugugcaacaucgacaucuucaaccccaaguacgacugcaagaucaugaccagcaagaccgacgucuccagcuccgugaucaccagccugggcgccaucguguccugcuacgggaagacgaagugcaccgccagcaacaagaaccggggcaucaucaagaccuucuccaacgggugcgacuacgucagcaacaagggcguggacaccguguccgucggcaacacgcucuacugcgugaacaagcaggaggggcagagccuguacgugaagggcgagcccaucaucaacuucuacgacccgcuggucuuccccagcgacgaguucgacgccuccaucagccaggugaacgagaagaucaaccagucccucgcguucauccgcaagagcgacgagcugcugcacaacgugaacgucgggaaguccaccaccaacaucaugaucaccaccaucaucaucgugaucaucgugauccuccugcugcucaucgccgucggccuguuccuguacugcaaggcccggagcacgcccgugacccuguccaaggaccagcucagcgggaucaacaacaucgccuucuccaacugaggacuagugaagggaacacccaaauuuaauucagccuuaagcacaauuaauuaagagugaaacguaauuguacaagcaguuggucacccaccauagggcaugaucaacaccgcaaccuuuccuuuuucccccagugauucugaaaaaccccucuucccuucagcuugcuuagauguuccaaauuuaguaagcuuaaggcggccuacagaagaaaaagaaaaaaaaggccacaaaaguucccucucacuuucaguaaauaaaauaaaagcagcaacagaaauaaagaaauaaaugaaauucaaaaugaaauaaauauuguguugugcagcauuaaaaaaucaauaaaaauuaaaaaugagcaagaucuaaaaaaaaaaaaaaaaaaaaaaaaaaaaaaaaaaaaaaaaaaaaaaaaaaaaaaaaaaaaaaaaugcaucccccccccccccccccccccccccccccccaaaggcucuuuucagagccaccagaauu

SEQ ID NO: 14087 - RNA, 2277 nt, Artificial Sequence
  mRNA product Design d-3 comprising derived and/or modified sequence from HRSV(Memphis-37)__AIY60640.1__F_DSCav1_mut1 (opt2)
gggagagggcgcuuggcuugcaaggacccugagcugcggcauugaagcacacccaacccaacucgacugaagucagccucacugaaccggaucugagaaucuucucucucugggcuugccagggcucuccgaaccuagcuagcauccucuucaauuccaacuagaaagcuuaccauggagcuccccauccucaagaccaacgccaucaccaccauccucgccgccgucacccucugcuucgccuccucccagaacaucaccgaggaguucuaccaguccaccugcuccgccgucuccaagggcuaccucggcgcccuccgcaccggcugguacaccuccgucaucaccaucgagcucuccaacaucaaggagaacaagugcaacggcaccgacgccaaggucaagcucaucaagcaggagcucgacaaguacaagaacgccgucaccgagcuccagcuccucaugcaguccacccccgccgccggcuccggcuccgccaucugcuccggcaucgccgucugcaagguccuccaccucgagggcgaggucaacaagaucaagaacgcccuccucuccaccaacaaggccgucgucucccucuccaacggcgucuccguccucaccuucaagguccucgaccucaagaacuacaucgacaagcagcuccuccccauccucaacaagcaguccugcuccauccccaacaucgagaccgucaucgaguuccagcagaagaacaaccgccuccucgagaucacccgcgaguucuccgucaacgccggcgucaccacccccgucuccaccuacaugcucaccaacuccgagcuccucucccucaucaacgacaugcccaucaccaacgaccagaagaagcucauguccaacaacguccagaucguccgccagcaguccuacuccaucaugugcaucaucaaggaggagguccucgccuacgucguccagcucccccucuacggcgucaucgacacccccugcuggaagcuccacaccuccccccucugcaccaccaacaccaaggagggcuccaacaucugccucacccgcaccgaccgcggcugguacugcgacaacgccggcuccgucuccuucuucccccaggccgagaccugcaagguccaguccaaccgcgucuucugcgacaccaugaacucccucacccuccccuccgaggucaaccucugcaacaucgacaucuucaaccccaaguacgacugcaagaucaugaccuccaagaccgacgucuccuccuccgucaucaccucccucggcgccaucgucuccugcuacggcaagaccaagugcaccgccuccaacaagaaccgcggcaucaucaagaccuucuccaacggcugcgacuacgucuccaacaagggcgucgacaccgucuccgucggcaacacccucuacugcgucaacaagcaggagggccagucccucuacgucaagggcgagcccaucaucaacuucuacgacccccucgucuuccccuccgacgaguucgacgccuccaucucccaggucaacgagaagaucaaccagucccucgccuucauccgcaaguccgacgagcuccuccacaacgucaacgucggcaaguccaccaccaacaucaugaucaccaccaucaucaucgucaucaucgucauccuccuccuccucaucgccgucggccucuuccucuacugcaaggcccgcuccacccccgucacccucuccaaggaccagcucuccggcaucaacaacaucgccuucuccaacugaggacuagugaagggaacacccaaauuuaauucagccuuaagcacaauuaauuaagagugaaacguaauuguacaagcaguuggucacccaccauagggcaugaucaacaccgcaaccuuuccuuuuucccccagugauucugaaaaaccccucuucccuucagcuugcuuagauguuccaaauuuaguaagcuuaaggcggccuacagaagaaaaagaaaaaaaaggccacaaaaguucccucucacuuucaguaaauaaaauaaaagcagcaacagaaauaaagaaauaaaugaaauucaaaaugaaauaaauauuguguugugcagcauuaaaaaaucaauaaaaauuaaaaaugagcaagaucuaaaaaaaaaaaaaaaaaaaaaaaaaaaaaaaaaaaaaaaaaaaaaaaaaaaaaaaaaaaaaaaaugcaucccccccccccccccccccccccccccccccaaaggcucuuuucagagccaccagaauu

SEQ ID NO: 14088 - RNA, 2277 nt, Artificial Sequence
  mRNA product Design d-3 comprising derived and/or modified sequence from HRSV(Memphis-37)__AIY60640.1__F_DSCav1_mut1 (opt3)
gggagagggcgcuuggcuugcaaggacccugagcugcggcauugaagcacacccaacccaacucgacugaagucagccucacugaaccggaucugagaaucuucucucucugggcuugccagggcucuccgaaccuagcuagcauccucuucaauuccaacuagaaagcuuaccauggagcugcccauccucaagaccaacgccauuacaacuauacuugcugcagugacgcugugcuucgccagcucccagaauaucaccgaagaguuuuaccaaucuacauguucagcggucaguaaaggcuauuugggggcuuuaagaacuggaugguacaccagcguuauuacaaucgaacuguccaacauuaaggagaauaaaugcaacgguaccgacgccaaggugaaacuaaucaagcaggaacucgauaaguauaaaaaugcaguaacugagcugcagcuucugaugcagucuacuccugccgcuggcucggggucagcaauauguagcggaaucgccgugugcaaggucuugcaccucgagggcgaagugaacaaaauuaagaaugcucugcugaguaccaacaaagccguugugucccucucuaauggugucagcguguuaacguucaagguacuggaccuuaagaacuacaucgauaaacaauugcugccaauucuaaauaagcaguccuguucaaucccgaacauagagacuguuauugaauuucagcagaaaaauaacaggcuccuggagaucacccgggaguucagugugaaugcgggggucacaacucccgugagcaccuauaugcuuacaaacucugaacuguugucccucauuaacgacaugccuaucaccaaugaucaaaagaaacugaugucaaacaaugugcagaucguccgccagcagagcuacaguauuaugugcauaaucaaggaggaaguuuuagcauaugugguacaacugccacucuacggagugauugacacgcccuguuggaaacuucauacuucuccucugugcacaaccaacacuaaggagggcuccaauaucuguuugacacgaaccgaucguggcugguacugcgacaacgccgggagcgucucguuuuucccacaggcugaaacguguaaggugcagucuaauagaguguuuugcgauaccaugaacucccuaacacugcccucagagguuaaucucugcaacauagacauuuucaauccuaaauaugauuguaagaucaugacaaguaaaaccgacgucagcuccucugugaucacaagccugggagccauuguaucaugcuacgguaagacuaaauguaccgcaaguaacaagaauaggggcaucauuaagacauuuuccaacgggugcgauuauguuagcaauaaaggaguggacaccgucucugugggcaacacucuuuacugugucaacaagcaagagggucagucacuguaugugaaaggggaaccaauaaucaauuucuacgacccguugguuuuucccagugaugaguucgacgcuagcauuucccaggugaacgaaaagaucaaucagucucucgccuuuauccggaaaucggaugagcuguuacacaacguaaaugucggaaagagcacgacaaacauuaugauaaccacuaucauuaucgugauuaucguuauacugcuacuccugaucgcggugggccuuuucuuguauugcaaggcccgcuccaccccugucacacugucaaaagaccaacucaguggcauuaauaacaucgcauucucuaauugaggacuagugaagggaacacccaaauuuaauucagccuuaagcacaauuaauuaagagugaaacguaauuguacaagcaguuggucacccaccauagggcaugaucaacaccgcaaccuuuccuuuuucccccagugauucugaaaaaccccucuucccuucagcuugcuuagauguuccaaauuuaguaagcuuaaggcggccuacagaagaaaaagaaaaaaaaggccacaaaaguucccucucacuuucaguaaauaaaauaaaagcagcaacagaaauaaagaaauaaaugaaauucaaaaugaaauaaauauuguguugugcagcauuaaaaaaucaauaaaaauuaaaaaugagcaagaucuaaaaaaaaaaaaaaaaaaaaaaaaaaaaaaaaaaaaaaaaaaaaaaaaaaaaaaaaaaaaaaaaugcaucccccccccccccccccccccccccccccccaaaggcucuuuucagagccaccagaauu

SEQ ID NO: 14089 - RNA, 2277 nt, Artificial Sequence
  mRNA product Design d-3 comprising derived and/or modified sequence from HRSV(Memphis-37)__AIY60640.1__F_DSCav1_mut1 (opt4)
gggagagggcgcuuggcuugcaaggacccugagcugcggcauugaagcacacccaacccaacucgacugaagucagccucacugaaccggaucugagaaucuucucucucugggcuugccagggcucuccgaaccuagcuagcauccucuucaauuccaacuagaaagcuuaccauggagcugcccauccugaagaccaacgccaucaccaccauccuggccgccgugacccugugcuucgccagcagccagaacaucaccgaggaguucuaccagagcaccugcagcgccgugagcaagggcuaccugggcgcccugagaaccggcugguacaccagcgugaucaccaucgagcugagcaacaucaaggagaacaagugcaacggcaccgacgccaaggugaagcugaucaagcaggagcuggacaaguacaagaacgccgugaccgagcugcagcugcugaugcagagcacccccgccgccggcagcggcagcgccaucugcagcggcaucgccgugugcaaggugcugcaccuggagggcgaggugaacaagaucaagaacgcccugcugagcaccaacaaggccguggugagccugagcaacggcgugagcgugcugaccuucaaggugcuggaccugaagaacuacaucgacaagcagcugcugcccauccugaacaagcagagcugcagcauccccaacaucgagaccgugaucgaguuccagcagaagaacaacagacugcuggagaucaccagagaguucagcgugaacgccggcgugaccacccccgugagcaccuacaugcugaccaacagcgagcugcugagccugaucaacgacaugcccaucaccaacgaccagaagaagcugaugagcaacaacgugcagaucgugagacagcagagcuacagcaucaugugcaucaucaaggaggaggugcuggccuacguggugcagcugccccuguacggcgugaucgacacccccugcuggaagcugcacaccagcccccugugcaccaccaacaccaaggagggcagcaacaucugccugaccagaaccgacagaggcugguacugcgacaacgccggcagcgugagcuucuucccccaggccgagaccugcaaggugcagagcaacagaguguucugcgacaccaugaacagccugacccugcccagcgaggugaaccugugcaacaucgacaucuucaaccccaaguacgacugcaagaucaugaccagcaagaccgacgugagcagcagcgugaucaccagccugggcgccaucgugagcugcuacggcaagaccaagugcaccgccagcaacaagaacagaggcaucaucaagaccuucagcaacggcugcgacuacgugagcaacaagggcguggacaccgugagcgugggcaacacccuguacugcgugaacaagcaggagggccagagccuguacgugaagggcgagcccaucaucaacuucuacgacccccugguguuccccagcgacgaguucgacgccagcaucagccaggugaacgagaagaucaaccagagccuggccuucaucagaaagagcgacgagcugcugcacaacgugaacgugggcaagagcaccaccaacaucaugaucaccaccaucaucaucgugaucaucgugauccugcugcugcugaucgccgugggccuguuccuguacugcaaggccagaagcacccccgugacccugagcaaggaccagcugagcggcaucaacaacaucgccuucagcaacugaggacuagugaagggaacacccaaauuuaauucagccuuaagcacaauuaauuaagagugaaacguaauuguacaagcaguuggucacccaccauagggcaugaucaacaccgcaaccuuuccuuuuucccccagugauucugaaaaaccccucuucccuucagcuugcuuagauguuccaaauuuaguaagcuuaaggcggccuacagaagaaaaagaaaaaaaaggccacaaaaguucccucucacuuucaguaaauaaaauaaaagcagcaacagaaauaaagaaauaaaugaaauucaaaaugaaauaaauauuguguugugcagcauuaaaaaaucaauaaaaauuaaaaaugagcaagaucuaaaaaaaaaaaaaaaaaaaaaaaaaaaaaaaaaaaaaaaaaaaaaaaaaaaaaaaaaaaaaaaaugcaucccccccccccccccccccccccccccccccaaaggcucuuuucagagccaccagaauu

SEQ ID NO: 14090 - RNA, 2277 nt, Artificial Sequence
  mRNA product Design d-3 comprising derived and/or modified sequence from HRSV(Memphis-37)__AIY60640.1__F_DSCav1_mut1 (opt5)
gggagagggcgcuuggcuugcaaggacccugagcugcggcauugaagcacacccaacccaacucgacugaagucagccucacugaaccggaucugagaaucuucucucucugggcuugccagggcucuccgaaccuagcuagcauccucuucaauuccaacuagaaagcuuaccauggagcugcccauccucaagaccaacgccauuacaacgauccuggcugccgugacccuuugcuucgcgagcucccagaauauuacagaagaguuuuaccaaucuaccuguagcgcugucuccaaaggcuaucugggggcccucagaacaggaugguacaccucuguuaucacaauugaacugagcaacaucaaggagaauaaaugcaacggcaccgacgccaaggugaaacuuaucaagcaggaacuggauaaguauaaaaaugcugugacggagcuccagcugcugaugcaguccaccccugccgcugggucuggaagcgccauuuguuccggcaucgcggucugcaaggugcuccaccuggagggggaaguuaacaaaauuaagaaugcccuucugagcacaaacaaagcuguggucucucucuccaauggagugagcguucugaccuucaaggugcuugaccugaagaacuacaucgauaaacaacuccugccgauucugaauaagcagucuuguuccauccccaacauugagacagucaucgaauuucagcagaaaaauaaccggcuccuggagaucacccgcgaguucagcgugaaugccggcgugacgacaccugucucuaccuauaugcuuacaaacuccgaacugcucagccugauuaacgacaugcccaucaccaaugaucaaaagaaacuuauguccaacaauguucagauugugagacagcagucuuacagcaucaugugcauuaucaaggaggaagugcuggcuuaugucgugcaacucccucuguacggcguuaucgacacccccuguuggaaacugcauacauccccucucugcacgaccaacacaaaggaggggagcaauauuugucugacccggacagaucgcggaugguacugcgacaacgccggcucuguguccuuuuucccgcaggcggaaaccuguaagguccagagcaauagaguguuuugcgauacgaugaacucucuuacacugcccagcgagguuaaucucugcaacaucgacauuuucaauccuaaauaugauuguaagaucaugaccuccaaaaccgacgugucuagcuccgucauuacaagccugggggccaucgugucuugcuacggaaagaccaaauguacagcuuccaacaagaaucggggcaucauuaagacguuuagcaacgggugcgauuaugucucuaauaaaggaguggacaccguuuccgugggcaacacacuuuacugugucaacaagcaagagggccagagccuguaugugaaaggggaacccaucauuaauuucuacgacccucucguuuuucccuccgaugaguucgacgccucuaucagccaggugaacgaaaagauuaaucagucccuggcuuuuauccgcaaaucugaugagcugcuccacaacgucaaugugggaaagagcaccacaaacauuaugaucaccacgaucauuaucgugauuaucguuauucugcuucugcucaucgccgucggccuguuccuguauugcaaggccagauccaccccggugacacuuagcaaagaccaacucucugggaucaauaacauugcuuucuccaauugaggacuagugaagggaacacccaaauuuaauucagccuuaagcacaauuaauuaagagugaaacguaauuguacaagcaguuggucacccaccauagggcaugaucaacaccgcaaccuuuccuuuuucccccagugauucugaaaaaccccucuucccuucagcuugcuuagauguuccaaauuuaguaagcuuaaggcggccuacagaagaaaaagaaaaaaaaggccacaaaaguucccucucacuuucaguaaauaaaauaaaagcagcaacagaaauaaagaaauaaaugaaauucaaaaugaaauaaauauuguguugugcagcauuaaaaaaucaauaaaaauuaaaaaugagcaagaucuaaaaaaaaaaaaaaaaaaaaaaaaaaaaaaaaaaaaaaaaaaaaaaaaaaaaaaaaaaaaaaaaugcaucccccccccccccccccccccccccccccccaaaggcucuuuucagagccaccagaauu

SEQ ID NO: 14091 - RNA, 2277 nt, Artificial Sequence
  mRNA product Design d-3 comprising derived and/or modified sequence from HRSV(Memphis-37)__AIY60640.1__F_DSCav1_mut1 (opt6)
gggagagggcgcuuggcuugcaaggacccugagcugcggcauugaagcacacccaacccaacucgacugaagucagccucacugaaccggaucugagaaucuucucucucugggcuugccagggcucuccgaaccuagcuagcauccucuucaauuccaacuagaaagcuuaccauggaacuuccaauucuaaaaaccaaugcuauaacaacaauauuagcagcaguuacauuaugcuucgccucaucacaaaauaucacagaagaauuuuaccaauccacaugcucagcaguaucuaaaggguaccuaggagcccuacgaacaggaugguacacaucaguaauaacaauagaacucucaaacaucaaagaaaacaaaugcaauggaacagacgcuaaaguaaaauuaauaaaacaagaacuagacaaauacaaaaacgccgucaccgaacuucaguuacucaugcaaagcacaccugcagcaggaucagguucagcaauaugcucaggaauagcaguuugcaaaguauuacaccuagaaggugaagucaacaaaauaaaaaacgcacuucuaaguacuaacaaagcuguaguaucauuaucaaacggaguauccguacuaaccuuuaaaguccuagaccuaaaaaacuacauagacaaacaacuacucccaauacucaauaaacaauccugcucaauucccaacaucgaaacaguaauagaauuucaacaaaaaaacaaucgccuucuagaaauaacaagagaauuuucagucaacgccggaguaacaacaccaguaucaacauauaugcuaacaaacagugaacuauuauccuuaauaaacgacaugccaauaacaaaugaccaaaaaaaacuaauguccaauaauguccaaauaguaagacaacaaagcuauucaauuauguguauaauaaaagaagaaguauuagcauacguaguucaacuaccacuauauggcguuauagacacaccaugcuggaaauuacacacaagcccacuaugcacaacaaauacaaaagaaggauccaacauuugcuuaacuagaacugacagaggaugguacugcgacaacgcuggaucagucucuuucuucccacaagcagaaaccuguaaaguacaaucaaauagagucuucugcgacacaaugaacucacuaacucucccaucugaaguaaacuuaugcaacaucgauauauuuaacccaaaauacgauuguaaaauaaugacauccaaaacagacguuucaucaagcguaaucaccucccucggagcaaucguaagcugcuacgguaaaacaaaaugcacagcauccaacaaaaacagaggcaucauaaaaacauucucaaacggaugugacuauguaucaaacaaaggaguagacacaguuucaguaggcaauaccuuauacugugucaauaaacaagaaggacaaucacuauauguaaaaggagaaccuauaauaaacuucuacgacccccucgucuucccuagcgaugaauuugacgcaucaauaucgcaaguaaacgaaaaaauaaaccaaucauuagccuuuauaagaaaaucagacgaauuauuacacaacguaaacguggggaaaagcacaacuaacaucaugauaacaacuaucauaauuguaaucaucgucauccuauuacuccuaaucgcaguaggacuauuccuauacugcaaagcuagaucaacaccagucacccuaucgaaagaucaauugucaggaauaaacaauauagccuuuucaaauuaaggacuagugaagggaacacccaaauuuaauucagccuuaagcacaauuaauuaagagugaaacguaauuguacaagcaguuggucacccaccauagggcaugaucaacaccgcaaccuuuccuuuuucccccagugauucugaaaaaccccucuucccuucagcuugcuuagauguuccaaauuuaguaagcuuaaggcggccuacagaagaaaaagaaaaaaaaggccacaaaaguucccucucacuuucaguaaauaaaauaaaagcagcaacagaaauaaagaaauaaaugaaauucaaaaugaaauaaauauuguguugugcagcauuaaaaaaucaauaaaaauuaaaaaugagcaagaucuaaaaaaaaaaaaaaaaaaaaaaaaaaaaaaaaaaaaaaaaaaaaaaaaaaaaaaaaaaaaaaaaugcaucccccccccccccccccccccccccccccccaaaggcucuuuucagagccaccagaauu

SEQ ID NO: 14092 - RNA, 2277 nt, Artificial Sequence
  mRNA product Design d-3 comprising derived and/or modified sequence from HRSV(Memphis-37)__AIY60640.1__F_DSCav1_mut1 (opt11)
gggagagggcgcuuggcuugcaaggacccugagcugcggcauugaagcacacccaacccaacucgacugaagucagccucacugaaccggaucugagaaucuucucucucugggcuugccagggcucuccgaaccuagcuagcauccucuucaauuccaacuagaaagcuuaccauggaacuccccauccucaaaacgaacgccaucacaaccauccucgccgccgucacccucugcuucgcgucaucccaaaacauaacugaagaguucuaucaaucaaccugcuccgcagucucaaaaggcuaccucggcgcccuacggaccggcugguacacaagcgucaucacaauagaacuuuccaacaucaaagaaaacaaauguaacggcaccgacgcaaaagucaaacucauaaaacaagaacuagacaaauauaaaaacgccguaacugaacuacaacuccucaugcaaucaacuccugcagccgguagcggcuccgcaaucugcucaggcaucgcagucugcaaagucuuacaccuagaaggcgaagucaacaaaaucaagaacgcccuacuauccacaaacaaagcaguagucucucuauccaacggagucuccguccucacauucaaaguacucgaccuaaagaacuacaucgacaaacaacuacuaccaaucuuaaacaaacaauccugcucaaucccuaacauugaaaccgucauagaguuccaacagaaaaacaaccgccuccucgaaauaaccagagaguucucagucaacgccggcgucaccaccccggucucaaccuacaugcuaaccaacucugaacuucucagccuaaucaacgacaugcccauuaccaacgaccaaaagaaacucauguccaauaacguccaaaucguucgacaacaauccuacucaaucaugugcaucauaaaagaagaaguccuagcauacgucguccaacucccacuauacggcguaaucgacacccccugcuggaaacuccacaccuccccucucuguaccaccaacaccaaagaaggguccaacaucugccucacgcgcaccgaccgaggcugguauugcgacaaugcaggcucugucuccuucuucccccaagccgaaaccugcaaaguccaaucuaaccgcgucuucugcgacaccaugaacagucuuacccucccgucagaagucaaccucugcaacauagauaucuucaacccaaaauacgacugcaaaaucaugaccucaaaaaccgacguuuccucauccguuaucaccucccucggcgcaaucgucagcugcuacggcaagacaaagugcacggcuucaaacaaaaaccgcggaaucaucaagacauucagcaacggcugcgacuacguauccaacaaaggaguggacacagucuccguuggaaacacccucuacugcguaaacaaacaagaaggccaaucacucuacgucaaaggcgaacccaucaucaacuucuacgacccacucgucuuccccuccgacgaguucgacgccucaaucagccaagucaacgagaaaauuaaccagucacucgccuucauacgcaaauccgacgaacuucuacacaacguaaacgucggaaaaucaaccacaaacaucaugauuaccacaauuaucauagucaucauaguaauccuccugcuacucauagcagucggacucuuccuauacugcaaagcccgcuccaccccugucacccuauccaaagaccaacuuuccggcaucaacaacauagccuuuuccaacuaaggacuagugaagggaacacccaaauuuaauucagccuuaagcacaauuaauuaagagugaaacguaauuguacaagcaguuggucacccaccauagggcaugaucaacaccgcaaccuuuccuuuuucccccagugauucugaaaaaccccucuucccuucagcuugcuuagauguuccaaauuuaguaagcuuaaggcggccuacagaagaaaaagaaaaaaaaggccacaaaaguucccucucacuuucaguaaauaaaauaaaagcagcaacagaaauaaagaaauaaaugaaauucaaaaugaaauaaauauuguguugugcagcauuaaaaaaucaauaaaaauuaaaaaugagcaagaucuaaaaaaaaaaaaaaaaaaaaaaaaaaaaaaaaaaaaaaaaaaaaaaaaaaaaaaaaaaaaaaaaugcaucccccccccccccccccccccccccccccccaaaggcucuuuucagagccaccagaauu

SEQ ID NO: 14093 - RNA, 1960 nt, Artificial Sequence
  mRNA product Design d-4 comprising derived and/or modified sequence from HRSV(Memphis-37)__AIY60640.1__F_DSCav1_mut1 (opt1)
gggagagucccgcagucggcguccagcggcucugcuuguucgugugugugucguugcaggccuuauucaagcuuaccauggagcugcccauccucaagaccaacgccaucaccacgauccuggccgcggugacccugugcuucgccagcucccagaacaucaccgaggaguucuaccagagcacgugcuccgccgucagcaagggcuaccucggcgcccugcgcaccgggugguacaccagcgugaucaccaucgagcuguccaacaucaaggagaacaagugcaacggcaccgacgccaaggugaagcucaucaagcaggagcuggacaaguacaagaacgcggucacggagcugcagcuccugaugcagagcaccccggccgccggcuccgggagcgcgaucugcuccggcaucgccgucugcaaggugcugcaccucgagggcgaggugaacaagaucaagaacgcccugcuguccaccaacaaggccgucgugagccucuccaacggggugagcguccugaccuucaaggugcuggaccucaagaacuacaucgacaagcagcugcugcccauccugaacaagcagagcugcuccauccccaacaucgagaccgucaucgaguuccagcagaagaacaaccgccuccuggagaucacgcgggaguucagcgugaacgcgggcgugaccacccccgucuccaccuacaugcugacgaacagcgagcuccugucccugaucaacgacaugccgaucaccaacgaccagaagaagcucaugagcaacaacgugcagaucgugcgccagcaguccuacagcaucaugugcaucaucaaggaggagguccuggccuacguggugcagcugccccucuacggggucaucgacacccccugcuggaagcugcacaccagcccccugugcacgaccaacaccaaggagggcuccaacaucugccucacccggacggaccgcgggugguacugcgacaacgccggcagcguguccuucuucccgcaggccgagaccugcaagguccagagcaaccggguguucugcgacaccaugaacucccugacccugcccagcgaggugaaccucugcaacaucgacaucuucaaccccaaguacgacugcaagaucaugacguccaagaccgacgucagcuccagcgugaucaccucccugggcgccaucgugagcugcuacgggaagaccaagugcacggcgagcaacaagaaccgcggcaucaucaagaccuucuccaacgggugcgacuacgucagcaacaagggcguggacaccguguccgucggcaacacccuguacugcgugaacaagcaggagggccagagccucuacgugaagggggagcccaucaucaacuucuacgacccgcuggucuuccccuccgacgaguucgacgccagcaucucccaggugaacgagaagaucaaccagagccuggccuucauccggaaguccgacgagcuccugcacaacgugaacgucggcaagagcaccacgaacaucaugaucaccaccaucaucaucgugaucaucgugauccugcugcuccugaucgccgucgggcuguuccucuacugcaaggcccgcuccacccccgugacgcugagcaaggaccagcuguccgggaucaacaacaucgcguucagcaacugaggacuaguggaagcauuuuccuggcugauuaaaagaaauuacucagcuauggucaucuguuccuguuagaaggcuaugcagcauauuauauacuaugcgcauguuaugaaaugcauaauaaaaaauuuuaaaaaaucuaaaagaucuaaaaaaaaaaaaaaaaaaaaaaaaaaaaaaaaaaaaaaaaaaaaaaaaaaaaaaaaaaaaaaaaugcaucccccccccccccccccccccccccccccccaaaggcucuuuucagagccaccagaauu

SEQ ID NO: 14094 - RNA, 1960 nt, Artificial Sequence
  mRNA product Design d-4 comprising derived and/or modified sequence from HRSV(Memphis-37)__AIY60640.1__F_DSCav1_mut1 (opt1)
gggagagucccgcagucggcguccagcggcucugcuuguucgugugugugucguugcaggccuuauucaagcuuaccauggagcugcccauccucaagaccaacgccaucaccacgauccuggccgcggugacccugugcuucgccagcucccagaacaucaccgaggaguucuaccagagcacgugcuccgccgucagcaagggcuaccucggggcccugcgcaccggcugguacaccuccgugaucaccaucgagcugagcaacaucaaggagaacaagugcaacgggaccgacgccaaggugaagcucaucaagcaggagcuggacaaguacaagaacgcggucacggagcugcagcuccugaugcaguccaccccggccgccggcagcggguccgccaucugcagcggcaucgcggugugcaaggugcugcaccucgagggcgaggucaacaagaucaagaacgcccugcuguccaccaacaaggccguggugagccucuccaacggggucagcgugcugaccuucaaggugcuggaccucaagaacuacaucgacaagcagcugcugcccauccucaacaagcaguccugcagcauccccaacaucgagacggucaucgaguuccagcagaagaacaaccggcugcuggagaucacccgcgaguucuccgugaacgccggcgugaccacccccgucagcacguacaugcucaccaacuccgagcugcugagccucaucaacgacaugccgaucaccaacgaccagaagaagcugaugagcaacaacgugcagaucgugcggcagcaguccuacagcaucaugugcaucaucaaggaggagguccuggccuacguggugcagcucccccuguacggggucaucgacacccccugcuggaagcugcacacgagcccccucugcaccaccaacaccaaggagggcuccaacaucugccugacgcgcaccgaccgggggugguacugcgacaacgcgggcuccgugagcuucuucccgcaggccgagaccugcaaggugcaguccaaccgcgucuucugcgacaccaugaacagccugacgcuccccuccgaggugaaccugugcaacaucgacaucuucaaccccaaguacgacugcaagaucaugaccagcaagaccgacgucuccagcuccgugaucaccagccugggcgccaucguguccugcuacgggaagacgaagugcaccgccagcaacaagaaccggggcaucaucaagaccuucuccaacgggugcgacuacgucagcaacaagggcguggacaccguguccgucggcaacacgcucuacugcgugaacaagcaggaggggcagagccuguacgugaagggcgagcccaucaucaacuucuacgacccgcuggucuuccccagcgacgaguucgacgccuccaucagccaggugaacgagaagaucaaccagucccucgcguucauccgcaagagcgacgagcugcugcacaacgugaacgucgggaaguccaccaccaacaucaugaucaccaccaucaucaucgugaucaucgugauccuccugcugcucaucgccgucggccuguuccuguacugcaaggcccggagcacgcccgugacccuguccaaggaccagcucagcgggaucaacaacaucgccuucuccaacugaggacuaguggaagcauuuuccuggcugauuaaaagaaauuacucagcuauggucaucuguuccuguuagaaggcuaugcagcauauuauauacuaugcgcauguuaugaaaugcauaauaaaaaauuuuaaaaaaucuaaaagaucuaaaaaaaaaaaaaaaaaaaaaaaaaaaaaaaaaaaaaaaaaaaaaaaaaaaaaaaaaaaaaaaaugcaucccccccccccccccccccccccccccccccaaaggcucuuuucagagccaccagaauu

SEQ ID NO: 14095 - RNA, 1960 nt, Artificial Sequence
  mRNA product Design d-4 comprising derived and/or modified sequence from HRSV(Memphis-37)__AIY60640.1__F_DSCav1_mut1 (opt2)
gggagagucccgcagucggcguccagcggcucugcuuguucgugugugugucguugcaggccuuauucaagcuuaccauggagcuccccauccucaagaccaacgccaucaccaccauccucgccgccgucacccucugcuucgccuccucccagaacaucaccgaggaguucuaccaguccaccugcuccgccgucuccaagggcuaccucggcgcccuccgcaccggcugguacaccuccgucaucaccaucgagcucuccaacaucaaggagaacaagugcaacggcaccgacgccaaggucaagcucaucaagcaggagcucgacaaguacaagaacgccgucaccgagcuccagcuccucaugcaguccacccccgccgccggcuccggcuccgccaucugcuccggcaucgccgucugcaagguccuccaccucgagggcgaggucaacaagaucaagaacgcccuccucuccaccaacaaggccgucgucucccucuccaacggcgucuccguccucaccuucaagguccucgaccucaagaacuacaucgacaagcagcuccuccccauccucaacaagcaguccugcuccauccccaacaucgagaccgucaucgaguuccagcagaagaacaaccgccuccucgagaucacccgcgaguucuccgucaacgccggcgucaccacccccgucuccaccuacaugcucaccaacuccgagcuccucucccucaucaacgacaugcccaucaccaacgaccagaagaagcucauguccaacaacguccagaucguccgccagcaguccuacuccaucaugugcaucaucaaggaggagguccucgccuacgucguccagcucccccucuacggcgucaucgacacccccugcuggaagcuccacaccuccccccucugcaccaccaacaccaaggagggcuccaacaucugccucacccgcaccgaccgcggcugguacugcgacaacgccggcuccgucuccuucuucccccaggccgagaccugcaagguccaguccaaccgcgucuucugcgacaccaugaacucccucacccuccccuccgaggucaaccucugcaacaucgacaucuucaaccccaaguacgacugcaagaucaugaccuccaagaccgacgucuccuccuccgucaucaccucccucggcgccaucgucuccugcuacggcaagaccaagugcaccgccuccaacaagaaccgcggcaucaucaagaccuucuccaacggcugcgacuacgucuccaacaagggcgucgacaccgucuccgucggcaacacccucuacugcgucaacaagcaggagggccagucccucuacgucaagggcgagcccaucaucaacuucuacgacccccucgucuuccccuccgacgaguucgacgccuccaucucccaggucaacgagaagaucaaccagucccucgccuucauccgcaaguccgacgagcuccuccacaacgucaacgucggcaaguccaccaccaacaucaugaucaccaccaucaucaucgucaucaucgucauccuccuccuccucaucgccgucggccucuuccucuacugcaaggcccgcuccacccccgucacccucuccaaggaccagcucuccggcaucaacaacaucgccuucuccaacugaggacuaguggaagcauuuuccuggcugauuaaaagaaauuacucagcuauggucaucuguuccuguuagaaggcuaugcagcauauuauauacuaugcgcauguuaugaaaugcauaauaaaaaauuuuaaaaaaucuaaaagaucuaaaaaaaaaaaaaaaaaaaaaaaaaaaaaaaaaaaaaaaaaaaaaaaaaaaaaaaaaaaaaaaaugcaucccccccccccccccccccccccccccccccaaaggcucuuuucagagccaccagaauu

SEQ ID NO: 14096 - RNA, 1960 nt, Artificial Sequence
  mRNA product Design d-4 comprising derived and/or modified sequence from HRSV(Memphis-37)__AIY60640.1__F_DSCav1_mut1 (opt3)
gggagagucccgcagucggcguccagcggcucugcuuguucgugugugugucguugcaggccuuauucaagcuuaccauggagcugcccauccucaagaccaacgccauuacaacuauacuugcugcagugacgcugugcuucgccagcucccagaauaucaccgaagaguuuuaccaaucuacauguucagcggucaguaaaggcuauuugggggcuuuaagaacuggaugguacaccagcguuauuacaaucgaacuguccaacauuaaggagaauaaaugcaacgguaccgacgccaaggugaaacuaaucaagcaggaacucgauaaguauaaaaaugcaguaacugagcugcagcuucugaugcagucuacuccugccgcuggcucggggucagcaauauguagcggaaucgccgugugcaaggucuugcaccucgagggcgaagugaacaaaauuaagaaugcucugcugaguaccaacaaagccguugugucccucucuaauggugucagcguguuaacguucaagguacuggaccuuaagaacuacaucgauaaacaauugcugccaauucuaaauaagcaguccuguucaaucccgaacauagagacuguuauugaauuucagcagaaaaauaacaggcuccuggagaucacccgggaguucagugugaaugcgggggucacaacucccgugagcaccuauaugcuuacaaacucugaacuguugucccucauuaacgacaugccuaucaccaaugaucaaaagaaacugaugucaaacaaugugcagaucguccgccagcagagcuacaguauuaugugcauaaucaaggaggaaguuuuagcauaugugguacaacugccacucuacggagugauugacacgcccuguuggaaacuucauacuucuccucugugcacaaccaacacuaaggagggcuccaauaucuguuugacacgaaccgaucguggcugguacugcgacaacgccgggagcgucucguuuuucccacaggcugaaacguguaaggugcagucuaauagaguguuuugcgauaccaugaacucccuaacacugcccucagagguuaaucucugcaacauagacauuuucaauccuaaauaugauuguaagaucaugacaaguaaaaccgacgucagcuccucugugaucacaagccugggagccauuguaucaugcuacgguaagacuaaauguaccgcaaguaacaagaauaggggcaucauuaagacauuuuccaacgggugcgauuauguuagcaauaaaggaguggacaccgucucugugggcaacacucuuuacugugucaacaagcaagagggucagucacuguaugugaaaggggaaccaauaaucaauuucuacgacccguugguuuuucccagugaugaguucgacgcuagcauuucccaggugaacgaaaagaucaaucagucucucgccuuuauccggaaaucggaugagcuguuacacaacguaaaugucggaaagagcacgacaaacauuaugauaaccacuaucauuaucgugauuaucguuauacugcuacuccugaucgcggugggccuuuucuuguauugcaaggcccgcuccaccccugucacacugucaaaagaccaacucaguggcauuaauaacaucgcauucucuaauugaggacuaguggaagcauuuuccuggcugauuaaaagaaauuacucagcuauggucaucuguuccuguuagaaggcuaugcagcauauuauauacuaugcgcauguuaugaaaugcauaauaaaaaauuuuaaaaaaucuaaaagaucuaaaaaaaaaaaaaaaaaaaaaaaaaaaaaaaaaaaaaaaaaaaaaaaaaaaaaaaaaaaaaaaaugcaucccccccccccccccccccccccccccccccaaaggcucuuuucagagccaccagaauu

SEQ ID NO: 14097 - RNA, 1960 nt, Artificial Sequence
  mRNA product Design d-4 comprising derived and/or modified sequence from HRSV(Memphis-37)__AIY60640.1__F_DSCav1_mut1 (opt4)
gggagagucccgcagucggcguccagcggcucugcuuguucgugugugugucguugcaggccuuauucaagcuuaccauggagcugcccauccugaagaccaacgccaucaccaccauccuggccgccgugacccugugcuucgccagcagccagaacaucaccgaggaguucuaccagagcaccugcagcgccgugagcaagggcuaccugggcgcccugagaaccggcugguacaccagcgugaucaccaucgagcugagcaacaucaaggagaacaagugcaacggcaccgacgccaaggugaagcugaucaagcaggagcuggacaaguacaagaacgccgugaccgagcugcagcugcugaugcagagcacccccgccgccggcagcggcagcgccaucugcagcggcaucgccgugugcaaggugcugcaccuggagggcgaggugaacaagaucaagaacgcccugcugagcaccaacaaggccguggugagccugagcaacggcgugagcgugcugaccuucaaggugcuggaccugaagaacuacaucgacaagcagcugcugcccauccugaacaagcagagcugcagcauccccaacaucgagaccgugaucgaguuccagcagaagaacaacagacugcuggagaucaccagagaguucagcgugaacgccggcgugaccacccccgugagcaccuacaugcugaccaacagcgagcugcugagccugaucaacgacaugcccaucaccaacgaccagaagaagcugaugagcaacaacgugcagaucgugagacagcagagcuacagcaucaugugcaucaucaaggaggaggugcuggccuacguggugcagcugccccuguacggcgugaucgacacccccugcuggaagcugcacaccagcccccugugcaccaccaacaccaaggagggcagcaacaucugccugaccagaaccgacagaggcugguacugcgacaacgccggcagcgugagcuucuucccccaggccgagaccugcaaggugcagagcaacagaguguucugcgacaccaugaacagccugacccugcccagcgaggugaaccugugcaacaucgacaucuucaaccccaaguacgacugcaagaucaugaccagcaagaccgacgugagcagcagcgugaucaccagccugggcgccaucgugagcugcuacggcaagaccaagugcaccgccagcaacaagaacagaggcaucaucaagaccuucagcaacggcugcgacuacgugagcaacaagggcguggacaccgugagcgugggcaacacccuguacugcgugaacaagcaggagggccagagccuguacgugaagggcgagcccaucaucaacuucuacgacccccugguguuccccagcgacgaguucgacgccagcaucagccaggugaacgagaagaucaaccagagccuggccuucaucagaaagagcgacgagcugcugcacaacgugaacgugggcaagagcaccaccaacaucaugaucaccaccaucaucaucgugaucaucgugauccugcugcugcugaucgccgugggccuguuccuguacugcaaggccagaagcacccccgugacccugagcaaggaccagcugagcggcaucaacaacaucgccuucagcaacugaggacuaguggaagcauuuuccuggcugauuaaaagaaauuacucagcuauggucaucuguuccuguuagaaggcuaugcagcauauuauauacuaugcgcauguuaugaaaugcauaauaaaaaauuuuaaaaaaucuaaaagaucuaaaaaaaaaaaaaaaaaaaaaaaaaaaaaaaaaaaaaaaaaaaaaaaaaaaaaaaaaaaaaaaaugcaucccccccccccccccccccccccccccccccaaaggcucuuuucagagccaccagaauu

SEQ ID NO: 14098 - RNA, 1960 nt, Artificial Sequence
  mRNA product Design d-4 comprising derived and/or modified sequence from HRSV(Memphis-37)__AIY60640.1__F_DSCav1_mut1 (opt5)
gggagagucccgcagucggcguccagcggcucugcuuguucgugugugugucguugcaggccuuauucaagcuuaccauggagcugcccauccucaagaccaacgccauuacaacgauccuggcugccgugacccuuugcuucgcgagcucccagaauauuacagaagaguuuuaccaaucuaccuguagcgcugucuccaaaggcuaucugggggcccucagaacaggaugguacaccucuguuaucacaauugaacugagcaacaucaaggagaauaaaugcaacggcaccgacgccaaggugaaacuuaucaagcaggaacuggauaaguauaaaaaugcugugacggagcuccagcugcugaugcaguccaccccugccgcugggucuggaagcgccauuuguuccggcaucgcggucugcaaggugcuccaccuggagggggaaguuaacaaaauuaagaaugcccuucugagcacaaacaaagcuguggucucucucuccaauggagugagcguucugaccuucaaggugcuugaccugaagaacuacaucgauaaacaacuccugccgauucugaauaagcagucuuguuccauccccaacauugagacagucaucgaauuucagcagaaaaauaaccggcuccuggagaucacccgcgaguucagcgugaaugccggcgugacgacaccugucucuaccuauaugcuuacaaacuccgaacugcucagccugauuaacgacaugcccaucaccaaugaucaaaagaaacuuauguccaacaauguucagauugugagacagcagucuuacagcaucaugugcauuaucaaggaggaagugcuggcuuaugucgugcaacucccucuguacggcguuaucgacacccccuguuggaaacugcauacauccccucucugcacgaccaacacaaaggaggggagcaauauuugucugacccggacagaucgcggaugguacugcgacaacgccggcucuguguccuuuuucccgcaggcggaaaccuguaagguccagagcaauagaguguuuugcgauacgaugaacucucuuacacugcccagcgagguuaaucucugcaacaucgacauuuucaauccuaaauaugauuguaagaucaugaccuccaaaaccgacgugucuagcuccgucauuacaagccugggggccaucgugucuugcuacggaaagaccaaauguacagcuuccaacaagaaucggggcaucauuaagacguuuagcaacgggugcgauuaugucucuaauaaaggaguggacaccguuuccgugggcaacacacuuuacugugucaacaagcaagagggccagagccuguaugugaaaggggaacccaucauuaauuucuacgacccucucguuuuucccuccgaugaguucgacgccucuaucagccaggugaacgaaaagauuaaucagucccuggcuuuuauccgcaaaucugaugagcugcuccacaacgucaaugugggaaagagcaccacaaacauuaugaucaccacgaucauuaucgugauuaucguuauucugcuucugcucaucgccgucggccuguuccuguauugcaaggccagauccaccccggugacacuuagcaaagaccaacucucugggaucaauaacauugcuuucuccaauugaggacuaguggaagcauuuuccuggcugauuaaaagaaauuacucagcuauggucaucuguuccuguuagaaggcuaugcagcauauuauauacuaugcgcauguuaugaaaugcauaauaaaaaauuuuaaaaaaucuaaaagaucuaaaaaaaaaaaaaaaaaaaaaaaaaaaaaaaaaaaaaaaaaaaaaaaaaaaaaaaaaaaaaaaaugcaucccccccccccccccccccccccccccccccaaaggcucuuuucagagccaccagaauu

SEQ ID NO: 14099 - RNA, 1960 nt, Artificial Sequence
  mRNA product Design d-4 comprising derived and/or modified sequence from HRSV(Memphis-37)__AIY60640.1__F_DSCav1_mut1 (opt6)
gggagagucccgcagucggcguccagcggcucugcuuguucgugugugugucguugcaggccuuauucaagcuuaccauggaacuuccaauucuaaaaaccaaugcuauaacaacaauauuagcagcaguuacauuaugcuucgccucaucacaaaauaucacagaagaauuuuaccaauccacaugcucagcaguaucuaaaggguaccuaggagcccuacgaacaggaugguacacaucaguaauaacaauagaacucucaaacaucaaagaaaacaaaugcaauggaacagacgcuaaaguaaaauuaauaaaacaagaacuagacaaauacaaaaacgccgucaccgaacuucaguuacucaugcaaagcacaccugcagcaggaucagguucagcaauaugcucaggaauagcaguuugcaaaguauuacaccuagaaggugaagucaacaaaauaaaaaacgcacuucuaaguacuaacaaagcuguaguaucauuaucaaacggaguauccguacuaaccuuuaaaguccuagaccuaaaaaacuacauagacaaacaacuacucccaauacucaauaaacaauccugcucaauucccaacaucgaaacaguaauagaauuucaacaaaaaaacaaucgccuucuagaaauaacaagagaauuuucagucaacgccggaguaacaacaccaguaucaacauauaugcuaacaaacagugaacuauuauccuuaauaaacgacaugccaauaacaaaugaccaaaaaaaacuaauguccaauaauguccaaauaguaagacaacaaagcuauucaauuauguguauaauaaaagaagaaguauuagcauacguaguucaacuaccacuauauggcguuauagacacaccaugcuggaaauuacacacaagcccacuaugcacaacaaauacaaaagaaggauccaacauuugcuuaacuagaacugacagaggaugguacugcgacaacgcuggaucagucucuuucuucccacaagcagaaaccuguaaaguacaaucaaauagagucuucugcgacacaaugaacucacuaacucucccaucugaaguaaacuuaugcaacaucgauauauuuaacccaaaauacgauuguaaaauaaugacauccaaaacagacguuucaucaagcguaaucaccucccucggagcaaucguaagcugcuacgguaaaacaaaaugcacagcauccaacaaaaacagaggcaucauaaaaacauucucaaacggaugugacuauguaucaaacaaaggaguagacacaguuucaguaggcaauaccuuauacugugucaauaaacaagaaggacaaucacuauauguaaaaggagaaccuauaauaaacuucuacgacccccucgucuucccuagcgaugaauuugacgcaucaauaucgcaaguaaacgaaaaaauaaaccaaucauuagccuuuauaagaaaaucagacgaauuauuacacaacguaaacguggggaaaagcacaacuaacaucaugauaacaacuaucauaauuguaaucaucgucauccuauuacuccuaaucgcaguaggacuauuccuauacugcaaagcuagaucaacaccagucacccuaucgaaagaucaauugucaggaauaaacaauauagccuuuucaaauuaaggacuaguggaagcauuuuccuggcugauuaaaagaaauuacucagcuauggucaucuguuccuguuagaaggcuaugcagcauauuauauacuaugcgcauguuaugaaaugcauaauaaaaaauuuuaaaaaaucuaaaagaucuaaaaaaaaaaaaaaaaaaaaaaaaaaaaaaaaaaaaaaaaaaaaaaaaaaaaaaaaaaaaaaaaugcaucccccccccccccccccccccccccccccccaaaggcucuuuucagagccaccagaauu

SEQ ID NO: 14100 - RNA, 1960 nt, Artificial Sequence
  mRNA product Design d-4 comprising derived and/or modified sequence from HRSV(Memphis-37)__AIY60640.1__F_DSCav1_mut1 (opt11)
gggagagucccgcagucggcguccagcggcucugcuuguucgugugugugucguugcaggccuuauucaagcuuaccauggaacuccccauccucaaaacgaacgccaucacaaccauccucgccgccgucacccucugcuucgcgucaucccaaaacauaacugaagaguucuaucaaucaaccugcuccgcagucucaaaaggcuaccucggcgcccuacggaccggcugguacacaagcgucaucacaauagaacuuuccaacaucaaagaaaacaaauguaacggcaccgacgcaaaagucaaacucauaaaacaagaacuagacaaauauaaaaacgccguaacugaacuacaacuccucaugcaaucaacuccugcagccgguagcggcuccgcaaucugcucaggcaucgcagucugcaaagucuuacaccuagaaggcgaagucaacaaaaucaagaacgcccuacuauccacaaacaaagcaguagucucucuauccaacggagucuccguccucacauucaaaguacucgaccuaaagaacuacaucgacaaacaacuacuaccaaucuuaaacaaacaauccugcucaaucccuaacauugaaaccgucauagaguuccaacagaaaaacaaccgccuccucgaaauaaccagagaguucucagucaacgccggcgucaccaccccggucucaaccuacaugcuaaccaacucugaacuucucagccuaaucaacgacaugcccauuaccaacgaccaaaagaaacucauguccaauaacguccaaaucguucgacaacaauccuacucaaucaugugcaucauaaaagaagaaguccuagcauacgucguccaacucccacuauacggcguaaucgacacccccugcuggaaacuccacaccuccccucucuguaccaccaacaccaaagaaggguccaacaucugccucacgcgcaccgaccgaggcugguauugcgacaaugcaggcucugucuccuucuucccccaagccgaaaccugcaaaguccaaucuaaccgcgucuucugcgacaccaugaacagucuuacccucccgucagaagucaaccucugcaacauagauaucuucaacccaaaauacgacugcaaaaucaugaccucaaaaaccgacguuuccucauccguuaucaccucccucggcgcaaucgucagcugcuacggcaagacaaagugcacggcuucaaacaaaaaccgcggaaucaucaagacauucagcaacggcugcgacuacguauccaacaaaggaguggacacagucuccguuggaaacacccucuacugcguaaacaaacaagaaggccaaucacucuacgucaaaggcgaacccaucaucaacuucuacgacccacucgucuuccccuccgacgaguucgacgccucaaucagccaagucaacgagaaaauuaaccagucacucgccuucauacgcaaauccgacgaacuucuacacaacguaaacgucggaaaaucaaccacaaacaucaugauuaccacaauuaucauagucaucauaguaauccuccugcuacucauagcagucggacucuuccuauacugcaaagcccgcuccaccccugucacccuauccaaagaccaacuuuccggcaucaacaacauagccuuuuccaacuaaggacuaguggaagcauuuuccuggcugauuaaaagaaauuacucagcuauggucaucuguuccuguuagaaggcuaugcagcauauuauauacuaugcgcauguuaugaaaugcauaauaaaaaauuuuaaaaaaucuaaaagaucuaaaaaaaaaaaaaaaaaaaaaaaaaaaaaaaaaaaaaaaaaaaaaaaaaaaaaaaaaaaaaaaaugcaucccccccccccccccccccccccccccccccaaaggcucuuuucagagccaccagaauu

SEQ ID NO: 14101 - RNA, 2057 nt, Artificial Sequence
  mRNA product Design d-5 comprising derived and/or modified sequence from HRSV(Memphis-37)__AIY60640.1__F_DSCav1_mut1 (opt1)
gggagagggcgcuuggcuugcaaggacccugagcugcggcauugaagcacacccaacccaacucgacugaagucagccucacugaaccggaucugagaaucuucucucucugggcuugccagggcucuccgaaccuagcuagcauccucuucaauuccaacuagaaagcuuaccauggagcugcccauccucaagaccaacgccaucaccacgauccuggccgcggugacccugugcuucgccagcucccagaacaucaccgaggaguucuaccagagcacgugcuccgccgucagcaagggcuaccucggcgcccugcgcaccgggugguacaccagcgugaucaccaucgagcuguccaacaucaaggagaacaagugcaacggcaccgacgccaaggugaagcucaucaagcaggagcuggacaaguacaagaacgcggucacggagcugcagcuccugaugcagagcaccccggccgccggcuccgggagcgcgaucugcuccggcaucgccgucugcaaggugcugcaccucgagggcgaggugaacaagaucaagaacgcccugcuguccaccaacaaggccgucgugagccucuccaacggggugagcguccugaccuucaaggugcuggaccucaagaacuacaucgacaagcagcugcugcccauccugaacaagcagagcugcuccauccccaacaucgagaccgucaucgaguuccagcagaagaacaaccgccuccuggagaucacgcgggaguucagcgugaacgcgggcgugaccacccccgucuccaccuacaugcugacgaacagcgagcuccugucccugaucaacgacaugccgaucaccaacgaccagaagaagcucaugagcaacaacgugcagaucgugcgccagcaguccuacagcaucaugugcaucaucaaggaggagguccuggccuacguggugcagcugccccucuacggggucaucgacacccccugcuggaagcugcacaccagcccccugugcacgaccaacaccaaggagggcuccaacaucugccucacccggacggaccgcgggugguacugcgacaacgccggcagcguguccuucuucccgcaggccgagaccugcaagguccagagcaaccggguguucugcgacaccaugaacucccugacccugcccagcgaggugaaccucugcaacaucgacaucuucaaccccaaguacgacugcaagaucaugacguccaagaccgacgucagcuccagcgugaucaccucccugggcgccaucgugagcugcuacgggaagaccaagugcacggcgagcaacaagaaccgcggcaucaucaagaccuucuccaacgggugcgacuacgucagcaacaagggcguggacaccguguccgucggcaacacccuguacugcgugaacaagcaggagggccagagccucuacgugaagggggagcccaucaucaacuucuacgacccgcuggucuuccccuccgacgaguucgacgccagcaucucccaggugaacgagaagaucaaccagagccuggccuucauccggaaguccgacgagcuccugcacaacgugaacgucggcaagagcaccacgaacaucaugaucaccaccaucaucaucgugaucaucgugauccugcugcuccugaucgccgucgggcuguuccucuacugcaaggcccgcuccacccccgugacgcugagcaaggaccagcuguccgggaucaacaacaucgcguucagcaacugaggacuaguggaagcauuuuccuggcugauuaaaagaaauuacucagcuauggucaucuguuccuguuagaaggcuaugcagcauauuauauacuaugcgcauguuaugaaaugcauaauaaaaaauuuuaaaaaaucuaaaagaucuaaaaaaaaaaaaaaaaaaaaaaaaaaaaaaaaaaaaaaaaaaaaaaaaaaaaaaaaaaaaaaaaugcaucccccccccccccccccccccccccccccccaaaggcucuuuucagagccaccagaauu

SEQ ID NO: 14102 - RNA, 2057 nt, Artificial Sequence
  mRNA product Design d-5 comprising derived and/or modified sequence from HRSV(Memphis-37)__AIY60640.1__F_DSCav1_mut1 (opt1)
gggagagggcgcuuggcuugcaaggacccugagcugcggcauugaagcacacccaacccaacucgacugaagucagccucacugaaccggaucugagaaucuucucucucugggcuugccagggcucuccgaaccuagcuagcauccucuucaauuccaacuagaaagcuuaccauggagcugcccauccucaagaccaacgccaucaccacgauccuggccgcggugacccugugcuucgccagcucccagaacaucaccgaggaguucuaccagagcacgugcuccgccgucagcaagggcuaccucggggcccugcgcaccggcugguacaccuccgugaucaccaucgagcugagcaacaucaaggagaacaagugcaacgggaccgacgccaaggugaagcucaucaagcaggagcuggacaaguacaagaacgcggucacggagcugcagcuccugaugcaguccaccccggccgccggcagcggguccgccaucugcagcggcaucgcggugugcaaggugcugcaccucgagggcgaggucaacaagaucaagaacgcccugcuguccaccaacaaggccguggugagccucuccaacggggucagcgugcugaccuucaaggugcuggaccucaagaacuacaucgacaagcagcugcugcccauccucaacaagcaguccugcagcauccccaacaucgagacggucaucgaguuccagcagaagaacaaccggcugcuggagaucacccgcgaguucuccgugaacgccggcgugaccacccccgucagcacguacaugcucaccaacuccgagcugcugagccucaucaacgacaugccgaucaccaacgaccagaagaagcugaugagcaacaacgugcagaucgugcggcagcaguccuacagcaucaugugcaucaucaaggaggagguccuggccuacguggugcagcucccccuguacggggucaucgacacccccugcuggaagcugcacacgagcccccucugcaccaccaacaccaaggagggcuccaacaucugccugacgcgcaccgaccgggggugguacugcgacaacgcgggcuccgugagcuucuucccgcaggccgagaccugcaaggugcaguccaaccgcgucuucugcgacaccaugaacagccugacgcuccccuccgaggugaaccugugcaacaucgacaucuucaaccccaaguacgacugcaagaucaugaccagcaagaccgacgucuccagcuccgugaucaccagccugggcgccaucguguccugcuacgggaagacgaagugcaccgccagcaacaagaaccggggcaucaucaagaccuucuccaacgggugcgacuacgucagcaacaagggcguggacaccguguccgucggcaacacgcucuacugcgugaacaagcaggaggggcagagccuguacgugaagggcgagcccaucaucaacuucuacgacccgcuggucuuccccagcgacgaguucgacgccuccaucagccaggugaacgagaagaucaaccagucccucgcguucauccgcaagagcgacgagcugcugcacaacgugaacgucgggaaguccaccaccaacaucaugaucaccaccaucaucaucgugaucaucgugauccuccugcugcucaucgccgucggccuguuccuguacugcaaggcccggagcacgcccgugacccuguccaaggaccagcucagcgggaucaacaacaucgccuucuccaacugaggacuaguggaagcauuuuccuggcugauuaaaagaaauuacucagcuauggucaucuguuccuguuagaaggcuaugcagcauauuauauacuaugcgcauguuaugaaaugcauaauaaaaaauuuuaaaaaaucuaaaagaucuaaaaaaaaaaaaaaaaaaaaaaaaaaaaaaaaaaaaaaaaaaaaaaaaaaaaaaaaaaaaaaaaugcaucccccccccccccccccccccccccccccccaaaggcucuuuucagagccaccagaauu

SEQ ID NO: 14103 - RNA, 2057 nt, Artificial Sequence
  mRNA product Design d-5 comprising derived and/or modified sequence from HRSV(Memphis-37)__AIY60640.1__F_DSCav1_mut1 (opt2)
gggagagggcgcuuggcuugcaaggacccugagcugcggcauugaagcacacccaacccaacucgacugaagucagccucacugaaccggaucugagaaucuucucucucugggcuugccagggcucuccgaaccuagcuagcauccucuucaauuccaacuagaaagcuuaccauggagcuccccauccucaagaccaacgccaucaccaccauccucgccgccgucacccucugcuucgccuccucccagaacaucaccgaggaguucuaccaguccaccugcuccgccgucuccaagggcuaccucggcgcccuccgcaccggcugguacaccuccgucaucaccaucgagcucuccaacaucaaggagaacaagugcaacggcaccgacgccaaggucaagcucaucaagcaggagcucgacaaguacaagaacgccgucaccgagcuccagcuccucaugcaguccacccccgccgccggcuccggcuccgccaucugcuccggcaucgccgucugcaagguccuccaccucgagggcgaggucaacaagaucaagaacgcccuccucuccaccaacaaggccgucgucucccucuccaacggcgucuccguccucaccuucaagguccucgaccucaagaacuacaucgacaagcagcuccuccccauccucaacaagcaguccugcuccauccccaacaucgagaccgucaucgaguuccagcagaagaacaaccgccuccucgagaucacccgcgaguucuccgucaacgccggcgucaccacccccgucuccaccuacaugcucaccaacuccgagcuccucucccucaucaacgacaugcccaucaccaacgaccagaagaagcucauguccaacaacguccagaucguccgccagcaguccuacuccaucaugugcaucaucaaggaggagguccucgccuacgucguccagcucccccucuacggcgucaucgacacccccugcuggaagcuccacaccuccccccucugcaccaccaacaccaaggagggcuccaacaucugccucacccgcaccgaccgcggcugguacugcgacaacgccggcuccgucuccuucuucccccaggccgagaccugcaagguccaguccaaccgcgucuucugcgacaccaugaacucccucacccuccccuccgaggucaaccucugcaacaucgacaucuucaaccccaaguacgacugcaagaucaugaccuccaagaccgacgucuccuccuccgucaucaccucccucggcgccaucgucuccugcuacggcaagaccaagugcaccgccuccaacaagaaccgcggcaucaucaagaccuucuccaacggcugcgacuacgucuccaacaagggcgucgacaccgucuccgucggcaacacccucuacugcgucaacaagcaggagggccagucccucuacgucaagggcgagcccaucaucaacuucuacgacccccucgucuuccccuccgacgaguucgacgccuccaucucccaggucaacgagaagaucaaccagucccucgccuucauccgcaaguccgacgagcuccuccacaacgucaacgucggcaaguccaccaccaacaucaugaucaccaccaucaucaucgucaucaucgucauccuccuccuccucaucgccgucggccucuuccucuacugcaaggcccgcuccacccccgucacccucuccaaggaccagcucuccggcaucaacaacaucgccuucuccaacugaggacuaguggaagcauuuuccuggcugauuaaaagaaauuacucagcuauggucaucuguuccuguuagaaggcuaugcagcauauuauauacuaugcgcauguuaugaaaugcauaauaaaaaauuuuaaaaaaucuaaaagaucuaaaaaaaaaaaaaaaaaaaaaaaaaaaaaaaaaaaaaaaaaaaaaaaaaaaaaaaaaaaaaaaaugcaucccccccccccccccccccccccccccccccaaaggcucuuuucagagccaccagaauu

SEQ ID NO: 14104 - RNA, 2057 nt, Artificial Sequence
  mRNA product Design d-5 comprising derived and/or modified sequence from HRSV(Memphis-37)__AIY60640.1__F_DSCav1_mut1 (opt3)
gggagagggcgcuuggcuugcaaggacccugagcugcggcauugaagcacacccaacccaacucgacugaagucagccucacugaaccggaucugagaaucuucucucucugggcuugccagggcucuccgaaccuagcuagcauccucuucaauuccaacuagaaagcuuaccauggagcugcccauccucaagaccaacgccauuacaacuauacuugcugcagugacgcugugcuucgccagcucccagaauaucaccgaagaguuuuaccaaucuacauguucagcggucaguaaaggcuauuugggggcuuuaagaacuggaugguacaccagcguuauuacaaucgaacuguccaacauuaaggagaauaaaugcaacgguaccgacgccaaggugaaacuaaucaagcaggaacucgauaaguauaaaaaugcaguaacugagcugcagcuucugaugcagucuacuccugccgcuggcucggggucagcaauauguagcggaaucgccgugugcaaggucuugcaccucgagggcgaagugaacaaaauuaagaaugcucugcugaguaccaacaaagccguugugucccucucuaauggugucagcguguuaacguucaagguacuggaccuuaagaacuacaucgauaaacaauugcugccaauucuaaauaagcaguccuguucaaucccgaacauagagacuguuauugaauuucagcagaaaaauaacaggcuccuggagaucacccgggaguucagugugaaugcgggggucacaacucccgugagcaccuauaugcuuacaaacucugaacuguugucccucauuaacgacaugccuaucaccaaugaucaaaagaaacugaugucaaacaaugugcagaucguccgccagcagagcuacaguauuaugugcauaaucaaggaggaaguuuuagcauaugugguacaacugccacucuacggagugauugacacgcccuguuggaaacuucauacuucuccucugugcacaaccaacacuaaggagggcuccaauaucuguuugacacgaaccgaucguggcugguacugcgacaacgccgggagcgucucguuuuucccacaggcugaaacguguaaggugcagucuaauagaguguuuugcgauaccaugaacucccuaacacugcccucagagguuaaucucugcaacauagacauuuucaauccuaaauaugauuguaagaucaugacaaguaaaaccgacgucagcuccucugugaucacaagccugggagccauuguaucaugcuacgguaagacuaaauguaccgcaaguaacaagaauaggggcaucauuaagacauuuuccaacgggugcgauuauguuagcaauaaaggaguggacaccgucucugugggcaacacucuuuacugugucaacaagcaagagggucagucacuguaugugaaaggggaaccaauaaucaauuucuacgacccguugguuuuucccagugaugaguucgacgcuagcauuucccaggugaacgaaaagaucaaucagucucucgccuuuauccggaaaucggaugagcuguuacacaacguaaaugucggaaagagcacgacaaacauuaugauaaccacuaucauuaucgugauuaucguuauacugcuacuccugaucgcggugggccuuuucuuguauugcaaggcccgcuccaccccugucacacugucaaaagaccaacucaguggcauuaauaacaucgcauucucuaauugaggacuaguggaagcauuuuccuggcugauuaaaagaaauuacucagcuauggucaucuguuccuguuagaaggcuaugcagcauauuauauacuaugcgcauguuaugaaaugcauaauaaaaaauuuuaaaaaaucuaaaagaucuaaaaaaaaaaaaaaaaaaaaaaaaaaaaaaaaaaaaaaaaaaaaaaaaaaaaaaaaaaaaaaaaugcaucccccccccccccccccccccccccccccccaaaggcucuuuucagagccaccagaauu

SEQ ID NO: 14105 - RNA, 2057 nt, Artificial Sequence
  mRNA product Design d-5 comprising derived and/or modified sequence from HRSV(Memphis-37)__AIY60640.1__F_DSCav1_mut1 (opt4)
gggagagggcgcuuggcuugcaaggacccugagcugcggcauugaagcacacccaacccaacucgacugaagucagccucacugaaccggaucugagaaucuucucucucugggcuugccagggcucuccgaaccuagcuagcauccucuucaauuccaacuagaaagcuuaccauggagcugcccauccugaagaccaacgccaucaccaccauccuggccgccgugacccugugcuucgccagcagccagaacaucaccgaggaguucuaccagagcaccugcagcgccgugagcaagggcuaccugggcgcccugagaaccggcugguacaccagcgugaucaccaucgagcugagcaacaucaaggagaacaagugcaacggcaccgacgccaaggugaagcugaucaagcaggagcuggacaaguacaagaacgccgugaccgagcugcagcugcugaugcagagcacccccgccgccggcagcggcagcgccaucugcagcggcaucgccgugugcaaggugcugcaccuggagggcgaggugaacaagaucaagaacgcccugcugagcaccaacaaggccguggugagccugagcaacggcgugagcgugcugaccuucaaggugcuggaccugaagaacuacaucgacaagcagcugcugcccauccugaacaagcagagcugcagcauccccaacaucgagaccgugaucgaguuccagcagaagaacaacagacugcuggagaucaccagagaguucagcgugaacgccggcgugaccacccccgugagcaccuacaugcugaccaacagcgagcugcugagccugaucaacgacaugcccaucaccaacgaccagaagaagcugaugagcaacaacgugcagaucgugagacagcagagcuacagcaucaugugcaucaucaaggaggaggugcuggccuacguggugcagcugccccuguacggcgugaucgacacccccugcuggaagcugcacaccagcccccugugcaccaccaacaccaaggagggcagcaacaucugccugaccagaaccgacagaggcugguacugcgacaacgccggcagcgugagcuucuucccccaggccgagaccugcaaggugcagagcaacagaguguucugcgacaccaugaacagccugacccugcccagcgaggugaaccugugcaacaucgacaucuucaaccccaaguacgacugcaagaucaugaccagcaagaccgacgugagcagcagcgugaucaccagccugggcgccaucgugagcugcuacggcaagaccaagugcaccgccagcaacaagaacagaggcaucaucaagaccuucagcaacggcugcgacuacgugagcaacaagggcguggacaccgugagcgugggcaacacccuguacugcgugaacaagcaggagggccagagccuguacgugaagggcgagcccaucaucaacuucuacgacccccugguguuccccagcgacgaguucgacgccagcaucagccaggugaacgagaagaucaaccagagccuggccuucaucagaaagagcgacgagcugcugcacaacgugaacgugggcaagagcaccaccaacaucaugaucaccaccaucaucaucgugaucaucgugauccugcugcugcugaucgccgugggccuguuccuguacugcaaggccagaagcacccccgugacccugagcaaggaccagcugagcggcaucaacaacaucgccuucagcaacugaggacuaguggaagcauuuuccuggcugauuaaaagaaauuacucagcuauggucaucuguuccuguuagaaggcuaugcagcauauuauauacuaugcgcauguuaugaaaugcauaauaaaaaauuuuaaaaaaucuaaaagaucuaaaaaaaaaaaaaaaaaaaaaaaaaaaaaaaaaaaaaaaaaaaaaaaaaaaaaaaaaaaaaaaaugcaucccccccccccccccccccccccccccccccaaaggcucuuuucagagccaccagaauu

SEQ ID NO: 14106 - RNA, 2057 nt, Artificial Sequence
  mRNA product Design d-5 comprising derived and/or modified sequence from HRSV(Memphis-37)__AIY60640.1__F_DSCav1_mut1 (opt5)
gggagagggcgcuuggcuugcaaggacccugagcugcggcauugaagcacacccaacccaacucgacugaagucagccucacugaaccggaucugagaaucuucucucucugggcuugccagggcucuccgaaccuagcuagcauccucuucaauuccaacuagaaagcuuaccauggagcugcccauccucaagaccaacgccauuacaacgauccuggcugccgugacccuuugcuucgcgagcucccagaauauuacagaagaguuuuaccaaucuaccuguagcgcugucuccaaaggcuaucugggggcccucagaacaggaugguacaccucuguuaucacaauugaacugagcaacaucaaggagaauaaaugcaacggcaccgacgccaaggugaaacuuaucaagcaggaacuggauaaguauaaaaaugcugugacggagcuccagcugcugaugcaguccaccccugccgcugggucuggaagcgccauuuguuccggcaucgcggucugcaaggugcuccaccuggagggggaaguuaacaaaauuaagaaugcccuucugagcacaaacaaagcuguggucucucucuccaauggagugagcguucugaccuucaaggugcuugaccugaagaacuacaucgauaaacaacuccugccgauucugaauaagcagucuuguuccauccccaacauugagacagucaucgaauuucagcagaaaaauaaccggcuccuggagaucacccgcgaguucagcgugaaugccggcgugacgacaccugucucuaccuauaugcuuacaaacuccgaacugcucagccugauuaacgacaugcccaucaccaaugaucaaaagaaacuuauguccaacaauguucagauugugagacagcagucuuacagcaucaugugcauuaucaaggaggaagugcuggcuuaugucgugcaacucccucuguacggcguuaucgacacccccuguuggaaacugcauacauccccucucugcacgaccaacacaaaggaggggagcaauauuugucugacccggacagaucgcggaugguacugcgacaacgccggcucuguguccuuuuucccgcaggcggaaaccuguaagguccagagcaauagaguguuuugcgauacgaugaacucucuuacacugcccagcgagguuaaucucugcaacaucgacauuuucaauccuaaauaugauuguaagaucaugaccuccaaaaccgacgugucuagcuccgucauuacaagccugggggccaucgugucuugcuacggaaagaccaaauguacagcuuccaacaagaaucggggcaucauuaagacguuuagcaacgggugcgauuaugucucuaauaaaggaguggacaccguuuccgugggcaacacacuuuacugugucaacaagcaagagggccagagccuguaugugaaaggggaacccaucauuaauuucuacgacccucucguuuuucccuccgaugaguucgacgccucuaucagccaggugaacgaaaagauuaaucagucccuggcuuuuauccgcaaaucugaugagcugcuccacaacgucaaugugggaaagagcaccacaaacauuaugaucaccacgaucauuaucgugauuaucguuauucugcuucugcucaucgccgucggccuguuccuguauugcaaggccagauccaccccggugacacuuagcaaagaccaacucucugggaucaauaacauugcuuucuccaauugaggacuaguggaagcauuuuccuggcugauuaaaagaaauuacucagcuauggucaucuguuccuguuagaaggcuaugcagcauauuauauacuaugcgcauguuaugaaaugcauaauaaaaaauuuuaaaaaaucuaaaagaucuaaaaaaaaaaaaaaaaaaaaaaaaaaaaaaaaaaaaaaaaaaaaaaaaaaaaaaaaaaaaaaaaugcaucccccccccccccccccccccccccccccccaaaggcucuuuucagagccaccagaauu

SEQ ID NO: 14107 - RNA, 2057 nt, Artificial Sequence
  mRNA product Design d-5 comprising derived and/or modified sequence from HRSV(Memphis-37)__AIY60640.1__F_DSCav1_mut1 (opt6)
gggagagggcgcuuggcuugcaaggacccugagcugcggcauugaagcacacccaacccaacucgacugaagucagccucacugaaccggaucugagaaucuucucucucugggcuugccagggcucuccgaaccuagcuagcauccucuucaauuccaacuagaaagcuuaccauggaacuuccaauucuaaaaaccaaugcuauaacaacaauauuagcagcaguuacauuaugcuucgccucaucacaaaauaucacagaagaauuuuaccaauccacaugcucagcaguaucuaaaggguaccuaggagcccuacgaacaggaugguacacaucaguaauaacaauagaacucucaaacaucaaagaaaacaaaugcaauggaacagacgcuaaaguaaaauuaauaaaacaagaacuagacaaauacaaaaacgccgucaccgaacuucaguuacucaugcaaagcacaccugcagcaggaucagguucagcaauaugcucaggaauagcaguuugcaaaguauuacaccuagaaggugaagucaacaaaauaaaaaacgcacuucuaaguacuaacaaagcuguaguaucauuaucaaacggaguauccguacuaaccuuuaaaguccuagaccuaaaaaacuacauagacaaacaacuacucccaauacucaauaaacaauccugcucaauucccaacaucgaaacaguaauagaauuucaacaaaaaaacaaucgccuucuagaaauaacaagagaauuuucagucaacgccggaguaacaacaccaguaucaacauauaugcuaacaaacagugaacuauuauccuuaauaaacgacaugccaauaacaaaugaccaaaaaaaacuaauguccaauaauguccaaauaguaagacaacaaagcuauucaauuauguguauaauaaaagaagaaguauuagcauacguaguucaacuaccacuauauggcguuauagacacaccaugcuggaaauuacacacaagcccacuaugcacaacaaauacaaaagaaggauccaacauuugcuuaacuagaacugacagaggaugguacugcgacaacgcuggaucagucucuuucuucccacaagcagaaaccuguaaaguacaaucaaauagagucuucugcgacacaaugaacucacuaacucucccaucugaaguaaacuuaugcaacaucgauauauuuaacccaaaauacgauuguaaaauaaugacauccaaaacagacguuucaucaagcguaaucaccucccucggagcaaucguaagcugcuacgguaaaacaaaaugcacagcauccaacaaaaacagaggcaucauaaaaacauucucaaacggaugugacuauguaucaaacaaaggaguagacacaguuucaguaggcaauaccuuauacugugucaauaaacaagaaggacaaucacuauauguaaaaggagaaccuauaauaaacuucuacgacccccucgucuucccuagcgaugaauuugacgcaucaauaucgcaaguaaacgaaaaaauaaaccaaucauuagccuuuauaagaaaaucagacgaauuauuacacaacguaaacguggggaaaagcacaacuaacaucaugauaacaacuaucauaauuguaaucaucgucauccuauuacuccuaaucgcaguaggacuauuccuauacugcaaagcuagaucaacaccagucacccuaucgaaagaucaauugucaggaauaaacaauauagccuuuucaaauuaaggacuaguggaagcauuuuccuggcugauuaaaagaaauuacucagcuauggucaucuguuccuguuagaaggcuaugcagcauauuauauacuaugcgcauguuaugaaaugcauaauaaaaaauuuuaaaaaaucuaaaagaucuaaaaaaaaaaaaaaaaaaaaaaaaaaaaaaaaaaaaaaaaaaaaaaaaaaaaaaaaaaaaaaaaugcaucccccccccccccccccccccccccccccccaaaggcucuuuucagagccaccagaauu

SEQ ID NO: 14108 - RNA, 2057 nt, Artificial Sequence
  mRNA product Design d-5 comprising derived and/or modified sequence from HRSV(Memphis-37)__AIY60640.1__F_DSCav1_mut1 (opt11)
gggagagggcgcuuggcuugcaaggacccugagcugcggcauugaagcacacccaacccaacucgacugaagucagccucacugaaccggaucugagaaucuucucucucugggcuugccagggcucuccgaaccuagcuagcauccucuucaauuccaacuagaaagcuuaccauggaacuccccauccucaaaacgaacgccaucacaaccauccucgccgccgucacccucugcuucgcgucaucccaaaacauaacugaagaguucuaucaaucaaccugcuccgcagucucaaaaggcuaccucggcgcccuacggaccggcugguacacaagcgucaucacaauagaacuuuccaacaucaaagaaaacaaauguaacggcaccgacgcaaaagucaaacucauaaaacaagaacuagacaaauauaaaaacgccguaacugaacuacaacuccucaugcaaucaacuccugcagccgguagcggcuccgcaaucugcucaggcaucgcagucugcaaagucuuacaccuagaaggcgaagucaacaaaaucaagaacgcccuacuauccacaaacaaagcaguagucucucuauccaacggagucuccguccucacauucaaaguacucgaccuaaagaacuacaucgacaaacaacuacuaccaaucuuaaacaaacaauccugcucaaucccuaacauugaaaccgucauagaguuccaacagaaaaacaaccgccuccucgaaauaaccagagaguucucagucaacgccggcgucaccaccccggucucaaccuacaugcuaaccaacucugaacuucucagccuaaucaacgacaugcccauuaccaacgaccaaaagaaacucauguccaauaacguccaaaucguucgacaacaauccuacucaaucaugugcaucauaaaagaagaaguccuagcauacgucguccaacucccacuauacggcguaaucgacacccccugcuggaaacuccacaccuccccucucuguaccaccaacaccaaagaaggguccaacaucugccucacgcgcaccgaccgaggcugguauugcgacaaugcaggcucugucuccuucuucccccaagccgaaaccugcaaaguccaaucuaaccgcgucuucugcgacaccaugaacagucuuacccucccgucagaagucaaccucugcaacauagauaucuucaacccaaaauacgacugcaaaaucaugaccucaaaaaccgacguuuccucauccguuaucaccucccucggcgcaaucgucagcugcuacggcaagacaaagugcacggcuucaaacaaaaaccgcggaaucaucaagacauucagcaacggcugcgacuacguauccaacaaaggaguggacacagucuccguuggaaacacccucuacugcguaaacaaacaagaaggccaaucacucuacgucaaaggcgaacccaucaucaacuucuacgacccacucgucuuccccuccgacgaguucgacgccucaaucagccaagucaacgagaaaauuaaccagucacucgccuucauacgcaaauccgacgaacuucuacacaacguaaacgucggaaaaucaaccacaaacaucaugauuaccacaauuaucauagucaucauaguaauccuccugcuacucauagcagucggacucuuccuauacugcaaagcccgcuccaccccugucacccuauccaaagaccaacuuuccggcaucaacaacauagccuuuuccaacuaaggacuaguggaagcauuuuccuggcugauuaaaagaaauuacucagcuauggucaucuguuccuguuagaaggcuaugcagcauauuauauacuaugcgcauguuaugaaaugcauaauaaaaaauuuuaaaaaaucuaaaagaucuaaaaaaaaaaaaaaaaaaaaaaaaaaaaaaaaaaaaaaaaaaaaaaaaaaaaaaaaaaaaaaaaugcaucccccccccccccccccccccccccccccccaaaggcucuuuucagagccaccagaauu

SEQ ID NO: 14109 - RNA, 1937 nt, Artificial Sequence
  mRNA product Design e-1 comprising derived and/or modified sequence from HRSV(Memphis-37)__AIY60640.1__F_DSCav1_mut1 (opt1)
gggagaauauaagcguuggcggagcgucgguuguagcacucugcgcgcccgcucuucugcugcuguuugucuacuuccuccugcuuccccgccgccgccgccgccaucaagcuuaccauggagcugcccauccucaagaccaacgccaucaccacgauccuggccgcggugacccugugcuucgccagcucccagaacaucaccgaggaguucuaccagagcacgugcuccgccgucagcaagggcuaccucggcgcccugcgcaccgggugguacaccagcgugaucaccaucgagcuguccaacaucaaggagaacaagugcaacggcaccgacgccaaggugaagcucaucaagcaggagcuggacaaguacaagaacgcggucacggagcugcagcuccugaugcagagcaccccggccgccggcuccgggagcgcgaucugcuccggcaucgccgucugcaaggugcugcaccucgagggcgaggugaacaagaucaagaacgcccugcuguccaccaacaaggccgucgugagccucuccaacggggugagcguccugaccuucaaggugcuggaccucaagaacuacaucgacaagcagcugcugcccauccugaacaagcagagcugcuccauccccaacaucgagaccgucaucgaguuccagcagaagaacaaccgccuccuggagaucacgcgggaguucagcgugaacgcgggcgugaccacccccgucuccaccuacaugcugacgaacagcgagcuccugucccugaucaacgacaugccgaucaccaacgaccagaagaagcucaugagcaacaacgugcagaucgugcgccagcaguccuacagcaucaugugcaucaucaaggaggagguccuggccuacguggugcagcugccccucuacggggucaucgacacccccugcuggaagcugcacaccagcccccugugcacgaccaacaccaaggagggcuccaacaucugccucacccggacggaccgcgggugguacugcgacaacgccggcagcguguccuucuucccgcaggccgagaccugcaagguccagagcaaccggguguucugcgacaccaugaacucccugacccugcccagcgaggugaaccucugcaacaucgacaucuucaaccccaaguacgacugcaagaucaugacguccaagaccgacgucagcuccagcgugaucaccucccugggcgccaucgugagcugcuacgggaagaccaagugcacggcgagcaacaagaaccgcggcaucaucaagaccuucuccaacgggugcgacuacgucagcaacaagggcguggacaccguguccgucggcaacacccuguacugcgugaacaagcaggagggccagagccucuacgugaagggggagcccaucaucaacuucuacgacccgcuggucuuccccuccgacgaguucgacgccagcaucucccaggugaacgagaagaucaaccagagccuggccuucauccggaaguccgacgagcuccugcacaacgugaacgucggcaagagcaccacgaacaucaugaucaccaccaucaucaucgugaucaucgugauccugcugcuccugaucgccgucgggcuguuccucuacugcaaggcccgcuccacccccgugacgcugagcaaggaccagcuguccgggaucaacaacaucgcguucagcaacugaggacuaguguccaccugucccuccugggcugcuggauugucucguuuuccugccaaauaaacaggaucagcgcuuuacagaucuaaaaaaaaaaaaaaaaaaaaaaaaaaaaaaaaaaaaaaaaaaaaaaaaaaaaaaaaaaaaaaaaugcaucccccccccccccccccccccccccccccccaaaggcucuuuucagagccaccagaauu

SEQ ID NO: 14110 - RNA, 1937 nt, Artificial Sequence
  mRNA product Design e-1 comprising derived and/or modified sequence from HRSV(Memphis-37)__AIY60640.1__F_DSCav1_mut1 (opt1)
gggagaauauaagcguuggcggagcgucgguuguagcacucugcgcgcccgcucuucugcugcuguuugucuacuuccuccugcuuccccgccgccgccgccgccaucaagcuuaccauggagcugcccauccucaagaccaacgccaucaccacgauccuggccgcggugacccugugcuucgccagcucccagaacaucaccgaggaguucuaccagagcacgugcuccgccgucagcaagggcuaccucggggcccugcgcaccggcugguacaccuccgugaucaccaucgagcugagcaacaucaaggagaacaagugcaacgggaccgacgccaaggugaagcucaucaagcaggagcuggacaaguacaagaacgcggucacggagcugcagcuccugaugcaguccaccccggccgccggcagcggguccgccaucugcagcggcaucgcggugugcaaggugcugcaccucgagggcgaggucaacaagaucaagaacgcccugcuguccaccaacaaggccguggugagccucuccaacggggucagcgugcugaccuucaaggugcuggaccucaagaacuacaucgacaagcagcugcugcccauccucaacaagcaguccugcagcauccccaacaucgagacggucaucgaguuccagcagaagaacaaccggcugcuggagaucacccgcgaguucuccgugaacgccggcgugaccacccccgucagcacguacaugcucaccaacuccgagcugcugagccucaucaacgacaugccgaucaccaacgaccagaagaagcugaugagcaacaacgugcagaucgugcggcagcaguccuacagcaucaugugcaucaucaaggaggagguccuggccuacguggugcagcucccccuguacggggucaucgacacccccugcuggaagcugcacacgagcccccucugcaccaccaacaccaaggagggcuccaacaucugccugacgcgcaccgaccgggggugguacugcgacaacgcgggcuccgugagcuucuucccgcaggccgagaccugcaaggugcaguccaaccgcgucuucugcgacaccaugaacagccugacgcuccccuccgaggugaaccugugcaacaucgacaucuucaaccccaaguacgacugcaagaucaugaccagcaagaccgacgucuccagcuccgugaucaccagccugggcgccaucguguccugcuacgggaagacgaagugcaccgccagcaacaagaaccggggcaucaucaagaccuucuccaacgggugcgacuacgucagcaacaagggcguggacaccguguccgucggcaacacgcucuacugcgugaacaagcaggaggggcagagccuguacgugaagggcgagcccaucaucaacuucuacgacccgcuggucuuccccagcgacgaguucgacgccuccaucagccaggugaacgagaagaucaaccagucccucgcguucauccgcaagagcgacgagcugcugcacaacgugaacgucgggaaguccaccaccaacaucaugaucaccaccaucaucaucgugaucaucgugauccuccugcugcucaucgccgucggccuguuccuguacugcaaggcccggagcacgcccgugacccuguccaaggaccagcucagcgggaucaacaacaucgccuucuccaacugaggacuaguguccaccugucccuccugggcugcuggauugucucguuuuccugccaaauaaacaggaucagcgcuuuacagaucuaaaaaaaaaaaaaaaaaaaaaaaaaaaaaaaaaaaaaaaaaaaaaaaaaaaaaaaaaaaaaaaaugcaucccccccccccccccccccccccccccccccaaaggcucuuuucagagccaccagaauu

SEQ ID NO: 14111 - RNA, 1937 nt, Artificial Sequence
  mRNA product Design e-1 comprising derived and/or modified sequence from HRSV(Memphis-37)__AIY60640.1__F_DSCav1_mut1 (opt2)
gggagaauauaagcguuggcggagcgucgguuguagcacucugcgcgcccgcucuucugcugcuguuugucuacuuccuccugcuuccccgccgccgccgccgccaucaagcuuaccauggagcuccccauccucaagaccaacgccaucaccaccauccucgccgccgucacccucugcuucgccuccucccagaacaucaccgaggaguucuaccaguccaccugcuccgccgucuccaagggcuaccucggcgcccuccgcaccggcugguacaccuccgucaucaccaucgagcucuccaacaucaaggagaacaagugcaacggcaccgacgccaaggucaagcucaucaagcaggagcucgacaaguacaagaacgccgucaccgagcuccagcuccucaugcaguccacccccgccgccggcuccggcuccgccaucugcuccggcaucgccgucugcaagguccuccaccucgagggcgaggucaacaagaucaagaacgcccuccucuccaccaacaaggccgucgucucccucuccaacggcgucuccguccucaccuucaagguccucgaccucaagaacuacaucgacaagcagcuccuccccauccucaacaagcaguccugcuccauccccaacaucgagaccgucaucgaguuccagcagaagaacaaccgccuccucgagaucacccgcgaguucuccgucaacgccggcgucaccacccccgucuccaccuacaugcucaccaacuccgagcuccucucccucaucaacgacaugcccaucaccaacgaccagaagaagcucauguccaacaacguccagaucguccgccagcaguccuacuccaucaugugcaucaucaaggaggagguccucgccuacgucguccagcucccccucuacggcgucaucgacacccccugcuggaagcuccacaccuccccccucugcaccaccaacaccaaggagggcuccaacaucugccucacccgcaccgaccgcggcugguacugcgacaacgccggcuccgucuccuucuucccccaggccgagaccugcaagguccaguccaaccgcgucuucugcgacaccaugaacucccucacccuccccuccgaggucaaccucugcaacaucgacaucuucaaccccaaguacgacugcaagaucaugaccuccaagaccgacgucuccuccuccgucaucaccucccucggcgccaucgucuccugcuacggcaagaccaagugcaccgccuccaacaagaaccgcggcaucaucaagaccuucuccaacggcugcgacuacgucuccaacaagggcgucgacaccgucuccgucggcaacacccucuacugcgucaacaagcaggagggccagucccucuacgucaagggcgagcccaucaucaacuucuacgacccccucgucuuccccuccgacgaguucgacgccuccaucucccaggucaacgagaagaucaaccagucccucgccuucauccgcaaguccgacgagcuccuccacaacgucaacgucggcaaguccaccaccaacaucaugaucaccaccaucaucaucgucaucaucgucauccuccuccuccucaucgccgucggccucuuccucuacugcaaggcccgcuccacccccgucacccucuccaaggaccagcucuccggcaucaacaacaucgccuucuccaacugaggacuaguguccaccugucccuccugggcugcuggauugucucguuuuccugccaaauaaacaggaucagcgcuuuacagaucuaaaaaaaaaaaaaaaaaaaaaaaaaaaaaaaaaaaaaaaaaaaaaaaaaaaaaaaaaaaaaaaaugcaucccccccccccccccccccccccccccccccaaaggcucuuuucagagccaccagaauu

SEQ ID NO: 14112 - RNA, 1937 nt, Artificial Sequence
  mRNA product Design e-1 comprising derived and/or modified sequence from HRSV(Memphis-37)__AIY60640.1__F_DSCav1_mut1 (opt3)
gggagaauauaagcguuggcggagcgucgguuguagcacucugcgcgcccgcucuucugcugcuguuugucuacuuccuccugcuuccccgccgccgccgccgccaucaagcuuaccauggagcugcccauccucaagaccaacgccauuacaacuauacuugcugcagugacgcugugcuucgccagcucccagaauaucaccgaagaguuuuaccaaucuacauguucagcggucaguaaaggcuauuugggggcuuuaagaacuggaugguacaccagcguuauuacaaucgaacuguccaacauuaaggagaauaaaugcaacgguaccgacgccaaggugaaacuaaucaagcaggaacucgauaaguauaaaaaugcaguaacugagcugcagcuucugaugcagucuacuccugccgcuggcucggggucagcaauauguagcggaaucgccgugugcaaggucuugcaccucgagggcgaagugaacaaaauuaagaaugcucugcugaguaccaacaaagccguugugucccucucuaauggugucagcguguuaacguucaagguacuggaccuuaagaacuacaucgauaaacaauugcugccaauucuaaauaagcaguccuguucaaucccgaacauagagacuguuauugaauuucagcagaaaaauaacaggcuccuggagaucacccgggaguucagugugaaugcgggggucacaacucccgugagcaccuauaugcuuacaaacucugaacuguugucccucauuaacgacaugccuaucaccaaugaucaaaagaaacugaugucaaacaaugugcagaucguccgccagcagagcuacaguauuaugugcauaaucaaggaggaaguuuuagcauaugugguacaacugccacucuacggagugauugacacgcccuguuggaaacuucauacuucuccucugugcacaaccaacacuaaggagggcuccaauaucuguuugacacgaaccgaucguggcugguacugcgacaacgccgggagcgucucguuuuucccacaggcugaaacguguaaggugcagucuaauagaguguuuugcgauaccaugaacucccuaacacugcccucagagguuaaucucugcaacauagacauuuucaauccuaaauaugauuguaagaucaugacaaguaaaaccgacgucagcuccucugugaucacaagccugggagccauuguaucaugcuacgguaagacuaaauguaccgcaaguaacaagaauaggggcaucauuaagacauuuuccaacgggugcgauuauguuagcaauaaaggaguggacaccgucucugugggcaacacucuuuacugugucaacaagcaagagggucagucacuguaugugaaaggggaaccaauaaucaauuucuacgacccguugguuuuucccagugaugaguucgacgcuagcauuucccaggugaacgaaaagaucaaucagucucucgccuuuauccggaaaucggaugagcuguuacacaacguaaaugucggaaagagcacgacaaacauuaugauaaccacuaucauuaucgugauuaucguuauacugcuacuccugaucgcggugggccuuuucuuguauugcaaggcccgcuccaccccugucacacugucaaaagaccaacucaguggcauuaauaacaucgcauucucuaauugaggacuaguguccaccugucccuccugggcugcuggauugucucguuuuccugccaaauaaacaggaucagcgcuuuacagaucuaaaaaaaaaaaaaaaaaaaaaaaaaaaaaaaaaaaaaaaaaaaaaaaaaaaaaaaaaaaaaaaaugcaucccccccccccccccccccccccccccccccaaaggcucuuuucagagccaccagaauu

SEQ ID NO: 14113 - RNA, 1937 nt, Artificial Sequence
  mRNA product Design e-1 comprising derived and/or modified sequence from HRSV(Memphis-37)__AIY60640.1__F_DSCav1_mut1 (opt4)
gggagaauauaagcguuggcggagcgucgguuguagcacucugcgcgcccgcucuucugcugcuguuugucuacuuccuccugcuuccccgccgccgccgccgccaucaagcuuaccauggagcugcccauccugaagaccaacgccaucaccaccauccuggccgccgugacccugugcuucgccagcagccagaacaucaccgaggaguucuaccagagcaccugcagcgccgugagcaagggcuaccugggcgcccugagaaccggcugguacaccagcgugaucaccaucgagcugagcaacaucaaggagaacaagugcaacggcaccgacgccaaggugaagcugaucaagcaggagcuggacaaguacaagaacgccgugaccgagcugcagcugcugaugcagagcacccccgccgccggcagcggcagcgccaucugcagcggcaucgccgugugcaaggugcugcaccuggagggcgaggugaacaagaucaagaacgcccugcugagcaccaacaaggccguggugagccugagcaacggcgugagcgugcugaccuucaaggugcuggaccugaagaacuacaucgacaagcagcugcugcccauccugaacaagcagagcugcagcauccccaacaucgagaccgugaucgaguuccagcagaagaacaacagacugcuggagaucaccagagaguucagcgugaacgccggcgugaccacccccgugagcaccuacaugcugaccaacagcgagcugcugagccugaucaacgacaugcccaucaccaacgaccagaagaagcugaugagcaacaacgugcagaucgugagacagcagagcuacagcaucaugugcaucaucaaggaggaggugcuggccuacguggugcagcugccccuguacggcgugaucgacacccccugcuggaagcugcacaccagcccccugugcaccaccaacaccaaggagggcagcaacaucugccugaccagaaccgacagaggcugguacugcgacaacgccggcagcgugagcuucuucccccaggccgagaccugcaaggugcagagcaacagaguguucugcgacaccaugaacagccugacccugcccagcgaggugaaccugugcaacaucgacaucuucaaccccaaguacgacugcaagaucaugaccagcaagaccgacgugagcagcagcgugaucaccagccugggcgccaucgugagcugcuacggcaagaccaagugcaccgccagcaacaagaacagaggcaucaucaagaccuucagcaacggcugcgacuacgugagcaacaagggcguggacaccgugagcgugggcaacacccuguacugcgugaacaagcaggagggccagagccuguacgugaagggcgagcccaucaucaacuucuacgacccccugguguuccccagcgacgaguucgacgccagcaucagccaggugaacgagaagaucaaccagagccuggccuucaucagaaagagcgacgagcugcugcacaacgugaacgugggcaagagcaccaccaacaucaugaucaccaccaucaucaucgugaucaucgugauccugcugcugcugaucgccgugggccuguuccuguacugcaaggccagaagcacccccgugacccugagcaaggaccagcugagcggcaucaacaacaucgccuucagcaacugaggacuaguguccaccugucccuccugggcugcuggauugucucguuuuccugccaaauaaacaggaucagcgcuuuacagaucuaaaaaaaaaaaaaaaaaaaaaaaaaaaaaaaaaaaaaaaaaaaaaaaaaaaaaaaaaaaaaaaaugcaucccccccccccccccccccccccccccccccaaaggcucuuuucagagccaccagaauu

SEQ ID NO: 14114 - RNA, 1937 nt, Artificial Sequence
  mRNA product Design e-1 comprising derived and/or modified sequence from HRSV(Memphis-37)__AIY60640.1__F_DSCav1_mut1 (opt5)
gggagaauauaagcguuggcggagcgucgguuguagcacucugcgcgcccgcucuucugcugcuguuugucuacuuccuccugcuuccccgccgccgccgccgccaucaagcuuaccauggagcugcccauccucaagaccaacgccauuacaacgauccuggcugccgugacccuuugcuucgcgagcucccagaauauuacagaagaguuuuaccaaucuaccuguagcgcugucuccaaaggcuaucugggggcccucagaacaggaugguacaccucuguuaucacaauugaacugagcaacaucaaggagaauaaaugcaacggcaccgacgccaaggugaaacuuaucaagcaggaacuggauaaguauaaaaaugcugugacggagcuccagcugcugaugcaguccaccccugccgcugggucuggaagcgccauuuguuccggcaucgcggucugcaaggugcuccaccuggagggggaaguuaacaaaauuaagaaugcccuucugagcacaaacaaagcuguggucucucucuccaauggagugagcguucugaccuucaaggugcuugaccugaagaacuacaucgauaaacaacuccugccgauucugaauaagcagucuuguuccauccccaacauugagacagucaucgaauuucagcagaaaaauaaccggcuccuggagaucacccgcgaguucagcgugaaugccggcgugacgacaccugucucuaccuauaugcuuacaaacuccgaacugcucagccugauuaacgacaugcccaucaccaaugaucaaaagaaacuuauguccaacaauguucagauugugagacagcagucuuacagcaucaugugcauuaucaaggaggaagugcuggcuuaugucgugcaacucccucuguacggcguuaucgacacccccuguuggaaacugcauacauccccucucugcacgaccaacacaaaggaggggagcaauauuugucugacccggacagaucgcggaugguacugcgacaacgccggcucuguguccuuuuucccgcaggcggaaaccuguaagguccagagcaauagaguguuuugcgauacgaugaacucucuuacacugcccagcgagguuaaucucugcaacaucgacauuuucaauccuaaauaugauuguaagaucaugaccuccaaaaccgacgugucuagcuccgucauuacaagccugggggccaucgugucuugcuacggaaagaccaaauguacagcuuccaacaagaaucggggcaucauuaagacguuuagcaacgggugcgauuaugucucuaauaaaggaguggacaccguuuccgugggcaacacacuuuacugugucaacaagcaagagggccagagccuguaugugaaaggggaacccaucauuaauuucuacgacccucucguuuuucccuccgaugaguucgacgccucuaucagccaggugaacgaaaagauuaaucagucccuggcuuuuauccgcaaaucugaugagcugcuccacaacgucaaugugggaaagagcaccacaaacauuaugaucaccacgaucauuaucgugauuaucguuauucugcuucugcucaucgccgucggccuguuccuguauugcaaggccagauccaccccggugacacuuagcaaagaccaacucucugggaucaauaacauugcuuucuccaauugaggacuaguguccaccugucccuccugggcugcuggauugucucguuuuccugccaaauaaacaggaucagcgcuuuacagaucuaaaaaaaaaaaaaaaaaaaaaaaaaaaaaaaaaaaaaaaaaaaaaaaaaaaaaaaaaaaaaaaaugcaucccccccccccccccccccccccccccccccaaaggcucuuuucagagccaccagaauu

SEQ ID NO: 14115 - RNA, 1937 nt, Artificial Sequence
  mRNA product Design e-1 comprising derived and/or modified sequence from HRSV(Memphis-37)__AIY60640.1__F_DSCav1_mut1 (opt6)
gggagaauauaagcguuggcggagcgucgguuguagcacucugcgcgcccgcucuucugcugcuguuugucuacuuccuccugcuuccccgccgccgccgccgccaucaagcuuaccauggaacuuccaauucuaaaaaccaaugcuauaacaacaauauuagcagcaguuacauuaugcuucgccucaucacaaaauaucacagaagaauuuuaccaauccacaugcucagcaguaucuaaaggguaccuaggagcccuacgaacaggaugguacacaucaguaauaacaauagaacucucaaacaucaaagaaaacaaaugcaauggaacagacgcuaaaguaaaauuaauaaaacaagaacuagacaaauacaaaaacgccgucaccgaacuucaguuacucaugcaaagcacaccugcagcaggaucagguucagcaauaugcucaggaauagcaguuugcaaaguauuacaccuagaaggugaagucaacaaaauaaaaaacgcacuucuaaguacuaacaaagcuguaguaucauuaucaaacggaguauccguacuaaccuuuaaaguccuagaccuaaaaaacuacauagacaaacaacuacucccaauacucaauaaacaauccugcucaauucccaacaucgaaacaguaauagaauuucaacaaaaaaacaaucgccuucuagaaauaacaagagaauuuucagucaacgccggaguaacaacaccaguaucaacauauaugcuaacaaacagugaacuauuauccuuaauaaacgacaugccaauaacaaaugaccaaaaaaaacuaauguccaauaauguccaaauaguaagacaacaaagcuauucaauuauguguauaauaaaagaagaaguauuagcauacguaguucaacuaccacuauauggcguuauagacacaccaugcuggaaauuacacacaagcccacuaugcacaacaaauacaaaagaaggauccaacauuugcuuaacuagaacugacagaggaugguacugcgacaacgcuggaucagucucuuucuucccacaagcagaaaccuguaaaguacaaucaaauagagucuucugcgacacaaugaacucacuaacucucccaucugaaguaaacuuaugcaacaucgauauauuuaacccaaaauacgauuguaaaauaaugacauccaaaacagacguuucaucaagcguaaucaccucccucggagcaaucguaagcugcuacgguaaaacaaaaugcacagcauccaacaaaaacagaggcaucauaaaaacauucucaaacggaugugacuauguaucaaacaaaggaguagacacaguuucaguaggcaauaccuuauacugugucaauaaacaagaaggacaaucacuauauguaaaaggagaaccuauaauaaacuucuacgacccccucgucuucccuagcgaugaauuugacgcaucaauaucgcaaguaaacgaaaaaauaaaccaaucauuagccuuuauaagaaaaucagacgaauuauuacacaacguaaacguggggaaaagcacaacuaacaucaugauaacaacuaucauaauuguaaucaucgucauccuauuacuccuaaucgcaguaggacuauuccuauacugcaaagcuagaucaacaccagucacccuaucgaaagaucaauugucaggaauaaacaauauagccuuuucaaauuaaggacuaguguccaccugucccuccugggcugcuggauugucucguuuuccugccaaauaaacaggaucagcgcuuuacagaucuaaaaaaaaaaaaaaaaaaaaaaaaaaaaaaaaaaaaaaaaaaaaaaaaaaaaaaaaaaaaaaaaugcaucccccccccccccccccccccccccccccccaaaggcucuuuucagagccaccagaauu

SEQ ID NO: 14116 - RNA, 1937 nt, Artificial Sequence
  mRNA product Design e-1 comprising derived and/or modified sequence from HRSV(Memphis-37)__AIY60640.1__F_DSCav1_mut1 (opt11)
gggagaauauaagcguuggcggagcgucgguuguagcacucugcgcgcccgcucuucugcugcuguuugucuacuuccuccugcuuccccgccgccgccgccgccaucaagcuuaccauggaacuccccauccucaaaacgaacgccaucacaaccauccucgccgccgucacccucugcuucgcgucaucccaaaacauaacugaagaguucuaucaaucaaccugcuccgcagucucaaaaggcuaccucggcgcccuacggaccggcugguacacaagcgucaucacaauagaacuuuccaacaucaaagaaaacaaauguaacggcaccgacgcaaaagucaaacucauaaaacaagaacuagacaaauauaaaaacgccguaacugaacuacaacuccucaugcaaucaacuccugcagccgguagcggcuccgcaaucugcucaggcaucgcagucugcaaagucuuacaccuagaaggcgaagucaacaaaaucaagaacgcccuacuauccacaaacaaagcaguagucucucuauccaacggagucuccguccucacauucaaaguacucgaccuaaagaacuacaucgacaaacaacuacuaccaaucuuaaacaaacaauccugcucaaucccuaacauugaaaccgucauagaguuccaacagaaaaacaaccgccuccucgaaauaaccagagaguucucagucaacgccggcgucaccaccccggucucaaccuacaugcuaaccaacucugaacuucucagccuaaucaacgacaugcccauuaccaacgaccaaaagaaacucauguccaauaacguccaaaucguucgacaacaauccuacucaaucaugugcaucauaaaagaagaaguccuagcauacgucguccaacucccacuauacggcguaaucgacacccccugcuggaaacuccacaccuccccucucuguaccaccaacaccaaagaaggguccaacaucugccucacgcgcaccgaccgaggcugguauugcgacaaugcaggcucugucuccuucuucccccaagccgaaaccugcaaaguccaaucuaaccgcgucuucugcgacaccaugaacagucuuacccucccgucagaagucaaccucugcaacauagauaucuucaacccaaaauacgacugcaaaaucaugaccucaaaaaccgacguuuccucauccguuaucaccucccucggcgcaaucgucagcugcuacggcaagacaaagugcacggcuucaaacaaaaaccgcggaaucaucaagacauucagcaacggcugcgacuacguauccaacaaaggaguggacacagucuccguuggaaacacccucuacugcguaaacaaacaagaaggccaaucacucuacgucaaaggcgaacccaucaucaacuucuacgacccacucgucuuccccuccgacgaguucgacgccucaaucagccaagucaacgagaaaauuaaccagucacucgccuucauacgcaaauccgacgaacuucuacacaacguaaacgucggaaaaucaaccacaaacaucaugauuaccacaauuaucauagucaucauaguaauccuccugcuacucauagcagucggacucuuccuauacugcaaagcccgcuccaccccugucacccuauccaaagaccaacuuuccggcaucaacaacauagccuuuuccaacuaaggacuaguguccaccugucccuccugggcugcuggauugucucguuuuccugccaaauaaacaggaucagcgcuuuacagaucuaaaaaaaaaaaaaaaaaaaaaaaaaaaaaaaaaaaaaaaaaaaaaaaaaaaaaaaaaaaaaaaaugcaucccccccccccccccccccccccccccccccaaaggcucuuuucagagccaccagaauu

SEQ ID NO: 14117 - RNA, 1919 nt, Artificial Sequence
  mRNA product Design e-2 comprising derived and/or modified sequence from HRSV(Memphis-37)__AIY60640.1__F_DSCav1_mut1 (opt1)
gggagacccgugacccggaaguuguacggcuacgcgacuuucccucccacaaacccucgcgcccuuccuuuccuacuugggcccggcagaaagcuuaccauggagcugcccauccucaagaccaacgccaucaccacgauccuggccgcggugacccugugcuucgccagcucccagaacaucaccgaggaguucuaccagagcacgugcuccgccgucagcaagggcuaccucggcgcccugcgcaccgggugguacaccagcgugaucaccaucgagcuguccaacaucaaggagaacaagugcaacggcaccgacgccaaggugaagcucaucaagcaggagcuggacaaguacaagaacgcggucacggagcugcagcuccugaugcagagcaccccggccgccggcuccgggagcgcgaucugcuccggcaucgccgucugcaaggugcugcaccucgagggcgaggugaacaagaucaagaacgcccugcuguccaccaacaaggccgucgugagccucuccaacggggugagcguccugaccuucaaggugcuggaccucaagaacuacaucgacaagcagcugcugcccauccugaacaagcagagcugcuccauccccaacaucgagaccgucaucgaguuccagcagaagaacaaccgccuccuggagaucacgcgggaguucagcgugaacgcgggcgugaccacccccgucuccaccuacaugcugacgaacagcgagcuccugucccugaucaacgacaugccgaucaccaacgaccagaagaagcucaugagcaacaacgugcagaucgugcgccagcaguccuacagcaucaugugcaucaucaaggaggagguccuggccuacguggugcagcugccccucuacggggucaucgacacccccugcuggaagcugcacaccagcccccugugcacgaccaacaccaaggagggcuccaacaucugccucacccggacggaccgcgggugguacugcgacaacgccggcagcguguccuucuucccgcaggccgagaccugcaagguccagagcaaccggguguucugcgacaccaugaacucccugacccugcccagcgaggugaaccucugcaacaucgacaucuucaaccccaaguacgacugcaagaucaugacguccaagaccgacgucagcuccagcgugaucaccucccugggcgccaucgugagcugcuacgggaagaccaagugcacggcgagcaacaagaaccgcggcaucaucaagaccuucuccaacgggugcgacuacgucagcaacaagggcguggacaccguguccgucggcaacacccuguacugcgugaacaagcaggagggccagagccucuacgugaagggggagcccaucaucaacuucuacgacccgcuggucuuccccuccgacgaguucgacgccagcaucucccaggugaacgagaagaucaaccagagccuggccuucauccggaaguccgacgagcuccugcacaacgugaacgucggcaagagcaccacgaacaucaugaucaccaccaucaucaucgugaucaucgugauccugcugcuccugaucgccgucgggcuguuccucuacugcaaggcccgcuccacccccgugacgcugagcaaggaccagcuguccgggaucaacaacaucgcguucagcaacugaggacuaguguccaccugucccuccugggcugcuggauugucucguuuuccugccaaauaaacaggaucagcgcuuuacagaucuaaaaaaaaaaaaaaaaaaaaaaaaaaaaaaaaaaaaaaaaaaaaaaaaaaaaaaaaaaaaaaaaugcaucccccccccccccccccccccccccccccccaaaggcucuuuucagagccaccagaauu

SEQ ID NO: 14118 - RNA, 1919 nt, Artificial Sequence
  mRNA product Design e-2 comprising derived and/or modified sequence from HRSV(Memphis-37)__AIY60640.1__F_DSCav1_mut1 (opt1)
gggagacccgugacccggaaguuguacggcuacgcgacuuucccucccacaaacccucgcgcccuuccuuuccuacuugggcccggcagaaagcuuaccauggagcugcccauccucaagaccaacgccaucaccacgauccuggccgcggugacccugugcuucgccagcucccagaacaucaccgaggaguucuaccagagcacgugcuccgccgucagcaagggcuaccucggggcccugcgcaccggcugguacaccuccgugaucaccaucgagcugagcaacaucaaggagaacaagugcaacgggaccgacgccaaggugaagcucaucaagcaggagcuggacaaguacaagaacgcggucacggagcugcagcuccugaugcaguccaccccggccgccggcagcggguccgccaucugcagcggcaucgcggugugcaaggugcugcaccucgagggcgaggucaacaagaucaagaacgcccugcuguccaccaacaaggccguggugagccucuccaacggggucagcgugcugaccuucaaggugcuggaccucaagaacuacaucgacaagcagcugcugcccauccucaacaagcaguccugcagcauccccaacaucgagacggucaucgaguuccagcagaagaacaaccggcugcuggagaucacccgcgaguucuccgugaacgccggcgugaccacccccgucagcacguacaugcucaccaacuccgagcugcugagccucaucaacgacaugccgaucaccaacgaccagaagaagcugaugagcaacaacgugcagaucgugcggcagcaguccuacagcaucaugugcaucaucaaggaggagguccuggccuacguggugcagcucccccuguacggggucaucgacacccccugcuggaagcugcacacgagcccccucugcaccaccaacaccaaggagggcuccaacaucugccugacgcgcaccgaccgggggugguacugcgacaacgcgggcuccgugagcuucuucccgcaggccgagaccugcaaggugcaguccaaccgcgucuucugcgacaccaugaacagccugacgcuccccuccgaggugaaccugugcaacaucgacaucuucaaccccaaguacgacugcaagaucaugaccagcaagaccgacgucuccagcuccgugaucaccagccugggcgccaucguguccugcuacgggaagacgaagugcaccgccagcaacaagaaccggggcaucaucaagaccuucuccaacgggugcgacuacgucagcaacaagggcguggacaccguguccgucggcaacacgcucuacugcgugaacaagcaggaggggcagagccuguacgugaagggcgagcccaucaucaacuucuacgacccgcuggucuuccccagcgacgaguucgacgccuccaucagccaggugaacgagaagaucaaccagucccucgcguucauccgcaagagcgacgagcugcugcacaacgugaacgucgggaaguccaccaccaacaucaugaucaccaccaucaucaucgugaucaucgugauccuccugcugcucaucgccgucggccuguuccuguacugcaaggcccggagcacgcccgugacccuguccaaggaccagcucagcgggaucaacaacaucgccuucuccaacugaggacuaguguccaccugucccuccugggcugcuggauugucucguuuuccugccaaauaaacaggaucagcgcuuuacagaucuaaaaaaaaaaaaaaaaaaaaaaaaaaaaaaaaaaaaaaaaaaaaaaaaaaaaaaaaaaaaaaaaugcaucccccccccccccccccccccccccccccccaaaggcucuuuucagagccaccagaauu

SEQ ID NO: 14119 - RNA, 1919 nt, Artificial Sequence
  mRNA product Design e-2 comprising derived and/or modified sequence from HRSV(Memphis-37)__AIY60640.1__F_DSCav1_mut1 (opt2)
gggagacccgugacccggaaguuguacggcuacgcgacuuucccucccacaaacccucgcgcccuuccuuuccuacuugggcccggcagaaagcuuaccauggagcuccccauccucaagaccaacgccaucaccaccauccucgccgccgucacccucugcuucgccuccucccagaacaucaccgaggaguucuaccaguccaccugcuccgccgucuccaagggcuaccucggcgcccuccgcaccggcugguacaccuccgucaucaccaucgagcucuccaacaucaaggagaacaagugcaacggcaccgacgccaaggucaagcucaucaagcaggagcucgacaaguacaagaacgccgucaccgagcuccagcuccucaugcaguccacccccgccgccggcuccggcuccgccaucugcuccggcaucgccgucugcaagguccuccaccucgagggcgaggucaacaagaucaagaacgcccuccucuccaccaacaaggccgucgucucccucuccaacggcgucuccguccucaccuucaagguccucgaccucaagaacuacaucgacaagcagcuccuccccauccucaacaagcaguccugcuccauccccaacaucgagaccgucaucgaguuccagcagaagaacaaccgccuccucgagaucacccgcgaguucuccgucaacgccggcgucaccacccccgucuccaccuacaugcucaccaacuccgagcuccucucccucaucaacgacaugcccaucaccaacgaccagaagaagcucauguccaacaacguccagaucguccgccagcaguccuacuccaucaugugcaucaucaaggaggagguccucgccuacgucguccagcucccccucuacggcgucaucgacacccccugcuggaagcuccacaccuccccccucugcaccaccaacaccaaggagggcuccaacaucugccucacccgcaccgaccgcggcugguacugcgacaacgccggcuccgucuccuucuucccccaggccgagaccugcaagguccaguccaaccgcgucuucugcgacaccaugaacucccucacccuccccuccgaggucaaccucugcaacaucgacaucuucaaccccaaguacgacugcaagaucaugaccuccaagaccgacgucuccuccuccgucaucaccucccucggcgccaucgucuccugcuacggcaagaccaagugcaccgccuccaacaagaaccgcggcaucaucaagaccuucuccaacggcugcgacuacgucuccaacaagggcgucgacaccgucuccgucggcaacacccucuacugcgucaacaagcaggagggccagucccucuacgucaagggcgagcccaucaucaacuucuacgacccccucgucuuccccuccgacgaguucgacgccuccaucucccaggucaacgagaagaucaaccagucccucgccuucauccgcaaguccgacgagcuccuccacaacgucaacgucggcaaguccaccaccaacaucaugaucaccaccaucaucaucgucaucaucgucauccuccuccuccucaucgccgucggccucuuccucuacugcaaggcccgcuccacccccgucacccucuccaaggaccagcucuccggcaucaacaacaucgccuucuccaacugaggacuaguguccaccugucccuccugggcugcuggauugucucguuuuccugccaaauaaacaggaucagcgcuuuacagaucuaaaaaaaaaaaaaaaaaaaaaaaaaaaaaaaaaaaaaaaaaaaaaaaaaaaaaaaaaaaaaaaaugcaucccccccccccccccccccccccccccccccaaaggcucuuuucagagccaccagaauu

SEQ ID NO: 14120 - RNA, 1919 nt, Artificial Sequence
  mRNA product Design e-2 comprising derived and/or modified sequence from HRSV(Memphis-37)__AIY60640.1__F_DSCav1_mut1 (opt3)
gggagacccgugacccggaaguuguacggcuacgcgacuuucccucccacaaacccucgcgcccuuccuuuccuacuugggcccggcagaaagcuuaccauggagcugcccauccucaagaccaacgccauuacaacuauacuugcugcagugacgcugugcuucgccagcucccagaauaucaccgaagaguuuuaccaaucuacauguucagcggucaguaaaggcuauuugggggcuuuaagaacuggaugguacaccagcguuauuacaaucgaacuguccaacauuaaggagaauaaaugcaacgguaccgacgccaaggugaaacuaaucaagcaggaacucgauaaguauaaaaaugcaguaacugagcugcagcuucugaugcagucuacuccugccgcuggcucggggucagcaauauguagcggaaucgccgugugcaaggucuugcaccucgagggcgaagugaacaaaauuaagaaugcucugcugaguaccaacaaagccguugugucccucucuaauggugucagcguguuaacguucaagguacuggaccuuaagaacuacaucgauaaacaauugcugccaauucuaaauaagcaguccuguucaaucccgaacauagagacuguuauugaauuucagcagaaaaauaacaggcuccuggagaucacccgggaguucagugugaaugcgggggucacaacucccgugagcaccuauaugcuuacaaacucugaacuguugucccucauuaacgacaugccuaucaccaaugaucaaaagaaacugaugucaaacaaugugcagaucguccgccagcagagcuacaguauuaugugcauaaucaaggaggaaguuuuagcauaugugguacaacugccacucuacggagugauugacacgcccuguuggaaacuucauacuucuccucugugcacaaccaacacuaaggagggcuccaauaucuguuugacacgaaccgaucguggcugguacugcgacaacgccgggagcgucucguuuuucccacaggcugaaacguguaaggugcagucuaauagaguguuuugcgauaccaugaacucccuaacacugcccucagagguuaaucucugcaacauagacauuuucaauccuaaauaugauuguaagaucaugacaaguaaaaccgacgucagcuccucugugaucacaagccugggagccauuguaucaugcuacgguaagacuaaauguaccgcaaguaacaagaauaggggcaucauuaagacauuuuccaacgggugcgauuauguuagcaauaaaggaguggacaccgucucugugggcaacacucuuuacugugucaacaagcaagagggucagucacuguaugugaaaggggaaccaauaaucaauuucuacgacccguugguuuuucccagugaugaguucgacgcuagcauuucccaggugaacgaaaagaucaaucagucucucgccuuuauccggaaaucggaugagcuguuacacaacguaaaugucggaaagagcacgacaaacauuaugauaaccacuaucauuaucgugauuaucguuauacugcuacuccugaucgcggugggccuuuucuuguauugcaaggcccgcuccaccccugucacacugucaaaagaccaacucaguggcauuaauaacaucgcauucucuaauugaggacuaguguccaccugucccuccugggcugcuggauugucucguuuuccugccaaauaaacaggaucagcgcuuuacagaucuaaaaaaaaaaaaaaaaaaaaaaaaaaaaaaaaaaaaaaaaaaaaaaaaaaaaaaaaaaaaaaaaugcaucccccccccccccccccccccccccccccccaaaggcucuuuucagagccaccagaauu

SEQ ID NO: 14121 - RNA, 1919 nt, Artificial Sequence
  mRNA product Design e-2 comprising derived and/or modified sequence from HRSV(Memphis-37)__AIY60640.1__F_DSCav1_mut1 (opt4)
gggagacccgugacccggaaguuguacggcuacgcgacuuucccucccacaaacccucgcgcccuuccuuuccuacuugggcccggcagaaagcuuaccauggagcugcccauccugaagaccaacgccaucaccaccauccuggccgccgugacccugugcuucgccagcagccagaacaucaccgaggaguucuaccagagcaccugcagcgccgugagcaagggcuaccugggcgcccugagaaccggcugguacaccagcgugaucaccaucgagcugagcaacaucaaggagaacaagugcaacggcaccgacgccaaggugaagcugaucaagcaggagcuggacaaguacaagaacgccgugaccgagcugcagcugcugaugcagagcacccccgccgccggcagcggcagcgccaucugcagcggcaucgccgugugcaaggugcugcaccuggagggcgaggugaacaagaucaagaacgcccugcugagcaccaacaaggccguggugagccugagcaacggcgugagcgugcugaccuucaaggugcuggaccugaagaacuacaucgacaagcagcugcugcccauccugaacaagcagagcugcagcauccccaacaucgagaccgugaucgaguuccagcagaagaacaacagacugcuggagaucaccagagaguucagcgugaacgccggcgugaccacccccgugagcaccuacaugcugaccaacagcgagcugcugagccugaucaacgacaugcccaucaccaacgaccagaagaagcugaugagcaacaacgugcagaucgugagacagcagagcuacagcaucaugugcaucaucaaggaggaggugcuggccuacguggugcagcugccccuguacggcgugaucgacacccccugcuggaagcugcacaccagcccccugugcaccaccaacaccaaggagggcagcaacaucugccugaccagaaccgacagaggcugguacugcgacaacgccggcagcgugagcuucuucccccaggccgagaccugcaaggugcagagcaacagaguguucugcgacaccaugaacagccugacccugcccagcgaggugaaccugugcaacaucgacaucuucaaccccaaguacgacugcaagaucaugaccagcaagaccgacgugagcagcagcgugaucaccagccugggcgccaucgugagcugcuacggcaagaccaagugcaccgccagcaacaagaacagaggcaucaucaagaccuucagcaacggcugcgacuacgugagcaacaagggcguggacaccgugagcgugggcaacacccuguacugcgugaacaagcaggagggccagagccuguacgugaagggcgagcccaucaucaacuucuacgacccccugguguuccccagcgacgaguucgacgccagcaucagccaggugaacgagaagaucaaccagagccuggccuucaucagaaagagcgacgagcugcugcacaacgugaacgugggcaagagcaccaccaacaucaugaucaccaccaucaucaucgugaucaucgugauccugcugcugcugaucgccgugggccuguuccuguacugcaaggccagaagcacccccgugacccugagcaaggaccagcugagcggcaucaacaacaucgccuucagcaacugaggacuaguguccaccugucccuccugggcugcuggauugucucguuuuccugccaaauaaacaggaucagcgcuuuacagaucuaaaaaaaaaaaaaaaaaaaaaaaaaaaaaaaaaaaaaaaaaaaaaaaaaaaaaaaaaaaaaaaaugcaucccccccccccccccccccccccccccccccaaaggcucuuuucagagccaccagaauu

SEQ ID NO: 14122 - RNA, 1919 nt, Artificial Sequence
  mRNA product Design e-2 comprising derived and/or modified sequence from HRSV(Memphis-37)__AIY60640.1__F_DSCav1_mut1 (opt5)
gggagacccgugacccggaaguuguacggcuacgcgacuuucccucccacaaacccucgcgcccuuccuuuccuacuugggcccggcagaaagcuuaccauggagcugcccauccucaagaccaacgccauuacaacgauccuggcugccgugacccuuugcuucgcgagcucccagaauauuacagaagaguuuuaccaaucuaccuguagcgcugucuccaaaggcuaucugggggcccucagaacaggaugguacaccucuguuaucacaauugaacugagcaacaucaaggagaauaaaugcaacggcaccgacgccaaggugaaacuuaucaagcaggaacuggauaaguauaaaaaugcugugacggagcuccagcugcugaugcaguccaccccugccgcugggucuggaagcgccauuuguuccggcaucgcggucugcaaggugcuccaccuggagggggaaguuaacaaaauuaagaaugcccuucugagcacaaacaaagcuguggucucucucuccaauggagugagcguucugaccuucaaggugcuugaccugaagaacuacaucgauaaacaacuccugccgauucugaauaagcagucuuguuccauccccaacauugagacagucaucgaauuucagcagaaaaauaaccggcuccuggagaucacccgcgaguucagcgugaaugccggcgugacgacaccugucucuaccuauaugcuuacaaacuccgaacugcucagccugauuaacgacaugcccaucaccaaugaucaaaagaaacuuauguccaacaauguucagauugugagacagcagucuuacagcaucaugugcauuaucaaggaggaagugcuggcuuaugucgugcaacucccucuguacggcguuaucgacacccccuguuggaaacugcauacauccccucucugcacgaccaacacaaaggaggggagcaauauuugucugacccggacagaucgcggaugguacugcgacaacgccggcucuguguccuuuuucccgcaggcggaaaccuguaagguccagagcaauagaguguuuugcgauacgaugaacucucuuacacugcccagcgagguuaaucucugcaacaucgacauuuucaauccuaaauaugauuguaagaucaugaccuccaaaaccgacgugucuagcuccgucauuacaagccugggggccaucgugucuugcuacggaaagaccaaauguacagcuuccaacaagaaucggggcaucauuaagacguuuagcaacgggugcgauuaugucucuaauaaaggaguggacaccguuuccgugggcaacacacuuuacugugucaacaagcaagagggccagagccuguaugugaaaggggaacccaucauuaauuucuacgacccucucguuuuucccuccgaugaguucgacgccucuaucagccaggugaacgaaaagauuaaucagucccuggcuuuuauccgcaaaucugaugagcugcuccacaacgucaaugugggaaagagcaccacaaacauuaugaucaccacgaucauuaucgugauuaucguuauucugcuucugcucaucgccgucggccuguuccuguauugcaaggccagauccaccccggugacacuuagcaaagaccaacucucugggaucaauaacauugcuuucuccaauugaggacuaguguccaccugucccuccugggcugcuggauugucucguuuuccugccaaauaaacaggaucagcgcuuuacagaucuaaaaaaaaaaaaaaaaaaaaaaaaaaaaaaaaaaaaaaaaaaaaaaaaaaaaaaaaaaaaaaaaugcaucccccccccccccccccccccccccccccccaaaggcucuuuucagagccaccagaauu

SEQ ID NO: 14123 - RNA, 1919 nt, Artificial Sequence
  mRNA product Design e-2 comprising derived and/or modified sequence from HRSV(Memphis-37)__AIY60640.1__F_DSCav1_mut1 (opt6)
gggagacccgugacccggaaguuguacggcuacgcgacuuucccucccacaaacccucgcgcccuuccuuuccuacuugggcccggcagaaagcuuaccauggaacuuccaauucuaaaaaccaaugcuauaacaacaauauuagcagcaguuacauuaugcuucgccucaucacaaaauaucacagaagaauuuuaccaauccacaugcucagcaguaucuaaaggguaccuaggagcccuacgaacaggaugguacacaucaguaauaacaauagaacucucaaacaucaaagaaaacaaaugcaauggaacagacgcuaaaguaaaauuaauaaaacaagaacuagacaaauacaaaaacgccgucaccgaacuucaguuacucaugcaaagcacaccugcagcaggaucagguucagcaauaugcucaggaauagcaguuugcaaaguauuacaccuagaaggugaagucaacaaaauaaaaaacgcacuucuaaguacuaacaaagcuguaguaucauuaucaaacggaguauccguacuaaccuuuaaaguccuagaccuaaaaaacuacauagacaaacaacuacucccaauacucaauaaacaauccugcucaauucccaacaucgaaacaguaauagaauuucaacaaaaaaacaaucgccuucuagaaauaacaagagaauuuucagucaacgccggaguaacaacaccaguaucaacauauaugcuaacaaacagugaacuauuauccuuaauaaacgacaugccaauaacaaaugaccaaaaaaaacuaauguccaauaauguccaaauaguaagacaacaaagcuauucaauuauguguauaauaaaagaagaaguauuagcauacguaguucaacuaccacuauauggcguuauagacacaccaugcuggaaauuacacacaagcccacuaugcacaacaaauacaaaagaaggauccaacauuugcuuaacuagaacugacagaggaugguacugcgacaacgcuggaucagucucuuucuucccacaagcagaaaccuguaaaguacaaucaaauagagucuucugcgacacaaugaacucacuaacucucccaucugaaguaaacuuaugcaacaucgauauauuuaacccaaaauacgauuguaaaauaaugacauccaaaacagacguuucaucaagcguaaucaccucccucggagcaaucguaagcugcuacgguaaaacaaaaugcacagcauccaacaaaaacagaggcaucauaaaaacauucucaaacggaugugacuauguaucaaacaaaggaguagacacaguuucaguaggcaauaccuuauacugugucaauaaacaagaaggacaaucacuauauguaaaaggagaaccuauaauaaacuucuacgacccccucgucuucccuagcgaugaauuugacgcaucaauaucgcaaguaaacgaaaaaauaaaccaaucauuagccuuuauaagaaaaucagacgaauuauuacacaacguaaacguggggaaaagcacaacuaacaucaugauaacaacuaucauaauuguaaucaucgucauccuauuacuccuaaucgcaguaggacuauuccuauacugcaaagcuagaucaacaccagucacccuaucgaaagaucaauugucaggaauaaacaauauagccuuuucaaauuaaggacuaguguccaccugucccuccugggcugcuggauugucucguuuuccugccaaauaaacaggaucagcgcuuuacagaucuaaaaaaaaaaaaaaaaaaaaaaaaaaaaaaaaaaaaaaaaaaaaaaaaaaaaaaaaaaaaaaaaugcaucccccccccccccccccccccccccccccccaaaggcucuuuucagagccaccagaauu

SEQ ID NO: 14124 - RNA, 1919 nt, Artificial Sequence
  mRNA product Design e-2 comprising derived and/or modified sequence from HRSV(Memphis-37)__AIY60640.1__F_DSCav1_mut1 (opt11)
gggagacccgugacccggaaguuguacggcuacgcgacuuucccucccacaaacccucgcgcccuuccuuuccuacuugggcccggcagaaagcuuaccauggaacuccccauccucaaaacgaacgccaucacaaccauccucgccgccgucacccucugcuucgcgucaucccaaaacauaacugaagaguucuaucaaucaaccugcuccgcagucucaaaaggcuaccucggcgcccuacggaccggcugguacacaagcgucaucacaauagaacuuuccaacaucaaagaaaacaaauguaacggcaccgacgcaaaagucaaacucauaaaacaagaacuagacaaauauaaaaacgccguaacugaacuacaacuccucaugcaaucaacuccugcagccgguagcggcuccgcaaucugcucaggcaucgcagucugcaaagucuuacaccuagaaggcgaagucaacaaaaucaagaacgcccuacuauccacaaacaaagcaguagucucucuauccaacggagucuccguccucacauucaaaguacucgaccuaaagaacuacaucgacaaacaacuacuaccaaucuuaaacaaacaauccugcucaaucccuaacauugaaaccgucauagaguuccaacagaaaaacaaccgccuccucgaaauaaccagagaguucucagucaacgccggcgucaccaccccggucucaaccuacaugcuaaccaacucugaacuucucagccuaaucaacgacaugcccauuaccaacgaccaaaagaaacucauguccaauaacguccaaaucguucgacaacaauccuacucaaucaugugcaucauaaaagaagaaguccuagcauacgucguccaacucccacuauacggcguaaucgacacccccugcuggaaacuccacaccuccccucucuguaccaccaacaccaaagaaggguccaacaucugccucacgcgcaccgaccgaggcugguauugcgacaaugcaggcucugucuccuucuucccccaagccgaaaccugcaaaguccaaucuaaccgcgucuucugcgacaccaugaacagucuuacccucccgucagaagucaaccucugcaacauagauaucuucaacccaaaauacgacugcaaaaucaugaccucaaaaaccgacguuuccucauccguuaucaccucccucggcgcaaucgucagcugcuacggcaagacaaagugcacggcuucaaacaaaaaccgcggaaucaucaagacauucagcaacggcugcgacuacguauccaacaaaggaguggacacagucuccguuggaaacacccucuacugcguaaacaaacaagaaggccaaucacucuacgucaaaggcgaacccaucaucaacuucuacgacccacucgucuuccccuccgacgaguucgacgccucaaucagccaagucaacgagaaaauuaaccagucacucgccuucauacgcaaauccgacgaacuucuacacaacguaaacgucggaaaaucaaccacaaacaucaugauuaccacaauuaucauagucaucauaguaauccuccugcuacucauagcagucggacucuuccuauacugcaaagcccgcuccaccccugucacccuauccaaagaccaacuuuccggcaucaacaacauagccuuuuccaacuaaggacuaguguccaccugucccuccugggcugcuggauugucucguuuuccugccaaauaaacaggaucagcgcuuuacagaucuaaaaaaaaaaaaaaaaaaaaaaaaaaaaaaaaaaaaaaaaaaaaaaaaaaaaaaaaaaaaaaaaugcaucccccccccccccccccccccccccccccccaaaggcucuuuucagagccaccagaauu

SEQ ID NO: 14125 - RNA, 1889 nt, Artificial Sequence
  mRNA product Design e-3 comprising derived and/or modified sequence from HRSV(Memphis-37)__AIY60640.1__F_DSCav1_mut1 (opt1)
gggagacuuucccauucuguagcagaauuugguguugccuguggucuuggucccgcggagaagcuuaccauggagcugcccauccucaagaccaacgccaucaccacgauccuggccgcggugacccugugcuucgccagcucccagaacaucaccgaggaguucuaccagagcacgugcuccgccgucagcaagggcuaccucggcgcccugcgcaccgggugguacaccagcgugaucaccaucgagcuguccaacaucaaggagaacaagugcaacggcaccgacgccaaggugaagcucaucaagcaggagcuggacaaguacaagaacgcggucacggagcugcagcuccugaugcagagcaccccggccgccggcuccgggagcgcgaucugcuccggcaucgccgucugcaaggugcugcaccucgagggcgaggugaacaagaucaagaacgcccugcuguccaccaacaaggccgucgugagccucuccaacggggugagcguccugaccuucaaggugcuggaccucaagaacuacaucgacaagcagcugcugcccauccugaacaagcagagcugcuccauccccaacaucgagaccgucaucgaguuccagcagaagaacaaccgccuccuggagaucacgcgggaguucagcgugaacgcgggcgugaccacccccgucuccaccuacaugcugacgaacagcgagcuccugucccugaucaacgacaugccgaucaccaacgaccagaagaagcucaugagcaacaacgugcagaucgugcgccagcaguccuacagcaucaugugcaucaucaaggaggagguccuggccuacguggugcagcugccccucuacggggucaucgacacccccugcuggaagcugcacaccagcccccugugcacgaccaacaccaaggagggcuccaacaucugccucacccggacggaccgcgggugguacugcgacaacgccggcagcguguccuucuucccgcaggccgagaccugcaagguccagagcaaccggguguucugcgacaccaugaacucccugacccugcccagcgaggugaaccucugcaacaucgacaucuucaaccccaaguacgacugcaagaucaugacguccaagaccgacgucagcuccagcgugaucaccucccugggcgccaucgugagcugcuacgggaagaccaagugcacggcgagcaacaagaaccgcggcaucaucaagaccuucuccaacgggugcgacuacgucagcaacaagggcguggacaccguguccgucggcaacacccuguacugcgugaacaagcaggagggccagagccucuacgugaagggggagcccaucaucaacuucuacgacccgcuggucuuccccuccgacgaguucgacgccagcaucucccaggugaacgagaagaucaaccagagccuggccuucauccggaaguccgacgagcuccugcacaacgugaacgucggcaagagcaccacgaacaucaugaucaccaccaucaucaucgugaucaucgugauccugcugcuccugaucgccgucgggcuguuccucuacugcaaggcccgcuccacccccgugacgcugagcaaggaccagcuguccgggaucaacaacaucgcguucagcaacugaggacuaguguccaccugucccuccugggcugcuggauugucucguuuuccugccaaauaaacaggaucagcgcuuuacagaucuaaaaaaaaaaaaaaaaaaaaaaaaaaaaaaaaaaaaaaaaaaaaaaaaaaaaaaaaaaaaaaaaugcaucccccccccccccccccccccccccccccccaaaggcucuuuucagagccaccagaauu

SEQ ID NO: 14126 - RNA, 1889 nt, Artificial Sequence
  mRNA product Design e-3 comprising derived and/or modified sequence from HRSV(Memphis-37)__AIY60640.1__F_DSCav1_mut1 (opt1)
gggagacuuucccauucuguagcagaauuugguguugccuguggucuuggucccgcggagaagcuuaccauggagcugcccauccucaagaccaacgccaucaccacgauccuggccgcggugacccugugcuucgccagcucccagaacaucaccgaggaguucuaccagagcacgugcuccgccgucagcaagggcuaccucggggcccugcgcaccggcugguacaccuccgugaucaccaucgagcugagcaacaucaaggagaacaagugcaacgggaccgacgccaaggugaagcucaucaagcaggagcuggacaaguacaagaacgcggucacggagcugcagcuccugaugcaguccaccccggccgccggcagcggguccgccaucugcagcggcaucgcggugugcaaggugcugcaccucgagggcgaggucaacaagaucaagaacgcccugcuguccaccaacaaggccguggugagccucuccaacggggucagcgugcugaccuucaaggugcuggaccucaagaacuacaucgacaagcagcugcugcccauccucaacaagcaguccugcagcauccccaacaucgagacggucaucgaguuccagcagaagaacaaccggcugcuggagaucacccgcgaguucuccgugaacgccggcgugaccacccccgucagcacguacaugcucaccaacuccgagcugcugagccucaucaacgacaugccgaucaccaacgaccagaagaagcugaugagcaacaacgugcagaucgugcggcagcaguccuacagcaucaugugcaucaucaaggaggagguccuggccuacguggugcagcucccccuguacggggucaucgacacccccugcuggaagcugcacacgagcccccucugcaccaccaacaccaaggagggcuccaacaucugccugacgcgcaccgaccgggggugguacugcgacaacgcgggcuccgugagcuucuucccgcaggccgagaccugcaaggugcaguccaaccgcgucuucugcgacaccaugaacagccugacgcuccccuccgaggugaaccugugcaacaucgacaucuucaaccccaaguacgacugcaagaucaugaccagcaagaccgacgucuccagcuccgugaucaccagccugggcgccaucguguccugcuacgggaagacgaagugcaccgccagcaacaagaaccggggcaucaucaagaccuucuccaacgggugcgacuacgucagcaacaagggcguggacaccguguccgucggcaacacgcucuacugcgugaacaagcaggaggggcagagccuguacgugaagggcgagcccaucaucaacuucuacgacccgcuggucuuccccagcgacgaguucgacgccuccaucagccaggugaacgagaagaucaaccagucccucgcguucauccgcaagagcgacgagcugcugcacaacgugaacgucgggaaguccaccaccaacaucaugaucaccaccaucaucaucgugaucaucgugauccuccugcugcucaucgccgucggccuguuccuguacugcaaggcccggagcacgcccgugacccuguccaaggaccagcucagcgggaucaacaacaucgccuucuccaacugaggacuaguguccaccugucccuccugggcugcuggauugucucguuuuccugccaaauaaacaggaucagcgcuuuacagaucuaaaaaaaaaaaaaaaaaaaaaaaaaaaaaaaaaaaaaaaaaaaaaaaaaaaaaaaaaaaaaaaaugcaucccccccccccccccccccccccccccccccaaaggcucuuuucagagccaccagaauu

SEQ ID NO: 14127 - RNA, 1889 nt, Artificial Sequence
  mRNA product Design e-3 comprising derived and/or modified sequence from HRSV(Memphis-37)__AIY60640.1__F_DSCav1_mut1 (opt2)
gggagacuuucccauucuguagcagaauuugguguugccuguggucuuggucccgcggagaagcuuaccauggagcuccccauccucaagaccaacgccaucaccaccauccucgccgccgucacccucugcuucgccuccucccagaacaucaccgaggaguucuaccaguccaccugcuccgccgucuccaagggcuaccucggcgcccuccgcaccggcugguacaccuccgucaucaccaucgagcucuccaacaucaaggagaacaagugcaacggcaccgacgccaaggucaagcucaucaagcaggagcucgacaaguacaagaacgccgucaccgagcuccagcuccucaugcaguccacccccgccgccggcuccggcuccgccaucugcuccggcaucgccgucugcaagguccuccaccucgagggcgaggucaacaagaucaagaacgcccuccucuccaccaacaaggccgucgucucccucuccaacggcgucuccguccucaccuucaagguccucgaccucaagaacuacaucgacaagcagcuccuccccauccucaacaagcaguccugcuccauccccaacaucgagaccgucaucgaguuccagcagaagaacaaccgccuccucgagaucacccgcgaguucuccgucaacgccggcgucaccacccccgucuccaccuacaugcucaccaacuccgagcuccucucccucaucaacgacaugcccaucaccaacgaccagaagaagcucauguccaacaacguccagaucguccgccagcaguccuacuccaucaugugcaucaucaaggaggagguccucgccuacgucguccagcucccccucuacggcgucaucgacacccccugcuggaagcuccacaccuccccccucugcaccaccaacaccaaggagggcuccaacaucugccucacccgcaccgaccgcggcugguacugcgacaacgccggcuccgucuccuucuucccccaggccgagaccugcaagguccaguccaaccgcgucuucugcgacaccaugaacucccucacccuccccuccgaggucaaccucugcaacaucgacaucuucaaccccaaguacgacugcaagaucaugaccuccaagaccgacgucuccuccuccgucaucaccucccucggcgccaucgucuccugcuacggcaagaccaagugcaccgccuccaacaagaaccgcggcaucaucaagaccuucuccaacggcugcgacuacgucuccaacaagggcgucgacaccgucuccgucggcaacacccucuacugcgucaacaagcaggagggccagucccucuacgucaagggcgagcccaucaucaacuucuacgacccccucgucuuccccuccgacgaguucgacgccuccaucucccaggucaacgagaagaucaaccagucccucgccuucauccgcaaguccgacgagcuccuccacaacgucaacgucggcaaguccaccaccaacaucaugaucaccaccaucaucaucgucaucaucgucauccuccuccuccucaucgccgucggccucuuccucuacugcaaggcccgcuccacccccgucacccucuccaaggaccagcucuccggcaucaacaacaucgccuucuccaacugaggacuaguguccaccugucccuccugggcugcuggauugucucguuuuccugccaaauaaacaggaucagcgcuuuacagaucuaaaaaaaaaaaaaaaaaaaaaaaaaaaaaaaaaaaaaaaaaaaaaaaaaaaaaaaaaaaaaaaaugcaucccccccccccccccccccccccccccccccaaaggcucuuuucagagccaccagaauu

SEQ ID NO: 14128 - RNA, 1889 nt, Artificial Sequence
  mRNA product Design e-3 comprising derived and/or modified sequence from HRSV(Memphis-37)__AIY60640.1__F_DSCav1_mut1 (opt3)
gggagacuuucccauucuguagcagaauuugguguugccuguggucuuggucccgcggagaagcuuaccauggagcugcccauccucaagaccaacgccauuacaacuauacuugcugcagugacgcugugcuucgccagcucccagaauaucaccgaagaguuuuaccaaucuacauguucagcggucaguaaaggcuauuugggggcuuuaagaacuggaugguacaccagcguuauuacaaucgaacuguccaacauuaaggagaauaaaugcaacgguaccgacgccaaggugaaacuaaucaagcaggaacucgauaaguauaaaaaugcaguaacugagcugcagcuucugaugcagucuacuccugccgcuggcucggggucagcaauauguagcggaaucgccgugugcaaggucuugcaccucgagggcgaagugaacaaaauuaagaaugcucugcugaguaccaacaaagccguugugucccucucuaauggugucagcguguuaacguucaagguacuggaccuuaagaacuacaucgauaaacaauugcugccaauucuaaauaagcaguccuguucaaucccgaacauagagacuguuauugaauuucagcagaaaaauaacaggcuccuggagaucacccgggaguucagugugaaugcgggggucacaacucccgugagcaccuauaugcuuacaaacucugaacuguugucccucauuaacgacaugccuaucaccaaugaucaaaagaaacugaugucaaacaaugugcagaucguccgccagcagagcuacaguauuaugugcauaaucaaggaggaaguuuuagcauaugugguacaacugccacucuacggagugauugacacgcccuguuggaaacuucauacuucuccucugugcacaaccaacacuaaggagggcuccaauaucuguuugacacgaaccgaucguggcugguacugcgacaacgccgggagcgucucguuuuucccacaggcugaaacguguaaggugcagucuaauagaguguuuugcgauaccaugaacucccuaacacugcccucagagguuaaucucugcaacauagacauuuucaauccuaaauaugauuguaagaucaugacaaguaaaaccgacgucagcuccucugugaucacaagccugggagccauuguaucaugcuacgguaagacuaaauguaccgcaaguaacaagaauaggggcaucauuaagacauuuuccaacgggugcgauuauguuagcaauaaaggaguggacaccgucucugugggcaacacucuuuacugugucaacaagcaagagggucagucacuguaugugaaaggggaaccaauaaucaauuucuacgacccguugguuuuucccagugaugaguucgacgcuagcauuucccaggugaacgaaaagaucaaucagucucucgccuuuauccggaaaucggaugagcuguuacacaacguaaaugucggaaagagcacgacaaacauuaugauaaccacuaucauuaucgugauuaucguuauacugcuacuccugaucgcggugggccuuuucuuguauugcaaggcccgcuccaccccugucacacugucaaaagaccaacucaguggcauuaauaacaucgcauucucuaauugaggacuaguguccaccugucccuccugggcugcuggauugucucguuuuccugccaaauaaacaggaucagcgcuuuacagaucuaaaaaaaaaaaaaaaaaaaaaaaaaaaaaaaaaaaaaaaaaaaaaaaaaaaaaaaaaaaaaaaaugcaucccccccccccccccccccccccccccccccaaaggcucuuuucagagccaccagaauu

SEQ ID NO: 14129 - RNA, 1889 nt, Artificial Sequence
  mRNA product Design e-3 comprising derived and/or modified sequence from HRSV(Memphis-37)__AIY60640.1__F_DSCav1_mut1 (opt4)
gggagacuuucccauucuguagcagaauuugguguugccuguggucuuggucccgcggagaagcuuaccauggagcugcccauccugaagaccaacgccaucaccaccauccuggccgccgugacccugugcuucgccagcagccagaacaucaccgaggaguucuaccagagcaccugcagcgccgugagcaagggcuaccugggcgcccugagaaccggcugguacaccagcgugaucaccaucgagcugagcaacaucaaggagaacaagugcaacggcaccgacgccaaggugaagcugaucaagcaggagcuggacaaguacaagaacgccgugaccgagcugcagcugcugaugcagagcacccccgccgccggcagcggcagcgccaucugcagcggcaucgccgugugcaaggugcugcaccuggagggcgaggugaacaagaucaagaacgcccugcugagcaccaacaaggccguggugagccugagcaacggcgugagcgugcugaccuucaaggugcuggaccugaagaacuacaucgacaagcagcugcugcccauccugaacaagcagagcugcagcauccccaacaucgagaccgugaucgaguuccagcagaagaacaacagacugcuggagaucaccagagaguucagcgugaacgccggcgugaccacccccgugagcaccuacaugcugaccaacagcgagcugcugagccugaucaacgacaugcccaucaccaacgaccagaagaagcugaugagcaacaacgugcagaucgugagacagcagagcuacagcaucaugugcaucaucaaggaggaggugcuggccuacguggugcagcugccccuguacggcgugaucgacacccccugcuggaagcugcacaccagcccccugugcaccaccaacaccaaggagggcagcaacaucugccugaccagaaccgacagaggcugguacugcgacaacgccggcagcgugagcuucuucccccaggccgagaccugcaaggugcagagcaacagaguguucugcgacaccaugaacagccugacccugcccagcgaggugaaccugugcaacaucgacaucuucaaccccaaguacgacugcaagaucaugaccagcaagaccgacgugagcagcagcgugaucaccagccugggcgccaucgugagcugcuacggcaagaccaagugcaccgccagcaacaagaacagaggcaucaucaagaccuucagcaacggcugcgacuacgugagcaacaagggcguggacaccgugagcgugggcaacacccuguacugcgugaacaagcaggagggccagagccuguacgugaagggcgagcccaucaucaacuucuacgacccccugguguuccccagcgacgaguucgacgccagcaucagccaggugaacgagaagaucaaccagagccuggccuucaucagaaagagcgacgagcugcugcacaacgugaacgugggcaagagcaccaccaacaucaugaucaccaccaucaucaucgugaucaucgugauccugcugcugcugaucgccgugggccuguuccuguacugcaaggccagaagcacccccgugacccugagcaaggaccagcugagcggcaucaacaacaucgccuucagcaacugaggacuaguguccaccugucccuccugggcugcuggauugucucguuuuccugccaaauaaacaggaucagcgcuuuacagaucuaaaaaaaaaaaaaaaaaaaaaaaaaaaaaaaaaaaaaaaaaaaaaaaaaaaaaaaaaaaaaaaaugcaucccccccccccccccccccccccccccccccaaaggcucuuuucagagccaccagaauu

SEQ ID NO: 14130 - RNA, 1889 nt, Artificial Sequence
  mRNA product Design e-3 comprising derived and/or modified sequence from HRSV(Memphis-37)__AIY60640.1__F_DSCav1_mut1 (opt5)
gggagacuuucccauucuguagcagaauuugguguugccuguggucuuggucccgcggagaagcuuaccauggagcugcccauccucaagaccaacgccauuacaacgauccuggcugccgugacccuuugcuucgcgagcucccagaauauuacagaagaguuuuaccaaucuaccuguagcgcugucuccaaaggcuaucugggggcccucagaacaggaugguacaccucuguuaucacaauugaacugagcaacaucaaggagaauaaaugcaacggcaccgacgccaaggugaaacuuaucaagcaggaacuggauaaguauaaaaaugcugugacggagcuccagcugcugaugcaguccaccccugccgcugggucuggaagcgccauuuguuccggcaucgcggucugcaaggugcuccaccuggagggggaaguuaacaaaauuaagaaugcccuucugagcacaaacaaagcuguggucucucucuccaauggagugagcguucugaccuucaaggugcuugaccugaagaacuacaucgauaaacaacuccugccgauucugaauaagcagucuuguuccauccccaacauugagacagucaucgaauuucagcagaaaaauaaccggcuccuggagaucacccgcgaguucagcgugaaugccggcgugacgacaccugucucuaccuauaugcuuacaaacuccgaacugcucagccugauuaacgacaugcccaucaccaaugaucaaaagaaacuuauguccaacaauguucagauugugagacagcagucuuacagcaucaugugcauuaucaaggaggaagugcuggcuuaugucgugcaacucccucuguacggcguuaucgacacccccuguuggaaacugcauacauccccucucugcacgaccaacacaaaggaggggagcaauauuugucugacccggacagaucgcggaugguacugcgacaacgccggcucuguguccuuuuucccgcaggcggaaaccuguaagguccagagcaauagaguguuuugcgauacgaugaacucucuuacacugcccagcgagguuaaucucugcaacaucgacauuuucaauccuaaauaugauuguaagaucaugaccuccaaaaccgacgugucuagcuccgucauuacaagccugggggccaucgugucuugcuacggaaagaccaaauguacagcuuccaacaagaaucggggcaucauuaagacguuuagcaacgggugcgauuaugucucuaauaaaggaguggacaccguuuccgugggcaacacacuuuacugugucaacaagcaagagggccagagccuguaugugaaaggggaacccaucauuaauuucuacgacccucucguuuuucccuccgaugaguucgacgccucuaucagccaggugaacgaaaagauuaaucagucccuggcuuuuauccgcaaaucugaugagcugcuccacaacgucaaugugggaaagagcaccacaaacauuaugaucaccacgaucauuaucgugauuaucguuauucugcuucugcucaucgccgucggccuguuccuguauugcaaggccagauccaccccggugacacuuagcaaagaccaacucucugggaucaauaacauugcuuucuccaauugaggacuaguguccaccugucccuccugggcugcuggauugucucguuuuccugccaaauaaacaggaucagcgcuuuacagaucuaaaaaaaaaaaaaaaaaaaaaaaaaaaaaaaaaaaaaaaaaaaaaaaaaaaaaaaaaaaaaaaaugcaucccccccccccccccccccccccccccccccaaaggcucuuuucagagccaccagaauu

SEQ ID NO: 14131 - RNA, 1889 nt, Artificial Sequence
  mRNA product Design e-3 comprising derived and/or modified sequence from HRSV(Memphis-37)__AIY60640.1__F_DSCav1_mut1 (opt6)
gggagacuuucccauucuguagcagaauuugguguugccuguggucuuggucccgcggagaagcuuaccauggaacuuccaauucuaaaaaccaaugcuauaacaacaauauuagcagcaguuacauuaugcuucgccucaucacaaaauaucacagaagaauuuuaccaauccacaugcucagcaguaucuaaaggguaccuaggagcccuacgaacaggaugguacacaucaguaauaacaauagaacucucaaacaucaaagaaaacaaaugcaauggaacagacgcuaaaguaaaauuaauaaaacaagaacuagacaaauacaaaaacgccgucaccgaacuucaguuacucaugcaaagcacaccugcagcaggaucagguucagcaauaugcucaggaauagcaguuugcaaaguauuacaccuagaaggugaagucaacaaaauaaaaaacgcacuucuaaguacuaacaaagcuguaguaucauuaucaaacggaguauccguacuaaccuuuaaaguccuagaccuaaaaaacuacauagacaaacaacuacucccaauacucaauaaacaauccugcucaauucccaacaucgaaacaguaauagaauuucaacaaaaaaacaaucgccuucuagaaauaacaagagaauuuucagucaacgccggaguaacaacaccaguaucaacauauaugcuaacaaacagugaacuauuauccuuaauaaacgacaugccaauaacaaaugaccaaaaaaaacuaauguccaauaauguccaaauaguaagacaacaaagcuauucaauuauguguauaauaaaagaagaaguauuagcauacguaguucaacuaccacuauauggcguuauagacacaccaugcuggaaauuacacacaagcccacuaugcacaacaaauacaaaagaaggauccaacauuugcuuaacuagaacugacagaggaugguacugcgacaacgcuggaucagucucuuucuucccacaagcagaaaccuguaaaguacaaucaaauagagucuucugcgacacaaugaacucacuaacucucccaucugaaguaaacuuaugcaacaucgauauauuuaacccaaaauacgauuguaaaauaaugacauccaaaacagacguuucaucaagcguaaucaccucccucggagcaaucguaagcugcuacgguaaaacaaaaugcacagcauccaacaaaaacagaggcaucauaaaaacauucucaaacggaugugacuauguaucaaacaaaggaguagacacaguuucaguaggcaauaccuuauacugugucaauaaacaagaaggacaaucacuauauguaaaaggagaaccuauaauaaacuucuacgacccccucgucuucccuagcgaugaauuugacgcaucaauaucgcaaguaaacgaaaaaauaaaccaaucauuagccuuuauaagaaaaucagacgaauuauuacacaacguaaacguggggaaaagcacaacuaacaucaugauaacaacuaucauaauuguaaucaucgucauccuauuacuccuaaucgcaguaggacuauuccuauacugcaaagcuagaucaacaccagucacccuaucgaaagaucaauugucaggaauaaacaauauagccuuuucaaauuaaggacuaguguccaccugucccuccugggcugcuggauugucucguuuuccugccaaauaaacaggaucagcgcuuuacagaucuaaaaaaaaaaaaaaaaaaaaaaaaaaaaaaaaaaaaaaaaaaaaaaaaaaaaaaaaaaaaaaaaugcaucccccccccccccccccccccccccccccccaaaggcucuuuucagagccaccagaauu

SEQ ID NO: 14132 - RNA, 1889 nt, Artificial Sequence
  mRNA product Design e-3 comprising derived and/or modified sequence from HRSV(Memphis-37)__AIY60640.1__F_DSCav1_mut1 (opt11)
gggagacuuucccauucuguagcagaauuugguguugccuguggucuuggucccgcggagaagcuuaccauggaacuccccauccucaaaacgaacgccaucacaaccauccucgccgccgucacccucugcuucgcgucaucccaaaacauaacugaagaguucuaucaaucaaccugcuccgcagucucaaaaggcuaccucggcgcccuacggaccggcugguacacaagcgucaucacaauagaacuuuccaacaucaaagaaaacaaauguaacggcaccgacgcaaaagucaaacucauaaaacaagaacuagacaaauauaaaaacgccguaacugaacuacaacuccucaugcaaucaacuccugcagccgguagcggcuccgcaaucugcucaggcaucgcagucugcaaagucuuacaccuagaaggcgaagucaacaaaaucaagaacgcccuacuauccacaaacaaagcaguagucucucuauccaacggagucuccguccucacauucaaaguacucgaccuaaagaacuacaucgacaaacaacuacuaccaaucuuaaacaaacaauccugcucaaucccuaacauugaaaccgucauagaguuccaacagaaaaacaaccgccuccucgaaauaaccagagaguucucagucaacgccggcgucaccaccccggucucaaccuacaugcuaaccaacucugaacuucucagccuaaucaacgacaugcccauuaccaacgaccaaaagaaacucauguccaauaacguccaaaucguucgacaacaauccuacucaaucaugugcaucauaaaagaagaaguccuagcauacgucguccaacucccacuauacggcguaaucgacacccccugcuggaaacuccacaccuccccucucuguaccaccaacaccaaagaaggguccaacaucugccucacgcgcaccgaccgaggcugguauugcgacaaugcaggcucugucuccuucuucccccaagccgaaaccugcaaaguccaaucuaaccgcgucuucugcgacaccaugaacagucuuacccucccgucagaagucaaccucugcaacauagauaucuucaacccaaaauacgacugcaaaaucaugaccucaaaaaccgacguuuccucauccguuaucaccucccucggcgcaaucgucagcugcuacggcaagacaaagugcacggcuucaaacaaaaaccgcggaaucaucaagacauucagcaacggcugcgacuacguauccaacaaaggaguggacacagucuccguuggaaacacccucuacugcguaaacaaacaagaaggccaaucacucuacgucaaaggcgaacccaucaucaacuucuacgacccacucgucuuccccuccgacgaguucgacgccucaaucagccaagucaacgagaaaauuaaccagucacucgccuucauacgcaaauccgacgaacuucuacacaacguaaacgucggaaaaucaaccacaaacaucaugauuaccacaauuaucauagucaucauaguaauccuccugcuacucauagcagucggacucuuccuauacugcaaagcccgcuccaccccugucacccuauccaaagaccaacuuuccggcaucaacaacauagccuuuuccaacuaaggacuaguguccaccugucccuccugggcugcuggauugucucguuuuccugccaaauaaacaggaucagcgcuuuacagaucuaaaaaaaaaaaaaaaaaaaaaaaaaaaaaaaaaaaaaaaaaaaaaaaaaaaaaaaaaaaaaaaaugcaucccccccccccccccccccccccccccccccaaaggcucuuuucagagccaccagaauu

SEQ ID NO: 14133 - RNA, 1943 nt, Artificial Sequence
  mRNA product Design e-4 comprising derived and/or modified sequence from HRSV(Memphis-37)__AIY60640.1__F_DSCav1_mut1 (opt1)
gggagacuccugucgggcggaaguaggaggaguagaguuuaaaaacaguacucuuuuuccgguucgggacguaguugaagcaacgacaagccggauaaccgcucuugagacaggaagcuuaccauggagcugcccauccucaagaccaacgccaucaccacgauccuggccgcggugacccugugcuucgccagcucccagaacaucaccgaggaguucuaccagagcacgugcuccgccgucagcaagggcuaccucggcgcccugcgcaccgggugguacaccagcgugaucaccaucgagcuguccaacaucaaggagaacaagugcaacggcaccgacgccaaggugaagcucaucaagcaggagcuggacaaguacaagaacgcggucacggagcugcagcuccugaugcagagcaccccggccgccggcuccgggagcgcgaucugcuccggcaucgccgucugcaaggugcugcaccucgagggcgaggugaacaagaucaagaacgcccugcuguccaccaacaaggccgucgugagccucuccaacggggugagcguccugaccuucaaggugcuggaccucaagaacuacaucgacaagcagcugcugcccauccugaacaagcagagcugcuccauccccaacaucgagaccgucaucgaguuccagcagaagaacaaccgccuccuggagaucacgcgggaguucagcgugaacgcgggcgugaccacccccgucuccaccuacaugcugacgaacagcgagcuccugucccugaucaacgacaugccgaucaccaacgaccagaagaagcucaugagcaacaacgugcagaucgugcgccagcaguccuacagcaucaugugcaucaucaaggaggagguccuggccuacguggugcagcugccccucuacggggucaucgacacccccugcuggaagcugcacaccagcccccugugcacgaccaacaccaaggagggcuccaacaucugccucacccggacggaccgcgggugguacugcgacaacgccggcagcguguccuucuucccgcaggccgagaccugcaagguccagagcaaccggguguucugcgacaccaugaacucccugacccugcccagcgaggugaaccucugcaacaucgacaucuucaaccccaaguacgacugcaagaucaugacguccaagaccgacgucagcuccagcgugaucaccucccugggcgccaucgugagcugcuacgggaagaccaagugcacggcgagcaacaagaaccgcggcaucaucaagaccuucuccaacgggugcgacuacgucagcaacaagggcguggacaccguguccgucggcaacacccuguacugcgugaacaagcaggagggccagagccucuacgugaagggggagcccaucaucaacuucuacgacccgcuggucuuccccuccgacgaguucgacgccagcaucucccaggugaacgagaagaucaaccagagccuggccuucauccggaaguccgacgagcuccugcacaacgugaacgucggcaagagcaccacgaacaucaugaucaccaccaucaucaucgugaucaucgugauccugcugcuccugaucgccgucgggcuguuccucuacugcaaggcccgcuccacccccgugacgcugagcaaggaccagcuguccgggaucaacaacaucgcguucagcaacugaggacuaguguccaccugucccuccugggcugcuggauugucucguuuuccugccaaauaaacaggaucagcgcuuuacagaucuaaaaaaaaaaaaaaaaaaaaaaaaaaaaaaaaaaaaaaaaaaaaaaaaaaaaaaaaaaaaaaaaugcaucccccccccccccccccccccccccccccccaaaggcucuuuucagagccaccagaauu

SEQ ID NO: 14134 - RNA, 1943 nt, Artificial Sequence
  mRNA product Design e-4 comprising derived and/or modified sequence from HRSV(Memphis-37)__AIY60640.1__F_DSCav1_mut1 (opt1)
gggagacuccugucgggcggaaguaggaggaguagaguuuaaaaacaguacucuuuuuccgguucgggacguaguugaagcaacgacaagccggauaaccgcucuugagacaggaagcuuaccauggagcugcccauccucaagaccaacgccaucaccacgauccuggccgcggugacccugugcuucgccagcucccagaacaucaccgaggaguucuaccagagcacgugcuccgccgucagcaagggcuaccucggggcccugcgcaccggcugguacaccuccgugaucaccaucgagcugagcaacaucaaggagaacaagugcaacgggaccgacgccaaggugaagcucaucaagcaggagcuggacaaguacaagaacgcggucacggagcugcagcuccugaugcaguccaccccggccgccggcagcggguccgccaucugcagcggcaucgcggugugcaaggugcugcaccucgagggcgaggucaacaagaucaagaacgcccugcuguccaccaacaaggccguggugagccucuccaacggggucagcgugcugaccuucaaggugcuggaccucaagaacuacaucgacaagcagcugcugcccauccucaacaagcaguccugcagcauccccaacaucgagacggucaucgaguuccagcagaagaacaaccggcugcuggagaucacccgcgaguucuccgugaacgccggcgugaccacccccgucagcacguacaugcucaccaacuccgagcugcugagccucaucaacgacaugccgaucaccaacgaccagaagaagcugaugagcaacaacgugcagaucgugcggcagcaguccuacagcaucaugugcaucaucaaggaggagguccuggccuacguggugcagcucccccuguacggggucaucgacacccccugcuggaagcugcacacgagcccccucugcaccaccaacaccaaggagggcuccaacaucugccugacgcgcaccgaccgggggugguacugcgacaacgcgggcuccgugagcuucuucccgcaggccgagaccugcaaggugcaguccaaccgcgucuucugcgacaccaugaacagccugacgcuccccuccgaggugaaccugugcaacaucgacaucuucaaccccaaguacgacugcaagaucaugaccagcaagaccgacgucuccagcuccgugaucaccagccugggcgccaucguguccugcuacgggaagacgaagugcaccgccagcaacaagaaccggggcaucaucaagaccuucuccaacgggugcgacuacgucagcaacaagggcguggacaccguguccgucggcaacacgcucuacugcgugaacaagcaggaggggcagagccuguacgugaagggcgagcccaucaucaacuucuacgacccgcuggucuuccccagcgacgaguucgacgccuccaucagccaggugaacgagaagaucaaccagucccucgcguucauccgcaagagcgacgagcugcugcacaacgugaacgucgggaaguccaccaccaacaucaugaucaccaccaucaucaucgugaucaucgugauccuccugcugcucaucgccgucggccuguuccuguacugcaaggcccggagcacgcccgugacccuguccaaggaccagcucagcgggaucaacaacaucgccuucuccaacugaggacuaguguccaccugucccuccugggcugcuggauugucucguuuuccugccaaauaaacaggaucagcgcuuuacagaucuaaaaaaaaaaaaaaaaaaaaaaaaaaaaaaaaaaaaaaaaaaaaaaaaaaaaaaaaaaaaaaaaugcaucccccccccccccccccccccccccccccccaaaggcucuuuucagagccaccagaauu

SEQ ID NO: 14135 - RNA, 1943 nt, Artificial Sequence
  mRNA product Design e-4 comprising derived and/or modified sequence from HRSV(Memphis-37)__AIY60640.1__F_DSCav1_mut1 (opt2)
gggagacuccugucgggcggaaguaggaggaguagaguuuaaaaacaguacucuuuuuccgguucgggacguaguugaagcaacgacaagccggauaaccgcucuugagacaggaagcuuaccauggagcuccccauccucaagaccaacgccaucaccaccauccucgccgccgucacccucugcuucgccuccucccagaacaucaccgaggaguucuaccaguccaccugcuccgccgucuccaagggcuaccucggcgcccuccgcaccggcugguacaccuccgucaucaccaucgagcucuccaacaucaaggagaacaagugcaacggcaccgacgccaaggucaagcucaucaagcaggagcucgacaaguacaagaacgccgucaccgagcuccagcuccucaugcaguccacccccgccgccggcuccggcuccgccaucugcuccggcaucgccgucugcaagguccuccaccucgagggcgaggucaacaagaucaagaacgcccuccucuccaccaacaaggccgucgucucccucuccaacggcgucuccguccucaccuucaagguccucgaccucaagaacuacaucgacaagcagcuccuccccauccucaacaagcaguccugcuccauccccaacaucgagaccgucaucgaguuccagcagaagaacaaccgccuccucgagaucacccgcgaguucuccgucaacgccggcgucaccacccccgucuccaccuacaugcucaccaacuccgagcuccucucccucaucaacgacaugcccaucaccaacgaccagaagaagcucauguccaacaacguccagaucguccgccagcaguccuacuccaucaugugcaucaucaaggaggagguccucgccuacgucguccagcucccccucuacggcgucaucgacacccccugcuggaagcuccacaccuccccccucugcaccaccaacaccaaggagggcuccaacaucugccucacccgcaccgaccgcggcugguacugcgacaacgccggcuccgucuccuucuucccccaggccgagaccugcaagguccaguccaaccgcgucuucugcgacaccaugaacucccucacccuccccuccgaggucaaccucugcaacaucgacaucuucaaccccaaguacgacugcaagaucaugaccuccaagaccgacgucuccuccuccgucaucaccucccucggcgccaucgucuccugcuacggcaagaccaagugcaccgccuccaacaagaaccgcggcaucaucaagaccuucuccaacggcugcgacuacgucuccaacaagggcgucgacaccgucuccgucggcaacacccucuacugcgucaacaagcaggagggccagucccucuacgucaagggcgagcccaucaucaacuucuacgacccccucgucuuccccuccgacgaguucgacgccuccaucucccaggucaacgagaagaucaaccagucccucgccuucauccgcaaguccgacgagcuccuccacaacgucaacgucggcaaguccaccaccaacaucaugaucaccaccaucaucaucgucaucaucgucauccuccuccuccucaucgccgucggccucuuccucuacugcaaggcccgcuccacccccgucacccucuccaaggaccagcucuccggcaucaacaacaucgccuucuccaacugaggacuaguguccaccugucccuccugggcugcuggauugucucguuuuccugccaaauaaacaggaucagcgcuuuacagaucuaaaaaaaaaaaaaaaaaaaaaaaaaaaaaaaaaaaaaaaaaaaaaaaaaaaaaaaaaaaaaaaaugcaucccccccccccccccccccccccccccccccaaaggcucuuuucagagccaccagaauu

SEQ ID NO: 14136 - RNA, 1943 nt, Artificial Sequence
  mRNA product Design e-4 comprising derived and/or modified sequence from HRSV(Memphis-37)__AIY60640.1__F_DSCav1_mut1 (opt3)
gggagacuccugucgggcggaaguaggaggaguagaguuuaaaaacaguacucuuuuuccgguucgggacguaguugaagcaacgacaagccggauaaccgcucuugagacaggaagcuuaccauggagcugcccauccucaagaccaacgccauuacaacuauacuugcugcagugacgcugugcuucgccagcucccagaauaucaccgaagaguuuuaccaaucuacauguucagcggucaguaaaggcuauuugggggcuuuaagaacuggaugguacaccagcguuauuacaaucgaacuguccaacauuaaggagaauaaaugcaacgguaccgacgccaaggugaaacuaaucaagcaggaacucgauaaguauaaaaaugcaguaacugagcugcagcuucugaugcagucuacuccugccgcuggcucggggucagcaauauguagcggaaucgccgugugcaaggucuugcaccucgagggcgaagugaacaaaauuaagaaugcucugcugaguaccaacaaagccguugugucccucucuaauggugucagcguguuaacguucaagguacuggaccuuaagaacuacaucgauaaacaauugcugccaauucuaaauaagcaguccuguucaaucccgaacauagagacuguuauugaauuucagcagaaaaauaacaggcuccuggagaucacccgggaguucagugugaaugcgggggucacaacucccgugagcaccuauaugcuuacaaacucugaacuguugucccucauuaacgacaugccuaucaccaaugaucaaaagaaacugaugucaaacaaugugcagaucguccgccagcagagcuacaguauuaugugcauaaucaaggaggaaguuuuagcauaugugguacaacugccacucuacggagugauugacacgcccuguuggaaacuucauacuucuccucugugcacaaccaacacuaaggagggcuccaauaucuguuugacacgaaccgaucguggcugguacugcgacaacgccgggagcgucucguuuuucccacaggcugaaacguguaaggugcagucuaauagaguguuuugcgauaccaugaacucccuaacacugcccucagagguuaaucucugcaacauagacauuuucaauccuaaauaugauuguaagaucaugacaaguaaaaccgacgucagcuccucugugaucacaagccugggagccauuguaucaugcuacgguaagacuaaauguaccgcaaguaacaagaauaggggcaucauuaagacauuuuccaacgggugcgauuauguuagcaauaaaggaguggacaccgucucugugggcaacacucuuuacugugucaacaagcaagagggucagucacuguaugugaaaggggaaccaauaaucaauuucuacgacccguugguuuuucccagugaugaguucgacgcuagcauuucccaggugaacgaaaagaucaaucagucucucgccuuuauccggaaaucggaugagcuguuacacaacguaaaugucggaaagagcacgacaaacauuaugauaaccacuaucauuaucgugauuaucguuauacugcuacuccugaucgcggugggccuuuucuuguauugcaaggcccgcuccaccccugucacacugucaaaagaccaacucaguggcauuaauaacaucgcauucucuaauugaggacuaguguccaccugucccuccugggcugcuggauugucucguuuuccugccaaauaaacaggaucagcgcuuuacagaucuaaaaaaaaaaaaaaaaaaaaaaaaaaaaaaaaaaaaaaaaaaaaaaaaaaaaaaaaaaaaaaaaugcaucccccccccccccccccccccccccccccccaaaggcucuuuucagagccaccagaauu

SEQ ID NO: 14137 - RNA, 1943 nt, Artificial Sequence
  mRNA product Design e-4 comprising derived and/or modified sequence from HRSV(Memphis-37)__AIY60640.1__F_DSCav1_mut1 (opt4)
gggagacuccugucgggcggaaguaggaggaguagaguuuaaaaacaguacucuuuuuccgguucgggacguaguugaagcaacgacaagccggauaaccgcucuugagacaggaagcuuaccauggagcugcccauccugaagaccaacgccaucaccaccauccuggccgccgugacccugugcuucgccagcagccagaacaucaccgaggaguucuaccagagcaccugcagcgccgugagcaagggcuaccugggcgcccugagaaccggcugguacaccagcgugaucaccaucgagcugagcaacaucaaggagaacaagugcaacggcaccgacgccaaggugaagcugaucaagcaggagcuggacaaguacaagaacgccgugaccgagcugcagcugcugaugcagagcacccccgccgccggcagcggcagcgccaucugcagcggcaucgccgugugcaaggugcugcaccuggagggcgaggugaacaagaucaagaacgcccugcugagcaccaacaaggccguggugagccugagcaacggcgugagcgugcugaccuucaaggugcuggaccugaagaacuacaucgacaagcagcugcugcccauccugaacaagcagagcugcagcauccccaacaucgagaccgugaucgaguuccagcagaagaacaacagacugcuggagaucaccagagaguucagcgugaacgccggcgugaccacccccgugagcaccuacaugcugaccaacagcgagcugcugagccugaucaacgacaugcccaucaccaacgaccagaagaagcugaugagcaacaacgugcagaucgugagacagcagagcuacagcaucaugugcaucaucaaggaggaggugcuggccuacguggugcagcugccccuguacggcgugaucgacacccccugcuggaagcugcacaccagcccccugugcaccaccaacaccaaggagggcagcaacaucugccugaccagaaccgacagaggcugguacugcgacaacgccggcagcgugagcuucuucccccaggccgagaccugcaaggugcagagcaacagaguguucugcgacaccaugaacagccugacccugcccagcgaggugaaccugugcaacaucgacaucuucaaccccaaguacgacugcaagaucaugaccagcaagaccgacgugagcagcagcgugaucaccagccugggcgccaucgugagcugcuacggcaagaccaagugcaccgccagcaacaagaacagaggcaucaucaagaccuucagcaacggcugcgacuacgugagcaacaagggcguggacaccgugagcgugggcaacacccuguacugcgugaacaagcaggagggccagagccuguacgugaagggcgagcccaucaucaacuucuacgacccccugguguuccccagcgacgaguucgacgccagcaucagccaggugaacgagaagaucaaccagagccuggccuucaucagaaagagcgacgagcugcugcacaacgugaacgugggcaagagcaccaccaacaucaugaucaccaccaucaucaucgugaucaucgugauccugcugcugcugaucgccgugggccuguuccuguacugcaaggccagaagcacccccgugacccugagcaaggaccagcugagcggcaucaacaacaucgccuucagcaacugaggacuaguguccaccugucccuccugggcugcuggauugucucguuuuccugccaaauaaacaggaucagcgcuuuacagaucuaaaaaaaaaaaaaaaaaaaaaaaaaaaaaaaaaaaaaaaaaaaaaaaaaaaaaaaaaaaaaaaaugcaucccccccccccccccccccccccccccccccaaaggcucuuuucagagccaccagaauu

SEQ ID NO: 14138 - RNA, 1943 nt, Artificial Sequence
  mRNA product Design e-4 comprising derived and/or modified sequence from HRSV(Memphis-37)__AIY60640.1__F_DSCav1_mut1 (opt5)
gggagacuccugucgggcggaaguaggaggaguagaguuuaaaaacaguacucuuuuuccgguucgggacguaguugaagcaacgacaagccggauaaccgcucuugagacaggaagcuuaccauggagcugcccauccucaagaccaacgccauuacaacgauccuggcugccgugacccuuugcuucgcgagcucccagaauauuacagaagaguuuuaccaaucuaccuguagcgcugucuccaaaggcuaucugggggcccucagaacaggaugguacaccucuguuaucacaauugaacugagcaacaucaaggagaauaaaugcaacggcaccgacgccaaggugaaacuuaucaagcaggaacuggauaaguauaaaaaugcugugacggagcuccagcugcugaugcaguccaccccugccgcugggucuggaagcgccauuuguuccggcaucgcggucugcaaggugcuccaccuggagggggaaguuaacaaaauuaagaaugcccuucugagcacaaacaaagcuguggucucucucuccaauggagugagcguucugaccuucaaggugcuugaccugaagaacuacaucgauaaacaacuccugccgauucugaauaagcagucuuguuccauccccaacauugagacagucaucgaauuucagcagaaaaauaaccggcuccuggagaucacccgcgaguucagcgugaaugccggcgugacgacaccugucucuaccuauaugcuuacaaacuccgaacugcucagccugauuaacgacaugcccaucaccaaugaucaaaagaaacuuauguccaacaauguucagauugugagacagcagucuuacagcaucaugugcauuaucaaggaggaagugcuggcuuaugucgugcaacucccucuguacggcguuaucgacacccccuguuggaaacugcauacauccccucucugcacgaccaacacaaaggaggggagcaauauuugucugacccggacagaucgcggaugguacugcgacaacgccggcucuguguccuuuuucccgcaggcggaaaccuguaagguccagagcaauagaguguuuugcgauacgaugaacucucuuacacugcccagcgagguuaaucucugcaacaucgacauuuucaauccuaaauaugauuguaagaucaugaccuccaaaaccgacgugucuagcuccgucauuacaagccugggggccaucgugucuugcuacggaaagaccaaauguacagcuuccaacaagaaucggggcaucauuaagacguuuagcaacgggugcgauuaugucucuaauaaaggaguggacaccguuuccgugggcaacacacuuuacugugucaacaagcaagagggccagagccuguaugugaaaggggaacccaucauuaauuucuacgacccucucguuuuucccuccgaugaguucgacgccucuaucagccaggugaacgaaaagauuaaucagucccuggcuuuuauccgcaaaucugaugagcugcuccacaacgucaaugugggaaagagcaccacaaacauuaugaucaccacgaucauuaucgugauuaucguuauucugcuucugcucaucgccgucggccuguuccuguauugcaaggccagauccaccccggugacacuuagcaaagaccaacucucugggaucaauaacauugcuuucuccaauugaggacuaguguccaccugucccuccugggcugcuggauugucucguuuuccugccaaauaaacaggaucagcgcuuuacagaucuaaaaaaaaaaaaaaaaaaaaaaaaaaaaaaaaaaaaaaaaaaaaaaaaaaaaaaaaaaaaaaaaugcaucccccccccccccccccccccccccccccccaaaggcucuuuucagagccaccagaauu

SEQ ID NO: 14139 - RNA, 1943 nt, Artificial Sequence
  mRNA product Design e-4 comprising derived and/or modified sequence from HRSV(Memphis-37)__AIY60640.1__F_DSCav1_mut1 (opt6)
gggagacuccugucgggcggaaguaggaggaguagaguuuaaaaacaguacucuuuuuccgguucgggacguaguugaagcaacgacaagccggauaaccgcucuugagacaggaagcuuaccauggaacuuccaauucuaaaaaccaaugcuauaacaacaauauuagcagcaguuacauuaugcuucgccucaucacaaaauaucacagaagaauuuuaccaauccacaugcucagcaguaucuaaaggguaccuaggagcccuacgaacaggaugguacacaucaguaauaacaauagaacucucaaacaucaaagaaaacaaaugcaauggaacagacgcuaaaguaaaauuaauaaaacaagaacuagacaaauacaaaaacgccgucaccgaacuucaguuacucaugcaaagcacaccugcagcaggaucagguucagcaauaugcucaggaauagcaguuugcaaaguauuacaccuagaaggugaagucaacaaaauaaaaaacgcacuucuaaguacuaacaaagcuguaguaucauuaucaaacggaguauccguacuaaccuuuaaaguccuagaccuaaaaaacuacauagacaaacaacuacucccaauacucaauaaacaauccugcucaauucccaacaucgaaacaguaauagaauuucaacaaaaaaacaaucgccuucuagaaauaacaagagaauuuucagucaacgccggaguaacaacaccaguaucaacauauaugcuaacaaacagugaacuauuauccuuaauaaacgacaugccaauaacaaaugaccaaaaaaaacuaauguccaauaauguccaaauaguaagacaacaaagcuauucaauuauguguauaauaaaagaagaaguauuagcauacguaguucaacuaccacuauauggcguuauagacacaccaugcuggaaauuacacacaagcccacuaugcacaacaaauacaaaagaaggauccaacauuugcuuaacuagaacugacagaggaugguacugcgacaacgcuggaucagucucuuucuucccacaagcagaaaccuguaaaguacaaucaaauagagucuucugcgacacaaugaacucacuaacucucccaucugaaguaaacuuaugcaacaucgauauauuuaacccaaaauacgauuguaaaauaaugacauccaaaacagacguuucaucaagcguaaucaccucccucggagcaaucguaagcugcuacgguaaaacaaaaugcacagcauccaacaaaaacagaggcaucauaaaaacauucucaaacggaugugacuauguaucaaacaaaggaguagacacaguuucaguaggcaauaccuuauacugugucaauaaacaagaaggacaaucacuauauguaaaaggagaaccuauaauaaacuucuacgacccccucgucuucccuagcgaugaauuugacgcaucaauaucgcaaguaaacgaaaaaauaaaccaaucauuagccuuuauaagaaaaucagacgaauuauuacacaacguaaacguggggaaaagcacaacuaacaucaugauaacaacuaucauaauuguaaucaucgucauccuauuacuccuaaucgcaguaggacuauuccuauacugcaaagcuagaucaacaccagucacccuaucgaaagaucaauugucaggaauaaacaauauagccuuuucaaauuaaggacuaguguccaccugucccuccugggcugcuggauugucucguuuuccugccaaauaaacaggaucagcgcuuuacagaucuaaaaaaaaaaaaaaaaaaaaaaaaaaaaaaaaaaaaaaaaaaaaaaaaaaaaaaaaaaaaaaaaugcaucccccccccccccccccccccccccccccccaaaggcucuuuucagagccaccagaauu

SEQ ID NO: 14140 - RNA, 1943 nt, Artificial Sequence
  mRNA product Design e-4 comprising derived and/or modified sequence from HRSV(Memphis-37)__AIY60640.1__F_DSCav1_mut1 (opt11)
gggagacuccugucgggcggaaguaggaggaguagaguuuaaaaacaguacucuuuuuccgguucgggacguaguugaagcaacgacaagccggauaaccgcucuugagacaggaagcuuaccauggaacuccccauccucaaaacgaacgccaucacaaccauccucgccgccgucacccucugcuucgcgucaucccaaaacauaacugaagaguucuaucaaucaaccugcuccgcagucucaaaaggcuaccucggcgcccuacggaccggcugguacacaagcgucaucacaauagaacuuuccaacaucaaagaaaacaaauguaacggcaccgacgcaaaagucaaacucauaaaacaagaacuagacaaauauaaaaacgccguaacugaacuacaacuccucaugcaaucaacuccugcagccgguagcggcuccgcaaucugcucaggcaucgcagucugcaaagucuuacaccuagaaggcgaagucaacaaaaucaagaacgcccuacuauccacaaacaaagcaguagucucucuauccaacggagucuccguccucacauucaaaguacucgaccuaaagaacuacaucgacaaacaacuacuaccaaucuuaaacaaacaauccugcucaaucccuaacauugaaaccgucauagaguuccaacagaaaaacaaccgccuccucgaaauaaccagagaguucucagucaacgccggcgucaccaccccggucucaaccuacaugcuaaccaacucugaacuucucagccuaaucaacgacaugcccauuaccaacgaccaaaagaaacucauguccaauaacguccaaaucguucgacaacaauccuacucaaucaugugcaucauaaaagaagaaguccuagcauacgucguccaacucccacuauacggcguaaucgacacccccugcuggaaacuccacaccuccccucucuguaccaccaacaccaaagaaggguccaacaucugccucacgcgcaccgaccgaggcugguauugcgacaaugcaggcucugucuccuucuucccccaagccgaaaccugcaaaguccaaucuaaccgcgucuucugcgacaccaugaacagucuuacccucccgucagaagucaaccucugcaacauagauaucuucaacccaaaauacgacugcaaaaucaugaccucaaaaaccgacguuuccucauccguuaucaccucccucggcgcaaucgucagcugcuacggcaagacaaagugcacggcuucaaacaaaaaccgcggaaucaucaagacauucagcaacggcugcgacuacguauccaacaaaggaguggacacagucuccguuggaaacacccucuacugcguaaacaaacaagaaggccaaucacucuacgucaaaggcgaacccaucaucaacuucuacgacccacucgucuuccccuccgacgaguucgacgccucaaucagccaagucaacgagaaaauuaaccagucacucgccuucauacgcaaauccgacgaacuucuacacaacguaaacgucggaaaaucaaccacaaacaucaugauuaccacaauuaucauagucaucauaguaauccuccugcuacucauagcagucggacucuuccuauacugcaaagcccgcuccaccccugucacccuauccaaagaccaacuuuccggcaucaacaacauagccuuuuccaacuaaggacuaguguccaccugucccuccugggcugcuggauugucucguuuuccugccaaauaaacaggaucagcgcuuuacagaucuaaaaaaaaaaaaaaaaaaaaaaaaaaaaaaaaaaaaaaaaaaaaaaaaaaaaaaaaaaaaaaaaugcaucccccccccccccccccccccccccccccccaaaggcucuuuucagagccaccagaauu

SEQ ID NO: 14141 - RNA, 1910 nt, Artificial Sequence
  mRNA product Design e-5 comprising derived and/or modified sequence from HRSV(Memphis-37)__AIY60640.1__F_DSCav1_mut1 (opt1)
gggagagcggcucggccauuuugucccagucaguccggaggcugcggcugcagaaguaccgccugcggaguaacugcaaagaagcuuaccauggagcugcccauccucaagaccaacgccaucaccacgauccuggccgcggugacccugugcuucgccagcucccagaacaucaccgaggaguucuaccagagcacgugcuccgccgucagcaagggcuaccucggcgcccugcgcaccgggugguacaccagcgugaucaccaucgagcuguccaacaucaaggagaacaagugcaacggcaccgacgccaaggugaagcucaucaagcaggagcuggacaaguacaagaacgcggucacggagcugcagcuccugaugcagagcaccccggccgccggcuccgggagcgcgaucugcuccggcaucgccgucugcaaggugcugcaccucgagggcgaggugaacaagaucaagaacgcccugcuguccaccaacaaggccgucgugagccucuccaacggggugagcguccugaccuucaaggugcuggaccucaagaacuacaucgacaagcagcugcugcccauccugaacaagcagagcugcuccauccccaacaucgagaccgucaucgaguuccagcagaagaacaaccgccuccuggagaucacgcgggaguucagcgugaacgcgggcgugaccacccccgucuccaccuacaugcugacgaacagcgagcuccugucccugaucaacgacaugccgaucaccaacgaccagaagaagcucaugagcaacaacgugcagaucgugcgccagcaguccuacagcaucaugugcaucaucaaggaggagguccuggccuacguggugcagcugccccucuacggggucaucgacacccccugcuggaagcugcacaccagcccccugugcacgaccaacaccaaggagggcuccaacaucugccucacccggacggaccgcgggugguacugcgacaacgccggcagcguguccuucuucccgcaggccgagaccugcaagguccagagcaaccggguguucugcgacaccaugaacucccugacccugcccagcgaggugaaccucugcaacaucgacaucuucaaccccaaguacgacugcaagaucaugacguccaagaccgacgucagcuccagcgugaucaccucccugggcgccaucgugagcugcuacgggaagaccaagugcacggcgagcaacaagaaccgcggcaucaucaagaccuucuccaacgggugcgacuacgucagcaacaagggcguggacaccguguccgucggcaacacccuguacugcgugaacaagcaggagggccagagccucuacgugaagggggagcccaucaucaacuucuacgacccgcuggucuuccccuccgacgaguucgacgccagcaucucccaggugaacgagaagaucaaccagagccuggccuucauccggaaguccgacgagcuccugcacaacgugaacgucggcaagagcaccacgaacaucaugaucaccaccaucaucaucgugaucaucgugauccugcugcuccugaucgccgucgggcuguuccucuacugcaaggcccgcuccacccccgugacgcugagcaaggaccagcuguccgggaucaacaacaucgcguucagcaacugaggacuaguguccaccugucccuccugggcugcuggauugucucguuuuccugccaaauaaacaggaucagcgcuuuacagaucuaaaaaaaaaaaaaaaaaaaaaaaaaaaaaaaaaaaaaaaaaaaaaaaaaaaaaaaaaaaaaaaaugcaucccccccccccccccccccccccccccccccaaaggcucuuuucagagccaccagaauu

SEQ ID NO: 14142 - RNA, 1910 nt, Artificial Sequence
  mRNA product Design e-5 comprising derived and/or modified sequence from HRSV(Memphis-37)__AIY60640.1__F_DSCav1_mut1 (opt1)
gggagagcggcucggccauuuugucccagucaguccggaggcugcggcugcagaaguaccgccugcggaguaacugcaaagaagcuuaccauggagcugcccauccucaagaccaacgccaucaccacgauccuggccgcggugacccugugcuucgccagcucccagaacaucaccgaggaguucuaccagagcacgugcuccgccgucagcaagggcuaccucggggcccugcgcaccggcugguacaccuccgugaucaccaucgagcugagcaacaucaaggagaacaagugcaacgggaccgacgccaaggugaagcucaucaagcaggagcuggacaaguacaagaacgcggucacggagcugcagcuccugaugcaguccaccccggccgccggcagcggguccgccaucugcagcggcaucgcggugugcaaggugcugcaccucgagggcgaggucaacaagaucaagaacgcccugcuguccaccaacaaggccguggugagccucuccaacggggucagcgugcugaccuucaaggugcuggaccucaagaacuacaucgacaagcagcugcugcccauccucaacaagcaguccugcagcauccccaacaucgagacggucaucgaguuccagcagaagaacaaccggcugcuggagaucacccgcgaguucuccgugaacgccggcgugaccacccccgucagcacguacaugcucaccaacuccgagcugcugagccucaucaacgacaugccgaucaccaacgaccagaagaagcugaugagcaacaacgugcagaucgugcggcagcaguccuacagcaucaugugcaucaucaaggaggagguccuggccuacguggugcagcucccccuguacggggucaucgacacccccugcuggaagcugcacacgagcccccucugcaccaccaacaccaaggagggcuccaacaucugccugacgcgcaccgaccgggggugguacugcgacaacgcgggcuccgugagcuucuucccgcaggccgagaccugcaaggugcaguccaaccgcgucuucugcgacaccaugaacagccugacgcuccccuccgaggugaaccugugcaacaucgacaucuucaaccccaaguacgacugcaagaucaugaccagcaagaccgacgucuccagcuccgugaucaccagccugggcgccaucguguccugcuacgggaagacgaagugcaccgccagcaacaagaaccggggcaucaucaagaccuucuccaacgggugcgacuacgucagcaacaagggcguggacaccguguccgucggcaacacgcucuacugcgugaacaagcaggaggggcagagccuguacgugaagggcgagcccaucaucaacuucuacgacccgcuggucuuccccagcgacgaguucgacgccuccaucagccaggugaacgagaagaucaaccagucccucgcguucauccgcaagagcgacgagcugcugcacaacgugaacgucgggaaguccaccaccaacaucaugaucaccaccaucaucaucgugaucaucgugauccuccugcugcucaucgccgucggccuguuccuguacugcaaggcccggagcacgcccgugacccuguccaaggaccagcucagcgggaucaacaacaucgccuucuccaacugaggacuaguguccaccugucccuccugggcugcuggauugucucguuuuccugccaaauaaacaggaucagcgcuuuacagaucuaaaaaaaaaaaaaaaaaaaaaaaaaaaaaaaaaaaaaaaaaaaaaaaaaaaaaaaaaaaaaaaaugcaucccccccccccccccccccccccccccccccaaaggcucuuuucagagccaccagaauu

SEQ ID NO: 14143 - RNA, 1910 nt, Artificial Sequence
  mRNA product Design e-5 comprising derived and/or modified sequence from HRSV(Memphis-37)__AIY60640.1__F_DSCav1_mut1 (opt2)
gggagagcggcucggccauuuugucccagucaguccggaggcugcggcugcagaaguaccgccugcggaguaacugcaaagaagcuuaccauggagcuccccauccucaagaccaacgccaucaccaccauccucgccgccgucacccucugcuucgccuccucccagaacaucaccgaggaguucuaccaguccaccugcuccgccgucuccaagggcuaccucggcgcccuccgcaccggcugguacaccuccgucaucaccaucgagcucuccaacaucaaggagaacaagugcaacggcaccgacgccaaggucaagcucaucaagcaggagcucgacaaguacaagaacgccgucaccgagcuccagcuccucaugcaguccacccccgccgccggcuccggcuccgccaucugcuccggcaucgccgucugcaagguccuccaccucgagggcgaggucaacaagaucaagaacgcccuccucuccaccaacaaggccgucgucucccucuccaacggcgucuccguccucaccuucaagguccucgaccucaagaacuacaucgacaagcagcuccuccccauccucaacaagcaguccugcuccauccccaacaucgagaccgucaucgaguuccagcagaagaacaaccgccuccucgagaucacccgcgaguucuccgucaacgccggcgucaccacccccgucuccaccuacaugcucaccaacuccgagcuccucucccucaucaacgacaugcccaucaccaacgaccagaagaagcucauguccaacaacguccagaucguccgccagcaguccuacuccaucaugugcaucaucaaggaggagguccucgccuacgucguccagcucccccucuacggcgucaucgacacccccugcuggaagcuccacaccuccccccucugcaccaccaacaccaaggagggcuccaacaucugccucacccgcaccgaccgcggcugguacugcgacaacgccggcuccgucuccuucuucccccaggccgagaccugcaagguccaguccaaccgcgucuucugcgacaccaugaacucccucacccuccccuccgaggucaaccucugcaacaucgacaucuucaaccccaaguacgacugcaagaucaugaccuccaagaccgacgucuccuccuccgucaucaccucccucggcgccaucgucuccugcuacggcaagaccaagugcaccgccuccaacaagaaccgcggcaucaucaagaccuucuccaacggcugcgacuacgucuccaacaagggcgucgacaccgucuccgucggcaacacccucuacugcgucaacaagcaggagggccagucccucuacgucaagggcgagcccaucaucaacuucuacgacccccucgucuuccccuccgacgaguucgacgccuccaucucccaggucaacgagaagaucaaccagucccucgccuucauccgcaaguccgacgagcuccuccacaacgucaacgucggcaaguccaccaccaacaucaugaucaccaccaucaucaucgucaucaucgucauccuccuccuccucaucgccgucggccucuuccucuacugcaaggcccgcuccacccccgucacccucuccaaggaccagcucuccggcaucaacaacaucgccuucuccaacugaggacuaguguccaccugucccuccugggcugcuggauugucucguuuuccugccaaauaaacaggaucagcgcuuuacagaucuaaaaaaaaaaaaaaaaaaaaaaaaaaaaaaaaaaaaaaaaaaaaaaaaaaaaaaaaaaaaaaaaugcaucccccccccccccccccccccccccccccccaaaggcucuuuucagagccaccagaauu

SEQ ID NO: 14144 - RNA, 1910 nt, Artificial Sequence
  mRNA product Design e-5 comprising derived and/or modified sequence from HRSV(Memphis-37)__AIY60640.1__F_DSCav1_mut1 (opt3)
gggagagcggcucggccauuuugucccagucaguccggaggcugcggcugcagaaguaccgccugcggaguaacugcaaagaagcuuaccauggagcugcccauccucaagaccaacgccauuacaacuauacuugcugcagugacgcugugcuucgccagcucccagaauaucaccgaagaguuuuaccaaucuacauguucagcggucaguaaaggcuauuugggggcuuuaagaacuggaugguacaccagcguuauuacaaucgaacuguccaacauuaaggagaauaaaugcaacgguaccgacgccaaggugaaacuaaucaagcaggaacucgauaaguauaaaaaugcaguaacugagcugcagcuucugaugcagucuacuccugccgcuggcucggggucagcaauauguagcggaaucgccgugugcaaggucuugcaccucgagggcgaagugaacaaaauuaagaaugcucugcugaguaccaacaaagccguugugucccucucuaauggugucagcguguuaacguucaagguacuggaccuuaagaacuacaucgauaaacaauugcugccaauucuaaauaagcaguccuguucaaucccgaacauagagacuguuauugaauuucagcagaaaaauaacaggcuccuggagaucacccgggaguucagugugaaugcgggggucacaacucccgugagcaccuauaugcuuacaaacucugaacuguugucccucauuaacgacaugccuaucaccaaugaucaaaagaaacugaugucaaacaaugugcagaucguccgccagcagagcuacaguauuaugugcauaaucaaggaggaaguuuuagcauaugugguacaacugccacucuacggagugauugacacgcccuguuggaaacuucauacuucuccucugugcacaaccaacacuaaggagggcuccaauaucuguuugacacgaaccgaucguggcugguacugcgacaacgccgggagcgucucguuuuucccacaggcugaaacguguaaggugcagucuaauagaguguuuugcgauaccaugaacucccuaacacugcccucagagguuaaucucugcaacauagacauuuucaauccuaaauaugauuguaagaucaugacaaguaaaaccgacgucagcuccucugugaucacaagccugggagccauuguaucaugcuacgguaagacuaaauguaccgcaaguaacaagaauaggggcaucauuaagacauuuuccaacgggugcgauuauguuagcaauaaaggaguggacaccgucucugugggcaacacucuuuacugugucaacaagcaagagggucagucacuguaugugaaaggggaaccaauaaucaauuucuacgacccguugguuuuucccagugaugaguucgacgcuagcauuucccaggugaacgaaaagaucaaucagucucucgccuuuauccggaaaucggaugagcuguuacacaacguaaaugucggaaagagcacgacaaacauuaugauaaccacuaucauuaucgugauuaucguuauacugcuacuccugaucgcggugggccuuuucuuguauugcaaggcccgcuccaccccugucacacugucaaaagaccaacucaguggcauuaauaacaucgcauucucuaauugaggacuaguguccaccugucccuccugggcugcuggauugucucguuuuccugccaaauaaacaggaucagcgcuuuacagaucuaaaaaaaaaaaaaaaaaaaaaaaaaaaaaaaaaaaaaaaaaaaaaaaaaaaaaaaaaaaaaaaaugcaucccccccccccccccccccccccccccccccaaaggcucuuuucagagccaccagaauu

SEQ ID NO: 14145 - RNA, 1910 nt, Artificial Sequence
  mRNA product Design e-5 comprising derived and/or modified sequence from HRSV(Memphis-37)__AIY60640.1__F_DSCav1_mut1 (opt4)
gggagagcggcucggccauuuugucccagucaguccggaggcugcggcugcagaaguaccgccugcggaguaacugcaaagaagcuuaccauggagcugcccauccugaagaccaacgccaucaccaccauccuggccgccgugacccugugcuucgccagcagccagaacaucaccgaggaguucuaccagagcaccugcagcgccgugagcaagggcuaccugggcgcccugagaaccggcugguacaccagcgugaucaccaucgagcugagcaacaucaaggagaacaagugcaacggcaccgacgccaaggugaagcugaucaagcaggagcuggacaaguacaagaacgccgugaccgagcugcagcugcugaugcagagcacccccgccgccggcagcggcagcgccaucugcagcggcaucgccgugugcaaggugcugcaccuggagggcgaggugaacaagaucaagaacgcccugcugagcaccaacaaggccguggugagccugagcaacggcgugagcgugcugaccuucaaggugcuggaccugaagaacuacaucgacaagcagcugcugcccauccugaacaagcagagcugcagcauccccaacaucgagaccgugaucgaguuccagcagaagaacaacagacugcuggagaucaccagagaguucagcgugaacgccggcgugaccacccccgugagcaccuacaugcugaccaacagcgagcugcugagccugaucaacgacaugcccaucaccaacgaccagaagaagcugaugagcaacaacgugcagaucgugagacagcagagcuacagcaucaugugcaucaucaaggaggaggugcuggccuacguggugcagcugccccuguacggcgugaucgacacccccugcuggaagcugcacaccagcccccugugcaccaccaacaccaaggagggcagcaacaucugccugaccagaaccgacagaggcugguacugcgacaacgccggcagcgugagcuucuucccccaggccgagaccugcaaggugcagagcaacagaguguucugcgacaccaugaacagccugacccugcccagcgaggugaaccugugcaacaucgacaucuucaaccccaaguacgacugcaagaucaugaccagcaagaccgacgugagcagcagcgugaucaccagccugggcgccaucgugagcugcuacggcaagaccaagugcaccgccagcaacaagaacagaggcaucaucaagaccuucagcaacggcugcgacuacgugagcaacaagggcguggacaccgugagcgugggcaacacccuguacugcgugaacaagcaggagggccagagccuguacgugaagggcgagcccaucaucaacuucuacgacccccugguguuccccagcgacgaguucgacgccagcaucagccaggugaacgagaagaucaaccagagccuggccuucaucagaaagagcgacgagcugcugcacaacgugaacgugggcaagagcaccaccaacaucaugaucaccaccaucaucaucgugaucaucgugauccugcugcugcugaucgccgugggccuguuccuguacugcaaggccagaagcacccccgugacccugagcaaggaccagcugagcggcaucaacaacaucgccuucagcaacugaggacuaguguccaccugucccuccugggcugcuggauugucucguuuuccugccaaauaaacaggaucagcgcuuuacagaucuaaaaaaaaaaaaaaaaaaaaaaaaaaaaaaaaaaaaaaaaaaaaaaaaaaaaaaaaaaaaaaaaugcaucccccccccccccccccccccccccccccccaaaggcucuuuucagagccaccagaauu

SEQ ID NO: 14146 - RNA, 1910 nt, Artificial Sequence
  mRNA product Design e-5 comprising derived and/or modified sequence from HRSV(Memphis-37)__AIY60640.1__F_DSCav1_mut1 (opt5)
gggagagcggcucggccauuuugucccagucaguccggaggcugcggcugcagaaguaccgccugcggaguaacugcaaagaagcuuaccauggagcugcccauccucaagaccaacgccauuacaacgauccuggcugccgugacccuuugcuucgcgagcucccagaauauuacagaagaguuuuaccaaucuaccuguagcgcugucuccaaaggcuaucugggggcccucagaacaggaugguacaccucuguuaucacaauugaacugagcaacaucaaggagaauaaaugcaacggcaccgacgccaaggugaaacuuaucaagcaggaacuggauaaguauaaaaaugcugugacggagcuccagcugcugaugcaguccaccccugccgcugggucuggaagcgccauuuguuccggcaucgcggucugcaaggugcuccaccuggagggggaaguuaacaaaauuaagaaugcccuucugagcacaaacaaagcuguggucucucucuccaauggagugagcguucugaccuucaaggugcuugaccugaagaacuacaucgauaaacaacuccugccgauucugaauaagcagucuuguuccauccccaacauugagacagucaucgaauuucagcagaaaaauaaccggcuccuggagaucacccgcgaguucagcgugaaugccggcgugacgacaccugucucuaccuauaugcuuacaaacuccgaacugcucagccugauuaacgacaugcccaucaccaaugaucaaaagaaacuuauguccaacaauguucagauugugagacagcagucuuacagcaucaugugcauuaucaaggaggaagugcuggcuuaugucgugcaacucccucuguacggcguuaucgacacccccuguuggaaacugcauacauccccucucugcacgaccaacacaaaggaggggagcaauauuugucugacccggacagaucgcggaugguacugcgacaacgccggcucuguguccuuuuucccgcaggcggaaaccuguaagguccagagcaauagaguguuuugcgauacgaugaacucucuuacacugcccagcgagguuaaucucugcaacaucgacauuuucaauccuaaauaugauuguaagaucaugaccuccaaaaccgacgugucuagcuccgucauuacaagccugggggccaucgugucuugcuacggaaagaccaaauguacagcuuccaacaagaaucggggcaucauuaagacguuuagcaacgggugcgauuaugucucuaauaaaggaguggacaccguuuccgugggcaacacacuuuacugugucaacaagcaagagggccagagccuguaugugaaaggggaacccaucauuaauuucuacgacccucucguuuuucccuccgaugaguucgacgccucuaucagccaggugaacgaaaagauuaaucagucccuggcuuuuauccgcaaaucugaugagcugcuccacaacgucaaugugggaaagagcaccacaaacauuaugaucaccacgaucauuaucgugauuaucguuauucugcuucugcucaucgccgucggccuguuccuguauugcaaggccagauccaccccggugacacuuagcaaagaccaacucucugggaucaauaacauugcuuucuccaauugaggacuaguguccaccugucccuccugggcugcuggauugucucguuuuccugccaaauaaacaggaucagcgcuuuacagaucuaaaaaaaaaaaaaaaaaaaaaaaaaaaaaaaaaaaaaaaaaaaaaaaaaaaaaaaaaaaaaaaaugcaucccccccccccccccccccccccccccccccaaaggcucuuuucagagccaccagaauu

SEQ ID NO: 14147 - RNA, 1910 nt, Artificial Sequence
  mRNA product Design e-5 comprising derived and/or modified sequence from HRSV(Memphis-37)__AIY60640.1__F_DSCav1_mut1 (opt6)
gggagagcggcucggccauuuugucccagucaguccggaggcugcggcugcagaaguaccgccugcggaguaacugcaaagaagcuuaccauggaacuuccaauucuaaaaaccaaugcuauaacaacaauauuagcagcaguuacauuaugcuucgccucaucacaaaauaucacagaagaauuuuaccaauccacaugcucagcaguaucuaaaggguaccuaggagcccuacgaacaggaugguacacaucaguaauaacaauagaacucucaaacaucaaagaaaacaaaugcaauggaacagacgcuaaaguaaaauuaauaaaacaagaacuagacaaauacaaaaacgccgucaccgaacuucaguuacucaugcaaagcacaccugcagcaggaucagguucagcaauaugcucaggaauagcaguuugcaaaguauuacaccuagaaggugaagucaacaaaauaaaaaacgcacuucuaaguacuaacaaagcuguaguaucauuaucaaacggaguauccguacuaaccuuuaaaguccuagaccuaaaaaacuacauagacaaacaacuacucccaauacucaauaaacaauccugcucaauucccaacaucgaaacaguaauagaauuucaacaaaaaaacaaucgccuucuagaaauaacaagagaauuuucagucaacgccggaguaacaacaccaguaucaacauauaugcuaacaaacagugaacuauuauccuuaauaaacgacaugccaauaacaaaugaccaaaaaaaacuaauguccaauaauguccaaauaguaagacaacaaagcuauucaauuauguguauaauaaaagaagaaguauuagcauacguaguucaacuaccacuauauggcguuauagacacaccaugcuggaaauuacacacaagcccacuaugcacaacaaauacaaaagaaggauccaacauuugcuuaacuagaacugacagaggaugguacugcgacaacgcuggaucagucucuuucuucccacaagcagaaaccuguaaaguacaaucaaauagagucuucugcgacacaaugaacucacuaacucucccaucugaaguaaacuuaugcaacaucgauauauuuaacccaaaauacgauuguaaaauaaugacauccaaaacagacguuucaucaagcguaaucaccucccucggagcaaucguaagcugcuacgguaaaacaaaaugcacagcauccaacaaaaacagaggcaucauaaaaacauucucaaacggaugugacuauguaucaaacaaaggaguagacacaguuucaguaggcaauaccuuauacugugucaauaaacaagaaggacaaucacuauauguaaaaggagaaccuauaauaaacuucuacgacccccucgucuucccuagcgaugaauuugacgcaucaauaucgcaaguaaacgaaaaaauaaaccaaucauuagccuuuauaagaaaaucagacgaauuauuacacaacguaaacguggggaaaagcacaacuaacaucaugauaacaacuaucauaauuguaaucaucgucauccuauuacuccuaaucgcaguaggacuauuccuauacugcaaagcuagaucaacaccagucacccuaucgaaagaucaauugucaggaauaaacaauauagccuuuucaaauuaaggacuaguguccaccugucccuccugggcugcuggauugucucguuuuccugccaaauaaacaggaucagcgcuuuacagaucuaaaaaaaaaaaaaaaaaaaaaaaaaaaaaaaaaaaaaaaaaaaaaaaaaaaaaaaaaaaaaaaaugcaucccccccccccccccccccccccccccccccaaaggcucuuuucagagccaccagaauu

SEQ ID NO: 14148 - RNA, 1910 nt, Artificial Sequence
  mRNA product Design e-5 comprising derived and/or modified sequence from HRSV(Memphis-37)__AIY60640.1__F_DSCav1_mut1 (opt11)
gggagagcggcucggccauuuugucccagucaguccggaggcugcggcugcagaaguaccgccugcggaguaacugcaaagaagcuuaccauggaacuccccauccucaaaacgaacgccaucacaaccauccucgccgccgucacccucugcuucgcgucaucccaaaacauaacugaagaguucuaucaaucaaccugcuccgcagucucaaaaggcuaccucggcgcccuacggaccggcugguacacaagcgucaucacaauagaacuuuccaacaucaaagaaaacaaauguaacggcaccgacgcaaaagucaaacucauaaaacaagaacuagacaaauauaaaaacgccguaacugaacuacaacuccucaugcaaucaacuccugcagccgguagcggcuccgcaaucugcucaggcaucgcagucugcaaagucuuacaccuagaaggcgaagucaacaaaaucaagaacgcccuacuauccacaaacaaagcaguagucucucuauccaacggagucuccguccucacauucaaaguacucgaccuaaagaacuacaucgacaaacaacuacuaccaaucuuaaacaaacaauccugcucaaucccuaacauugaaaccgucauagaguuccaacagaaaaacaaccgccuccucgaaauaaccagagaguucucagucaacgccggcgucaccaccccggucucaaccuacaugcuaaccaacucugaacuucucagccuaaucaacgacaugcccauuaccaacgaccaaaagaaacucauguccaauaacguccaaaucguucgacaacaauccuacucaaucaugugcaucauaaaagaagaaguccuagcauacgucguccaacucccacuauacggcguaaucgacacccccugcuggaaacuccacaccuccccucucuguaccaccaacaccaaagaaggguccaacaucugccucacgcgcaccgaccgaggcugguauugcgacaaugcaggcucugucuccuucuucccccaagccgaaaccugcaaaguccaaucuaaccgcgucuucugcgacaccaugaacagucuuacccucccgucagaagucaaccucugcaacauagauaucuucaacccaaaauacgacugcaaaaucaugaccucaaaaaccgacguuuccucauccguuaucaccucccucggcgcaaucgucagcugcuacggcaagacaaagugcacggcuucaaacaaaaaccgcggaaucaucaagacauucagcaacggcugcgacuacguauccaacaaaggaguggacacagucuccguuggaaacacccucuacugcguaaacaaacaagaaggccaaucacucuacgucaaaggcgaacccaucaucaacuucuacgacccacucgucuuccccuccgacgaguucgacgccucaaucagccaagucaacgagaaaauuaaccagucacucgccuucauacgcaaauccgacgaacuucuacacaacguaaacgucggaaaaucaaccacaaacaucaugauuaccacaauuaucauagucaucauaguaauccuccugcuacucauagcagucggacucuuccuauacugcaaagcccgcuccaccccugucacccuauccaaagaccaacuuuccggcaucaacaacauagccuuuuccaacuaaggacuaguguccaccugucccuccugggcugcuggauugucucguuuuccugccaaauaaacaggaucagcgcuuuacagaucuaaaaaaaaaaaaaaaaaaaaaaaaaaaaaaaaaaaaaaaaaaaaaaaaaaaaaaaaaaaaaaaaugcaucccccccccccccccccccccccccccccccaaaggcucuuuucagagccaccagaauu

SEQ ID NO: 14149 - RNA, 1977 nt, Artificial Sequence
  mRNA product Design e-6 comprising derived and/or modified sequence from HRSV(Memphis-37)__AIY60640.1__F_DSCav1_mut1 (opt1)
gggagagcggcucggccauuuugucccagucaguccggaggcugcggcugcagaaguaccgccugcggaguaacugcaaagaagcuuaccauggagcugcccauccucaagaccaacgccaucaccacgauccuggccgcggugacccugugcuucgccagcucccagaacaucaccgaggaguucuaccagagcacgugcuccgccgucagcaagggcuaccucggcgcccugcgcaccgggugguacaccagcgugaucaccaucgagcuguccaacaucaaggagaacaagugcaacggcaccgacgccaaggugaagcucaucaagcaggagcuggacaaguacaagaacgcggucacggagcugcagcuccugaugcagagcaccccggccgccggcuccgggagcgcgaucugcuccggcaucgccgucugcaaggugcugcaccucgagggcgaggugaacaagaucaagaacgcccugcuguccaccaacaaggccgucgugagccucuccaacggggugagcguccugaccuucaaggugcuggaccucaagaacuacaucgacaagcagcugcugcccauccugaacaagcagagcugcuccauccccaacaucgagaccgucaucgaguuccagcagaagaacaaccgccuccuggagaucacgcgggaguucagcgugaacgcgggcgugaccacccccgucuccaccuacaugcugacgaacagcgagcuccugucccugaucaacgacaugccgaucaccaacgaccagaagaagcucaugagcaacaacgugcagaucgugcgccagcaguccuacagcaucaugugcaucaucaaggaggagguccuggccuacguggugcagcugccccucuacggggucaucgacacccccugcuggaagcugcacaccagcccccugugcacgaccaacaccaaggagggcuccaacaucugccucacccggacggaccgcgggugguacugcgacaacgccggcagcguguccuucuucccgcaggccgagaccugcaagguccagagcaaccggguguucugcgacaccaugaacucccugacccugcccagcgaggugaaccucugcaacaucgacaucuucaaccccaaguacgacugcaagaucaugacguccaagaccgacgucagcuccagcgugaucaccucccugggcgccaucgugagcugcuacgggaagaccaagugcacggcgagcaacaagaaccgcggcaucaucaagaccuucuccaacgggugcgacuacgucagcaacaagggcguggacaccguguccgucggcaacacccuguacugcgugaacaagcaggagggccagagccucuacgugaagggggagcccaucaucaacuucuacgacccgcuggucuuccccuccgacgaguucgacgccagcaucucccaggugaacgagaagaucaaccagagccuggccuucauccggaaguccgacgagcuccugcacaacgugaacgucggcaagagcaccacgaacaucaugaucaccaccaucaucaucgugaucaucgugauccugcugcuccugaucgccgucgggcuguuccucuacugcaaggcccgcuccacccccgugacgcugagcaaggaccagcuguccgggaucaacaacaucgcguucagcaacugaggacuaguacuggcugcaucucccuuuccucuguccuccauccuucucccaggauggugaagggggaccugguacccagugauccccaccccaggauccuaaaucaugacuuaccugcuaauaaaaacucauuggaaaagugagaagaucuaaaaaaaaaaaaaaaaaaaaaaaaaaaaaaaaaaaaaaaaaaaaaaaaaaaaaaaaaaaaaaaaugcaucccccccccccccccccccccccccccccccaaaggcucuuuucagagccaccagaauu

SEQ ID NO: 14150 - RNA, 1977 nt, Artificial Sequence
  mRNA product Design e-6 comprising derived and/or modified sequence from HRSV(Memphis-37)__AIY60640.1__F_DSCav1_mut1 (opt1)
gggagagcggcucggccauuuugucccagucaguccggaggcugcggcugcagaaguaccgccugcggaguaacugcaaagaagcuuaccauggagcugcccauccucaagaccaacgccaucaccacgauccuggccgcggugacccugugcuucgccagcucccagaacaucaccgaggaguucuaccagagcacgugcuccgccgucagcaagggcuaccucggggcccugcgcaccggcugguacaccuccgugaucaccaucgagcugagcaacaucaaggagaacaagugcaacgggaccgacgccaaggugaagcucaucaagcaggagcuggacaaguacaagaacgcggucacggagcugcagcuccugaugcaguccaccccggccgccggcagcggguccgccaucugcagcggcaucgcggugugcaaggugcugcaccucgagggcgaggucaacaagaucaagaacgcccugcuguccaccaacaaggccguggugagccucuccaacggggucagcgugcugaccuucaaggugcuggaccucaagaacuacaucgacaagcagcugcugcccauccucaacaagcaguccugcagcauccccaacaucgagacggucaucgaguuccagcagaagaacaaccggcugcuggagaucacccgcgaguucuccgugaacgccggcgugaccacccccgucagcacguacaugcucaccaacuccgagcugcugagccucaucaacgacaugccgaucaccaacgaccagaagaagcugaugagcaacaacgugcagaucgugcggcagcaguccuacagcaucaugugcaucaucaaggaggagguccuggccuacguggugcagcucccccuguacggggucaucgacacccccugcuggaagcugcacacgagcccccucugcaccaccaacaccaaggagggcuccaacaucugccugacgcgcaccgaccgggggugguacugcgacaacgcgggcuccgugagcuucuucccgcaggccgagaccugcaaggugcaguccaaccgcgucuucugcgacaccaugaacagccugacgcuccccuccgaggugaaccugugcaacaucgacaucuucaaccccaaguacgacugcaagaucaugaccagcaagaccgacgucuccagcuccgugaucaccagccugggcgccaucguguccugcuacgggaagacgaagugcaccgccagcaacaagaaccggggcaucaucaagaccuucuccaacgggugcgacuacgucagcaacaagggcguggacaccguguccgucggcaacacgcucuacugcgugaacaagcaggaggggcagagccuguacgugaagggcgagcccaucaucaacuucuacgacccgcuggucuuccccagcgacgaguucgacgccuccaucagccaggugaacgagaagaucaaccagucccucgcguucauccgcaagagcgacgagcugcugcacaacgugaacgucgggaaguccaccaccaacaucaugaucaccaccaucaucaucgugaucaucgugauccuccugcugcucaucgccgucggccuguuccuguacugcaaggcccggagcacgcccgugacccuguccaaggaccagcucagcgggaucaacaacaucgccuucuccaacugaggacuaguacuggcugcaucucccuuuccucuguccuccauccuucucccaggauggugaagggggaccugguacccagugauccccaccccaggauccuaaaucaugacuuaccugcuaauaaaaacucauuggaaaagugagaagaucuaaaaaaaaaaaaaaaaaaaaaaaaaaaaaaaaaaaaaaaaaaaaaaaaaaaaaaaaaaaaaaaaugcaucccccccccccccccccccccccccccccccaaaggcucuuuucagagccaccagaauu

SEQ ID NO: 14151 - RNA, 1977 nt, Artificial Sequence
  mRNA product Design e-6 comprising derived and/or modified sequence from HRSV(Memphis-37)__AIY60640.1__F_DSCav1_mut1 (opt2)
gggagagcggcucggccauuuugucccagucaguccggaggcugcggcugcagaaguaccgccugcggaguaacugcaaagaagcuuaccauggagcuccccauccucaagaccaacgccaucaccaccauccucgccgccgucacccucugcuucgccuccucccagaacaucaccgaggaguucuaccaguccaccugcuccgccgucuccaagggcuaccucggcgcccuccgcaccggcugguacaccuccgucaucaccaucgagcucuccaacaucaaggagaacaagugcaacggcaccgacgccaaggucaagcucaucaagcaggagcucgacaaguacaagaacgccgucaccgagcuccagcuccucaugcaguccacccccgccgccggcuccggcuccgccaucugcuccggcaucgccgucugcaagguccuccaccucgagggcgaggucaacaagaucaagaacgcccuccucuccaccaacaaggccgucgucucccucuccaacggcgucuccguccucaccuucaagguccucgaccucaagaacuacaucgacaagcagcuccuccccauccucaacaagcaguccugcuccauccccaacaucgagaccgucaucgaguuccagcagaagaacaaccgccuccucgagaucacccgcgaguucuccgucaacgccggcgucaccacccccgucuccaccuacaugcucaccaacuccgagcuccucucccucaucaacgacaugcccaucaccaacgaccagaagaagcucauguccaacaacguccagaucguccgccagcaguccuacuccaucaugugcaucaucaaggaggagguccucgccuacgucguccagcucccccucuacggcgucaucgacacccccugcuggaagcuccacaccuccccccucugcaccaccaacaccaaggagggcuccaacaucugccucacccgcaccgaccgcggcugguacugcgacaacgccggcuccgucuccuucuucccccaggccgagaccugcaagguccaguccaaccgcgucuucugcgacaccaugaacucccucacccuccccuccgaggucaaccucugcaacaucgacaucuucaaccccaaguacgacugcaagaucaugaccuccaagaccgacgucuccuccuccgucaucaccucccucggcgccaucgucuccugcuacggcaagaccaagugcaccgccuccaacaagaaccgcggcaucaucaagaccuucuccaacggcugcgacuacgucuccaacaagggcgucgacaccgucuccgucggcaacacccucuacugcgucaacaagcaggagggccagucccucuacgucaagggcgagcccaucaucaacuucuacgacccccucgucuuccccuccgacgaguucgacgccuccaucucccaggucaacgagaagaucaaccagucccucgccuucauccgcaaguccgacgagcuccuccacaacgucaacgucggcaaguccaccaccaacaucaugaucaccaccaucaucaucgucaucaucgucauccuccuccuccucaucgccgucggccucuuccucuacugcaaggcccgcuccacccccgucacccucuccaaggaccagcucuccggcaucaacaacaucgccuucuccaacugaggacuaguacuggcugcaucucccuuuccucuguccuccauccuucucccaggauggugaagggggaccugguacccagugauccccaccccaggauccuaaaucaugacuuaccugcuaauaaaaacucauuggaaaagugagaagaucuaaaaaaaaaaaaaaaaaaaaaaaaaaaaaaaaaaaaaaaaaaaaaaaaaaaaaaaaaaaaaaaaugcaucccccccccccccccccccccccccccccccaaaggcucuuuucagagccaccagaauu

SEQ ID NO: 14152 - RNA, 1977 nt, Artificial Sequence
  mRNA product Design e-6 comprising derived and/or modified sequence from HRSV(Memphis-37)__AIY60640.1__F_DSCav1_mut1 (opt3)
gggagagcggcucggccauuuugucccagucaguccggaggcugcggcugcagaaguaccgccugcggaguaacugcaaagaagcuuaccauggagcugcccauccucaagaccaacgccauuacaacuauacuugcugcagugacgcugugcuucgccagcucccagaauaucaccgaagaguuuuaccaaucuacauguucagcggucaguaaaggcuauuugggggcuuuaagaacuggaugguacaccagcguuauuacaaucgaacuguccaacauuaaggagaauaaaugcaacgguaccgacgccaaggugaaacuaaucaagcaggaacucgauaaguauaaaaaugcaguaacugagcugcagcuucugaugcagucuacuccugccgcuggcucggggucagcaauauguagcggaaucgccgugugcaaggucuugcaccucgagggcgaagugaacaaaauuaagaaugcucugcugaguaccaacaaagccguugugucccucucuaauggugucagcguguuaacguucaagguacuggaccuuaagaacuacaucgauaaacaauugcugccaauucuaaauaagcaguccuguucaaucccgaacauagagacuguuauugaauuucagcagaaaaauaacaggcuccuggagaucacccgggaguucagugugaaugcgggggucacaacucccgugagcaccuauaugcuuacaaacucugaacuguugucccucauuaacgacaugccuaucaccaaugaucaaaagaaacugaugucaaacaaugugcagaucguccgccagcagagcuacaguauuaugugcauaaucaaggaggaaguuuuagcauaugugguacaacugccacucuacggagugauugacacgcccuguuggaaacuucauacuucuccucugugcacaaccaacacuaaggagggcuccaauaucuguuugacacgaaccgaucguggcugguacugcgacaacgccgggagcgucucguuuuucccacaggcugaaacguguaaggugcagucuaauagaguguuuugcgauaccaugaacucccuaacacugcccucagagguuaaucucugcaacauagacauuuucaauccuaaauaugauuguaagaucaugacaaguaaaaccgacgucagcuccucugugaucacaagccugggagccauuguaucaugcuacgguaagacuaaauguaccgcaaguaacaagaauaggggcaucauuaagacauuuuccaacgggugcgauuauguuagcaauaaaggaguggacaccgucucugugggcaacacucuuuacugugucaacaagcaagagggucagucacuguaugugaaaggggaaccaauaaucaauuucuacgacccguugguuuuucccagugaugaguucgacgcuagcauuucccaggugaacgaaaagaucaaucagucucucgccuuuauccggaaaucggaugagcuguuacacaacguaaaugucggaaagagcacgacaaacauuaugauaaccacuaucauuaucgugauuaucguuauacugcuacuccugaucgcggugggccuuuucuuguauugcaaggcccgcuccaccccugucacacugucaaaagaccaacucaguggcauuaauaacaucgcauucucuaauugaggacuaguacuggcugcaucucccuuuccucuguccuccauccuucucccaggauggugaagggggaccugguacccagugauccccaccccaggauccuaaaucaugacuuaccugcuaauaaaaacucauuggaaaagugagaagaucuaaaaaaaaaaaaaaaaaaaaaaaaaaaaaaaaaaaaaaaaaaaaaaaaaaaaaaaaaaaaaaaaugcaucccccccccccccccccccccccccccccccaaaggcucuuuucagagccaccagaauu

SEQ ID NO: 14153 - RNA, 1977 nt, Artificial Sequence
  mRNA product Design e-6 comprising derived and/or modified sequence from HRSV(Memphis-37)__AIY60640.1__F_DSCav1_mut1 (opt4)
gggagagcggcucggccauuuugucccagucaguccggaggcugcggcugcagaaguaccgccugcggaguaacugcaaagaagcuuaccauggagcugcccauccugaagaccaacgccaucaccaccauccuggccgccgugacccugugcuucgccagcagccagaacaucaccgaggaguucuaccagagcaccugcagcgccgugagcaagggcuaccugggcgcccugagaaccggcugguacaccagcgugaucaccaucgagcugagcaacaucaaggagaacaagugcaacggcaccgacgccaaggugaagcugaucaagcaggagcuggacaaguacaagaacgccgugaccgagcugcagcugcugaugcagagcacccccgccgccggcagcggcagcgccaucugcagcggcaucgccgugugcaaggugcugcaccuggagggcgaggugaacaagaucaagaacgcccugcugagcaccaacaaggccguggugagccugagcaacggcgugagcgugcugaccuucaaggugcuggaccugaagaacuacaucgacaagcagcugcugcccauccugaacaagcagagcugcagcauccccaacaucgagaccgugaucgaguuccagcagaagaacaacagacugcuggagaucaccagagaguucagcgugaacgccggcgugaccacccccgugagcaccuacaugcugaccaacagcgagcugcugagccugaucaacgacaugcccaucaccaacgaccagaagaagcugaugagcaacaacgugcagaucgugagacagcagagcuacagcaucaugugcaucaucaaggaggaggugcuggccuacguggugcagcugccccuguacggcgugaucgacacccccugcuggaagcugcacaccagcccccugugcaccaccaacaccaaggagggcagcaacaucugccugaccagaaccgacagaggcugguacugcgacaacgccggcagcgugagcuucuucccccaggccgagaccugcaaggugcagagcaacagaguguucugcgacaccaugaacagccugacccugcccagcgaggugaaccugugcaacaucgacaucuucaaccccaaguacgacugcaagaucaugaccagcaagaccgacgugagcagcagcgugaucaccagccugggcgccaucgugagcugcuacggcaagaccaagugcaccgccagcaacaagaacagaggcaucaucaagaccuucagcaacggcugcgacuacgugagcaacaagggcguggacaccgugagcgugggcaacacccuguacugcgugaacaagcaggagggccagagccuguacgugaagggcgagcccaucaucaacuucuacgacccccugguguuccccagcgacgaguucgacgccagcaucagccaggugaacgagaagaucaaccagagccuggccuucaucagaaagagcgacgagcugcugcacaacgugaacgugggcaagagcaccaccaacaucaugaucaccaccaucaucaucgugaucaucgugauccugcugcugcugaucgccgugggccuguuccuguacugcaaggccagaagcacccccgugacccugagcaaggaccagcugagcggcaucaacaacaucgccuucagcaacugaggacuaguacuggcugcaucucccuuuccucuguccuccauccuucucccaggauggugaagggggaccugguacccagugauccccaccccaggauccuaaaucaugacuuaccugcuaauaaaaacucauuggaaaagugagaagaucuaaaaaaaaaaaaaaaaaaaaaaaaaaaaaaaaaaaaaaaaaaaaaaaaaaaaaaaaaaaaaaaaugcaucccccccccccccccccccccccccccccccaaaggcucuuuucagagccaccagaauu

SEQ ID NO: 14154 - RNA, 1977 nt, Artificial Sequence
  mRNA product Design e-6 comprising derived and/or modified sequence from HRSV(Memphis-37)__AIY60640.1__F_DSCav1_mut1 (opt5)
gggagagcggcucggccauuuugucccagucaguccggaggcugcggcugcagaaguaccgccugcggaguaacugcaaagaagcuuaccauggagcugcccauccucaagaccaacgccauuacaacgauccuggcugccgugacccuuugcuucgcgagcucccagaauauuacagaagaguuuuaccaaucuaccuguagcgcugucuccaaaggcuaucugggggcccucagaacaggaugguacaccucuguuaucacaauugaacugagcaacaucaaggagaauaaaugcaacggcaccgacgccaaggugaaacuuaucaagcaggaacuggauaaguauaaaaaugcugugacggagcuccagcugcugaugcaguccaccccugccgcugggucuggaagcgccauuuguuccggcaucgcggucugcaaggugcuccaccuggagggggaaguuaacaaaauuaagaaugcccuucugagcacaaacaaagcuguggucucucucuccaauggagugagcguucugaccuucaaggugcuugaccugaagaacuacaucgauaaacaacuccugccgauucugaauaagcagucuuguuccauccccaacauugagacagucaucgaauuucagcagaaaaauaaccggcuccuggagaucacccgcgaguucagcgugaaugccggcgugacgacaccugucucuaccuauaugcuuacaaacuccgaacugcucagccugauuaacgacaugcccaucaccaaugaucaaaagaaacuuauguccaacaauguucagauugugagacagcagucuuacagcaucaugugcauuaucaaggaggaagugcuggcuuaugucgugcaacucccucuguacggcguuaucgacacccccuguuggaaacugcauacauccccucucugcacgaccaacacaaaggaggggagcaauauuugucugacccggacagaucgcggaugguacugcgacaacgccggcucuguguccuuuuucccgcaggcggaaaccuguaagguccagagcaauagaguguuuugcgauacgaugaacucucuuacacugcccagcgagguuaaucucugcaacaucgacauuuucaauccuaaauaugauuguaagaucaugaccuccaaaaccgacgugucuagcuccgucauuacaagccugggggccaucgugucuugcuacggaaagaccaaauguacagcuuccaacaagaaucggggcaucauuaagacguuuagcaacgggugcgauuaugucucuaauaaaggaguggacaccguuuccgugggcaacacacuuuacugugucaacaagcaagagggccagagccuguaugugaaaggggaacccaucauuaauuucuacgacccucucguuuuucccuccgaugaguucgacgccucuaucagccaggugaacgaaaagauuaaucagucccuggcuuuuauccgcaaaucugaugagcugcuccacaacgucaaugugggaaagagcaccacaaacauuaugaucaccacgaucauuaucgugauuaucguuauucugcuucugcucaucgccgucggccuguuccuguauugcaaggccagauccaccccggugacacuuagcaaagaccaacucucugggaucaauaacauugcuuucuccaauugaggacuaguacuggcugcaucucccuuuccucuguccuccauccuucucccaggauggugaagggggaccugguacccagugauccccaccccaggauccuaaaucaugacuuaccugcuaauaaaaacucauuggaaaagugagaagaucuaaaaaaaaaaaaaaaaaaaaaaaaaaaaaaaaaaaaaaaaaaaaaaaaaaaaaaaaaaaaaaaaugcaucccccccccccccccccccccccccccccccaaaggcucuuuucagagccaccagaauu

SEQ ID NO: 14155 - RNA, 1977 nt, Artificial Sequence
  mRNA product Design e-6 comprising derived and/or modified sequence from HRSV(Memphis-37)__AIY60640.1__F_DSCav1_mut1 (opt6)
gggagagcggcucggccauuuugucccagucaguccggaggcugcggcugcagaaguaccgccugcggaguaacugcaaagaagcuuaccauggaacuuccaauucuaaaaaccaaugcuauaacaacaauauuagcagcaguuacauuaugcuucgccucaucacaaaauaucacagaagaauuuuaccaauccacaugcucagcaguaucuaaaggguaccuaggagcccuacgaacaggaugguacacaucaguaauaacaauagaacucucaaacaucaaagaaaacaaaugcaauggaacagacgcuaaaguaaaauuaauaaaacaagaacuagacaaauacaaaaacgccgucaccgaacuucaguuacucaugcaaagcacaccugcagcaggaucagguucagcaauaugcucaggaauagcaguuugcaaaguauuacaccuagaaggugaagucaacaaaauaaaaaacgcacuucuaaguacuaacaaagcuguaguaucauuaucaaacggaguauccguacuaaccuuuaaaguccuagaccuaaaaaacuacauagacaaacaacuacucccaauacucaauaaacaauccugcucaauucccaacaucgaaacaguaauagaauuucaacaaaaaaacaaucgccuucuagaaauaacaagagaauuuucagucaacgccggaguaacaacaccaguaucaacauauaugcuaacaaacagugaacuauuauccuuaauaaacgacaugccaauaacaaaugaccaaaaaaaacuaauguccaauaauguccaaauaguaagacaacaaagcuauucaauuauguguauaauaaaagaagaaguauuagcauacguaguucaacuaccacuauauggcguuauagacacaccaugcuggaaauuacacacaagcccacuaugcacaacaaauacaaaagaaggauccaacauuugcuuaacuagaacugacagaggaugguacugcgacaacgcuggaucagucucuuucuucccacaagcagaaaccuguaaaguacaaucaaauagagucuucugcgacacaaugaacucacuaacucucccaucugaaguaaacuuaugcaacaucgauauauuuaacccaaaauacgauuguaaaauaaugacauccaaaacagacguuucaucaagcguaaucaccucccucggagcaaucguaagcugcuacgguaaaacaaaaugcacagcauccaacaaaaacagaggcaucauaaaaacauucucaaacggaugugacuauguaucaaacaaaggaguagacacaguuucaguaggcaauaccuuauacugugucaauaaacaagaaggacaaucacuauauguaaaaggagaaccuauaauaaacuucuacgacccccucgucuucccuagcgaugaauuugacgcaucaauaucgcaaguaaacgaaaaaauaaaccaaucauuagccuuuauaagaaaaucagacgaauuauuacacaacguaaacguggggaaaagcacaacuaacaucaugauaacaacuaucauaauuguaaucaucgucauccuauuacuccuaaucgcaguaggacuauuccuauacugcaaagcuagaucaacaccagucacccuaucgaaagaucaauugucaggaauaaacaauauagccuuuucaaauuaaggacuaguacuggcugcaucucccuuuccucuguccuccauccuucucccaggauggugaagggggaccugguacccagugauccccaccccaggauccuaaaucaugacuuaccugcuaauaaaaacucauuggaaaagugagaagaucuaaaaaaaaaaaaaaaaaaaaaaaaaaaaaaaaaaaaaaaaaaaaaaaaaaaaaaaaaaaaaaaaugcaucccccccccccccccccccccccccccccccaaaggcucuuuucagagccaccagaauu

SEQ ID NO: 14156 - RNA, 1977 nt, Artificial Sequence
  mRNA product Design e-6 comprising derived and/or modified sequence from HRSV(Memphis-37)__AIY60640.1__F_DSCav1_mut1 (opt11)
gggagagcggcucggccauuuugucccagucaguccggaggcugcggcugcagaaguaccgccugcggaguaacugcaaagaagcuuaccauggaacuccccauccucaaaacgaacgccaucacaaccauccucgccgccgucacccucugcuucgcgucaucccaaaacauaacugaagaguucuaucaaucaaccugcuccgcagucucaaaaggcuaccucggcgcccuacggaccggcugguacacaagcgucaucacaauagaacuuuccaacaucaaagaaaacaaauguaacggcaccgacgcaaaagucaaacucauaaaacaagaacuagacaaauauaaaaacgccguaacugaacuacaacuccucaugcaaucaacuccugcagccgguagcggcuccgcaaucugcucaggcaucgcagucugcaaagucuuacaccuagaaggcgaagucaacaaaaucaagaacgcccuacuauccacaaacaaagcaguagucucucuauccaacggagucuccguccucacauucaaaguacucgaccuaaagaacuacaucgacaaacaacuacuaccaaucuuaaacaaacaauccugcucaaucccuaacauugaaaccgucauagaguuccaacagaaaaacaaccgccuccucgaaauaaccagagaguucucagucaacgccggcgucaccaccccggucucaaccuacaugcuaaccaacucugaacuucucagccuaaucaacgacaugcccauuaccaacgaccaaaagaaacucauguccaauaacguccaaaucguucgacaacaauccuacucaaucaugugcaucauaaaagaagaaguccuagcauacgucguccaacucccacuauacggcguaaucgacacccccugcuggaaacuccacaccuccccucucuguaccaccaacaccaaagaaggguccaacaucugccucacgcgcaccgaccgaggcugguauugcgacaaugcaggcucugucuccuucuucccccaagccgaaaccugcaaaguccaaucuaaccgcgucuucugcgacaccaugaacagucuuacccucccgucagaagucaaccucugcaacauagauaucuucaacccaaaauacgacugcaaaaucaugaccucaaaaaccgacguuuccucauccguuaucaccucccucggcgcaaucgucagcugcuacggcaagacaaagugcacggcuucaaacaaaaaccgcggaaucaucaagacauucagcaacggcugcgacuacguauccaacaaaggaguggacacagucuccguuggaaacacccucuacugcguaaacaaacaagaaggccaaucacucuacgucaaaggcgaacccaucaucaacuucuacgacccacucgucuuccccuccgacgaguucgacgccucaaucagccaagucaacgagaaaauuaaccagucacucgccuucauacgcaaauccgacgaacuucuacacaacguaaacgucggaaaaucaaccacaaacaucaugauuaccacaauuaucauagucaucauaguaauccuccugcuacucauagcagucggacucuuccuauacugcaaagcccgcuccaccccugucacccuauccaaagaccaacuuuccggcaucaacaacauagccuuuuccaacuaaggacuaguacuggcugcaucucccuuuccucuguccuccauccuucucccaggauggugaagggggaccugguacccagugauccccaccccaggauccuaaaucaugacuuaccugcuaauaaaaacucauuggaaaagugagaagaucuaaaaaaaaaaaaaaaaaaaaaaaaaaaaaaaaaaaaaaaaaaaaaaaaaaaaaaaaaaaaaaaaugcaucccccccccccccccccccccccccccccccaaaggcucuuuucagagccaccagaauu

SEQ ID NO: 14157 - RNA, 2193 nt, Artificial Sequence
  mRNA product Design f-1 comprising derived and/or modified sequence from HRSV(Memphis-37)__AIY60640.1__F_DSCav1_mut1 (opt1)
gggagagcggcucggccauuuugucccagucaguccggaggcugcggcugcagaaguaccgccugcggaguaacugcaaagaagcuuaccauggagcugcccauccucaagaccaacgccaucaccacgauccuggccgcggugacccugugcuucgccagcucccagaacaucaccgaggaguucuaccagagcacgugcuccgccgucagcaagggcuaccucggcgcccugcgcaccgggugguacaccagcgugaucaccaucgagcuguccaacaucaaggagaacaagugcaacggcaccgacgccaaggugaagcucaucaagcaggagcuggacaaguacaagaacgcggucacggagcugcagcuccugaugcagagcaccccggccgccggcuccgggagcgcgaucugcuccggcaucgccgucugcaaggugcugcaccucgagggcgaggugaacaagaucaagaacgcccugcuguccaccaacaaggccgucgugagccucuccaacggggugagcguccugaccuucaaggugcuggaccucaagaacuacaucgacaagcagcugcugcccauccugaacaagcagagcugcuccauccccaacaucgagaccgucaucgaguuccagcagaagaacaaccgccuccuggagaucacgcgggaguucagcgugaacgcgggcgugaccacccccgucuccaccuacaugcugacgaacagcgagcuccugucccugaucaacgacaugccgaucaccaacgaccagaagaagcucaugagcaacaacgugcagaucgugcgccagcaguccuacagcaucaugugcaucaucaaggaggagguccuggccuacguggugcagcugccccucuacggggucaucgacacccccugcuggaagcugcacaccagcccccugugcacgaccaacaccaaggagggcuccaacaucugccucacccggacggaccgcgggugguacugcgacaacgccggcagcguguccuucuucccgcaggccgagaccugcaagguccagagcaaccggguguucugcgacaccaugaacucccugacccugcccagcgaggugaaccucugcaacaucgacaucuucaaccccaaguacgacugcaagaucaugacguccaagaccgacgucagcuccagcgugaucaccucccugggcgccaucgugagcugcuacgggaagaccaagugcacggcgagcaacaagaaccgcggcaucaucaagaccuucuccaacgggugcgacuacgucagcaacaagggcguggacaccguguccgucggcaacacccuguacugcgugaacaagcaggagggccagagccucuacgugaagggggagcccaucaucaacuucuacgacccgcuggucuuccccuccgacgaguucgacgccagcaucucccaggugaacgagaagaucaaccagagccuggccuucauccggaaguccgacgagcuccugcacaacgugaacgucggcaagagcaccacgaacaucaugaucaccaccaucaucaucgugaucaucgugauccugcugcuccugaucgccgucgggcuguuccucuacugcaaggcccgcuccacccccgugacgcugagcaaggaccagcuguccgggaucaacaacaucgcguucagcaacugaggacuagugaagggaacacccaaauuuaauucagccuuaagcacaauuaauuaagagugaaacguaauuguacaagcaguuggucacccaccauagggcaugaucaacaccgcaaccuuuccuuuuucccccagugauucugaaaaaccccucuucccuucagcuugcuuagauguuccaaauuuaguaagcuuaaggcggccuacagaagaaaaagaaaaaaaaggccacaaaaguucccucucacuuucaguaaauaaaauaaaagcagcaacagaaauaaagaaauaaaugaaauucaaaaugaaauaaauauuguguugugcagcauuaaaaaaucaauaaaaauuaaaaaugagcaagaucuaaaaaaaaaaaaaaaaaaaaaaaaaaaaaaaaaaaaaaaaaaaaaaaaaaaaaaaaaaaaaaaaugcaucccccccccccccccccccccccccccccccaaaggcucuuuucagagccaccagaauu

SEQ ID NO: 14158 - RNA, 2193 nt, Artificial Sequence
  mRNA product Design f-1 comprising derived and/or modified sequence from HRSV(Memphis-37)__AIY60640.1__F_DSCav1_mut1 (opt1)
gggagagcggcucggccauuuugucccagucaguccggaggcugcggcugcagaaguaccgccugcggaguaacugcaaagaagcuuaccauggagcugcccauccucaagaccaacgccaucaccacgauccuggccgcggugacccugugcuucgccagcucccagaacaucaccgaggaguucuaccagagcacgugcuccgccgucagcaagggcuaccucggggcccugcgcaccggcugguacaccuccgugaucaccaucgagcugagcaacaucaaggagaacaagugcaacgggaccgacgccaaggugaagcucaucaagcaggagcuggacaaguacaagaacgcggucacggagcugcagcuccugaugcaguccaccccggccgccggcagcggguccgccaucugcagcggcaucgcggugugcaaggugcugcaccucgagggcgaggucaacaagaucaagaacgcccugcuguccaccaacaaggccguggugagccucuccaacggggucagcgugcugaccuucaaggugcuggaccucaagaacuacaucgacaagcagcugcugcccauccucaacaagcaguccugcagcauccccaacaucgagacggucaucgaguuccagcagaagaacaaccggcugcuggagaucacccgcgaguucuccgugaacgccggcgugaccacccccgucagcacguacaugcucaccaacuccgagcugcugagccucaucaacgacaugccgaucaccaacgaccagaagaagcugaugagcaacaacgugcagaucgugcggcagcaguccuacagcaucaugugcaucaucaaggaggagguccuggccuacguggugcagcucccccuguacggggucaucgacacccccugcuggaagcugcacacgagcccccucugcaccaccaacaccaaggagggcuccaacaucugccugacgcgcaccgaccgggggugguacugcgacaacgcgggcuccgugagcuucuucccgcaggccgagaccugcaaggugcaguccaaccgcgucuucugcgacaccaugaacagccugacgcuccccuccgaggugaaccugugcaacaucgacaucuucaaccccaaguacgacugcaagaucaugaccagcaagaccgacgucuccagcuccgugaucaccagccugggcgccaucguguccugcuacgggaagacgaagugcaccgccagcaacaagaaccggggcaucaucaagaccuucuccaacgggugcgacuacgucagcaacaagggcguggacaccguguccgucggcaacacgcucuacugcgugaacaagcaggaggggcagagccuguacgugaagggcgagcccaucaucaacuucuacgacccgcuggucuuccccagcgacgaguucgacgccuccaucagccaggugaacgagaagaucaaccagucccucgcguucauccgcaagagcgacgagcugcugcacaacgugaacgucgggaaguccaccaccaacaucaugaucaccaccaucaucaucgugaucaucgugauccuccugcugcucaucgccgucggccuguuccuguacugcaaggcccggagcacgcccgugacccuguccaaggaccagcucagcgggaucaacaacaucgccuucuccaacugaggacuagugaagggaacacccaaauuuaauucagccuuaagcacaauuaauuaagagugaaacguaauuguacaagcaguuggucacccaccauagggcaugaucaacaccgcaaccuuuccuuuuucccccagugauucugaaaaaccccucuucccuucagcuugcuuagauguuccaaauuuaguaagcuuaaggcggccuacagaagaaaaagaaaaaaaaggccacaaaaguucccucucacuuucaguaaauaaaauaaaagcagcaacagaaauaaagaaauaaaugaaauucaaaaugaaauaaauauuguguugugcagcauuaaaaaaucaauaaaaauuaaaaaugagcaagaucuaaaaaaaaaaaaaaaaaaaaaaaaaaaaaaaaaaaaaaaaaaaaaaaaaaaaaaaaaaaaaaaaugcaucccccccccccccccccccccccccccccccaaaggcucuuuucagagccaccagaauu

SEQ ID NO: 14159 - RNA, 2193 nt, Artificial Sequence
  mRNA product Design f-1 comprising derived and/or modified sequence from HRSV(Memphis-37)__AIY60640.1__F_DSCav1_mut1 (opt2)
gggagagcggcucggccauuuugucccagucaguccggaggcugcggcugcagaaguaccgccugcggaguaacugcaaagaagcuuaccauggagcuccccauccucaagaccaacgccaucaccaccauccucgccgccgucacccucugcuucgccuccucccagaacaucaccgaggaguucuaccaguccaccugcuccgccgucuccaagggcuaccucggcgcccuccgcaccggcugguacaccuccgucaucaccaucgagcucuccaacaucaaggagaacaagugcaacggcaccgacgccaaggucaagcucaucaagcaggagcucgacaaguacaagaacgccgucaccgagcuccagcuccucaugcaguccacccccgccgccggcuccggcuccgccaucugcuccggcaucgccgucugcaagguccuccaccucgagggcgaggucaacaagaucaagaacgcccuccucuccaccaacaaggccgucgucucccucuccaacggcgucuccguccucaccuucaagguccucgaccucaagaacuacaucgacaagcagcuccuccccauccucaacaagcaguccugcuccauccccaacaucgagaccgucaucgaguuccagcagaagaacaaccgccuccucgagaucacccgcgaguucuccgucaacgccggcgucaccacccccgucuccaccuacaugcucaccaacuccgagcuccucucccucaucaacgacaugcccaucaccaacgaccagaagaagcucauguccaacaacguccagaucguccgccagcaguccuacuccaucaugugcaucaucaaggaggagguccucgccuacgucguccagcucccccucuacggcgucaucgacacccccugcuggaagcuccacaccuccccccucugcaccaccaacaccaaggagggcuccaacaucugccucacccgcaccgaccgcggcugguacugcgacaacgccggcuccgucuccuucuucccccaggccgagaccugcaagguccaguccaaccgcgucuucugcgacaccaugaacucccucacccuccccuccgaggucaaccucugcaacaucgacaucuucaaccccaaguacgacugcaagaucaugaccuccaagaccgacgucuccuccuccgucaucaccucccucggcgccaucgucuccugcuacggcaagaccaagugcaccgccuccaacaagaaccgcggcaucaucaagaccuucuccaacggcugcgacuacgucuccaacaagggcgucgacaccgucuccgucggcaacacccucuacugcgucaacaagcaggagggccagucccucuacgucaagggcgagcccaucaucaacuucuacgacccccucgucuuccccuccgacgaguucgacgccuccaucucccaggucaacgagaagaucaaccagucccucgccuucauccgcaaguccgacgagcuccuccacaacgucaacgucggcaaguccaccaccaacaucaugaucaccaccaucaucaucgucaucaucgucauccuccuccuccucaucgccgucggccucuuccucuacugcaaggcccgcuccacccccgucacccucuccaaggaccagcucuccggcaucaacaacaucgccuucuccaacugaggacuagugaagggaacacccaaauuuaauucagccuuaagcacaauuaauuaagagugaaacguaauuguacaagcaguuggucacccaccauagggcaugaucaacaccgcaaccuuuccuuuuucccccagugauucugaaaaaccccucuucccuucagcuugcuuagauguuccaaauuuaguaagcuuaaggcggccuacagaagaaaaagaaaaaaaaggccacaaaaguucccucucacuuucaguaaauaaaauaaaagcagcaacagaaauaaagaaauaaaugaaauucaaaaugaaauaaauauuguguugugcagcauuaaaaaaucaauaaaaauuaaaaaugagcaagaucuaaaaaaaaaaaaaaaaaaaaaaaaaaaaaaaaaaaaaaaaaaaaaaaaaaaaaaaaaaaaaaaaugcaucccccccccccccccccccccccccccccccaaaggcucuuuucagagccaccagaauu

SEQ ID NO: 14160 - RNA, 2193 nt, Artificial Sequence
  mRNA product Design f-1 comprising derived and/or modified sequence from HRSV(Memphis-37)__AIY60640.1__F_DSCav1_mut1 (opt3)
gggagagcggcucggccauuuugucccagucaguccggaggcugcggcugcagaaguaccgccugcggaguaacugcaaagaagcuuaccauggagcugcccauccucaagaccaacgccauuacaacuauacuugcugcagugacgcugugcuucgccagcucccagaauaucaccgaagaguuuuaccaaucuacauguucagcggucaguaaaggcuauuugggggcuuuaagaacuggaugguacaccagcguuauuacaaucgaacuguccaacauuaaggagaauaaaugcaacgguaccgacgccaaggugaaacuaaucaagcaggaacucgauaaguauaaaaaugcaguaacugagcugcagcuucugaugcagucuacuccugccgcuggcucggggucagcaauauguagcggaaucgccgugugcaaggucuugcaccucgagggcgaagugaacaaaauuaagaaugcucugcugaguaccaacaaagccguugugucccucucuaauggugucagcguguuaacguucaagguacuggaccuuaagaacuacaucgauaaacaauugcugccaauucuaaauaagcaguccuguucaaucccgaacauagagacuguuauugaauuucagcagaaaaauaacaggcuccuggagaucacccgggaguucagugugaaugcgggggucacaacucccgugagcaccuauaugcuuacaaacucugaacuguugucccucauuaacgacaugccuaucaccaaugaucaaaagaaacugaugucaaacaaugugcagaucguccgccagcagagcuacaguauuaugugcauaaucaaggaggaaguuuuagcauaugugguacaacugccacucuacggagugauugacacgcccuguuggaaacuucauacuucuccucugugcacaaccaacacuaaggagggcuccaauaucuguuugacacgaaccgaucguggcugguacugcgacaacgccgggagcgucucguuuuucccacaggcugaaacguguaaggugcagucuaauagaguguuuugcgauaccaugaacucccuaacacugcccucagagguuaaucucugcaacauagacauuuucaauccuaaauaugauuguaagaucaugacaaguaaaaccgacgucagcuccucugugaucacaagccugggagccauuguaucaugcuacgguaagacuaaauguaccgcaaguaacaagaauaggggcaucauuaagacauuuuccaacgggugcgauuauguuagcaauaaaggaguggacaccgucucugugggcaacacucuuuacugugucaacaagcaagagggucagucacuguaugugaaaggggaaccaauaaucaauuucuacgacccguugguuuuucccagugaugaguucgacgcuagcauuucccaggugaacgaaaagaucaaucagucucucgccuuuauccggaaaucggaugagcuguuacacaacguaaaugucggaaagagcacgacaaacauuaugauaaccacuaucauuaucgugauuaucguuauacugcuacuccugaucgcggugggccuuuucuuguauugcaaggcccgcuccaccccugucacacugucaaaagaccaacucaguggcauuaauaacaucgcauucucuaauugaggacuagugaagggaacacccaaauuuaauucagccuuaagcacaauuaauuaagagugaaacguaauuguacaagcaguuggucacccaccauagggcaugaucaacaccgcaaccuuuccuuuuucccccagugauucugaaaaaccccucuucccuucagcuugcuuagauguuccaaauuuaguaagcuuaaggcggccuacagaagaaaaagaaaaaaaaggccacaaaaguucccucucacuuucaguaaauaaaauaaaagcagcaacagaaauaaagaaauaaaugaaauucaaaaugaaauaaauauuguguugugcagcauuaaaaaaucaauaaaaauuaaaaaugagcaagaucuaaaaaaaaaaaaaaaaaaaaaaaaaaaaaaaaaaaaaaaaaaaaaaaaaaaaaaaaaaaaaaaaugcaucccccccccccccccccccccccccccccccaaaggcucuuuucagagccaccagaauu

SEQ ID NO: 14161 - RNA, 2193 nt, Artificial Sequence
  mRNA product Design f-1 comprising derived and/or modified sequence from HRSV(Memphis-37)__AIY60640.1__F_DSCav1_mut1 (opt4)
gggagagcggcucggccauuuugucccagucaguccggaggcugcggcugcagaaguaccgccugcggaguaacugcaaagaagcuuaccauggagcugcccauccugaagaccaacgccaucaccaccauccuggccgccgugacccugugcuucgccagcagccagaacaucaccgaggaguucuaccagagcaccugcagcgccgugagcaagggcuaccugggcgcccugagaaccggcugguacaccagcgugaucaccaucgagcugagcaacaucaaggagaacaagugcaacggcaccgacgccaaggugaagcugaucaagcaggagcuggacaaguacaagaacgccgugaccgagcugcagcugcugaugcagagcacccccgccgccggcagcggcagcgccaucugcagcggcaucgccgugugcaaggugcugcaccuggagggcgaggugaacaagaucaagaacgcccugcugagcaccaacaaggccguggugagccugagcaacggcgugagcgugcugaccuucaaggugcuggaccugaagaacuacaucgacaagcagcugcugcccauccugaacaagcagagcugcagcauccccaacaucgagaccgugaucgaguuccagcagaagaacaacagacugcuggagaucaccagagaguucagcgugaacgccggcgugaccacccccgugagcaccuacaugcugaccaacagcgagcugcugagccugaucaacgacaugcccaucaccaacgaccagaagaagcugaugagcaacaacgugcagaucgugagacagcagagcuacagcaucaugugcaucaucaaggaggaggugcuggccuacguggugcagcugccccuguacggcgugaucgacacccccugcuggaagcugcacaccagcccccugugcaccaccaacaccaaggagggcagcaacaucugccugaccagaaccgacagaggcugguacugcgacaacgccggcagcgugagcuucuucccccaggccgagaccugcaaggugcagagcaacagaguguucugcgacaccaugaacagccugacccugcccagcgaggugaaccugugcaacaucgacaucuucaaccccaaguacgacugcaagaucaugaccagcaagaccgacgugagcagcagcgugaucaccagccugggcgccaucgugagcugcuacggcaagaccaagugcaccgccagcaacaagaacagaggcaucaucaagaccuucagcaacggcugcgacuacgugagcaacaagggcguggacaccgugagcgugggcaacacccuguacugcgugaacaagcaggagggccagagccuguacgugaagggcgagcccaucaucaacuucuacgacccccugguguuccccagcgacgaguucgacgccagcaucagccaggugaacgagaagaucaaccagagccuggccuucaucagaaagagcgacgagcugcugcacaacgugaacgugggcaagagcaccaccaacaucaugaucaccaccaucaucaucgugaucaucgugauccugcugcugcugaucgccgugggccuguuccuguacugcaaggccagaagcacccccgugacccugagcaaggaccagcugagcggcaucaacaacaucgccuucagcaacugaggacuagugaagggaacacccaaauuuaauucagccuuaagcacaauuaauuaagagugaaacguaauuguacaagcaguuggucacccaccauagggcaugaucaacaccgcaaccuuuccuuuuucccccagugauucugaaaaaccccucuucccuucagcuugcuuagauguuccaaauuuaguaagcuuaaggcggccuacagaagaaaaagaaaaaaaaggccacaaaaguucccucucacuuucaguaaauaaaauaaaagcagcaacagaaauaaagaaauaaaugaaauucaaaaugaaauaaauauuguguugugcagcauuaaaaaaucaauaaaaauuaaaaaugagcaagaucuaaaaaaaaaaaaaaaaaaaaaaaaaaaaaaaaaaaaaaaaaaaaaaaaaaaaaaaaaaaaaaaaugcaucccccccccccccccccccccccccccccccaaaggcucuuuucagagccaccagaauu

SEQ ID NO: 14162 - RNA, 2193 nt, Artificial Sequence
  mRNA product Design f-1 comprising derived and/or modified sequence from HRSV(Memphis-37)__AIY60640.1__F_DSCav1_mut1 (opt5)
gggagagcggcucggccauuuugucccagucaguccggaggcugcggcugcagaaguaccgccugcggaguaacugcaaagaagcuuaccauggagcugcccauccucaagaccaacgccauuacaacgauccuggcugccgugacccuuugcuucgcgagcucccagaauauuacagaagaguuuuaccaaucuaccuguagcgcugucuccaaaggcuaucugggggcccucagaacaggaugguacaccucuguuaucacaauugaacugagcaacaucaaggagaauaaaugcaacggcaccgacgccaaggugaaacuuaucaagcaggaacuggauaaguauaaaaaugcugugacggagcuccagcugcugaugcaguccaccccugccgcugggucuggaagcgccauuuguuccggcaucgcggucugcaaggugcuccaccuggagggggaaguuaacaaaauuaagaaugcccuucugagcacaaacaaagcuguggucucucucuccaauggagugagcguucugaccuucaaggugcuugaccugaagaacuacaucgauaaacaacuccugccgauucugaauaagcagucuuguuccauccccaacauugagacagucaucgaauuucagcagaaaaauaaccggcuccuggagaucacccgcgaguucagcgugaaugccggcgugacgacaccugucucuaccuauaugcuuacaaacuccgaacugcucagccugauuaacgacaugcccaucaccaaugaucaaaagaaacuuauguccaacaauguucagauugugagacagcagucuuacagcaucaugugcauuaucaaggaggaagugcuggcuuaugucgugcaacucccucuguacggcguuaucgacacccccuguuggaaacugcauacauccccucucugcacgaccaacacaaaggaggggagcaauauuugucugacccggacagaucgcggaugguacugcgacaacgccggcucuguguccuuuuucccgcaggcggaaaccuguaagguccagagcaauagaguguuuugcgauacgaugaacucucuuacacugcccagcgagguuaaucucugcaacaucgacauuuucaauccuaaauaugauuguaagaucaugaccuccaaaaccgacgugucuagcuccgucauuacaagccugggggccaucgugucuugcuacggaaagaccaaauguacagcuuccaacaagaaucggggcaucauuaagacguuuagcaacgggugcgauuaugucucuaauaaaggaguggacaccguuuccgugggcaacacacuuuacugugucaacaagcaagagggccagagccuguaugugaaaggggaacccaucauuaauuucuacgacccucucguuuuucccuccgaugaguucgacgccucuaucagccaggugaacgaaaagauuaaucagucccuggcuuuuauccgcaaaucugaugagcugcuccacaacgucaaugugggaaagagcaccacaaacauuaugaucaccacgaucauuaucgugauuaucguuauucugcuucugcucaucgccgucggccuguuccuguauugcaaggccagauccaccccggugacacuuagcaaagaccaacucucugggaucaauaacauugcuuucuccaauugaggacuagugaagggaacacccaaauuuaauucagccuuaagcacaauuaauuaagagugaaacguaauuguacaagcaguuggucacccaccauagggcaugaucaacaccgcaaccuuuccuuuuucccccagugauucugaaaaaccccucuucccuucagcuugcuuagauguuccaaauuuaguaagcuuaaggcggccuacagaagaaaaagaaaaaaaaggccacaaaaguucccucucacuuucaguaaauaaaauaaaagcagcaacagaaauaaagaaauaaaugaaauucaaaaugaaauaaauauuguguugugcagcauuaaaaaaucaauaaaaauuaaaaaugagcaagaucuaaaaaaaaaaaaaaaaaaaaaaaaaaaaaaaaaaaaaaaaaaaaaaaaaaaaaaaaaaaaaaaaugcaucccccccccccccccccccccccccccccccaaaggcucuuuucagagccaccagaauu

SEQ ID NO: 14163 - RNA, 2193 nt, Artificial Sequence
  mRNA product Design f-1 comprising derived and/or modified sequence from HRSV(Memphis-37)__AIY60640.1__F_DSCav1_mut1 (opt6)
gggagagcggcucggccauuuugucccagucaguccggaggcugcggcugcagaaguaccgccugcggaguaacugcaaagaagcuuaccauggaacuuccaauucuaaaaaccaaugcuauaacaacaauauuagcagcaguuacauuaugcuucgccucaucacaaaauaucacagaagaauuuuaccaauccacaugcucagcaguaucuaaaggguaccuaggagcccuacgaacaggaugguacacaucaguaauaacaauagaacucucaaacaucaaagaaaacaaaugcaauggaacagacgcuaaaguaaaauuaauaaaacaagaacuagacaaauacaaaaacgccgucaccgaacuucaguuacucaugcaaagcacaccugcagcaggaucagguucagcaauaugcucaggaauagcaguuugcaaaguauuacaccuagaaggugaagucaacaaaauaaaaaacgcacuucuaaguacuaacaaagcuguaguaucauuaucaaacggaguauccguacuaaccuuuaaaguccuagaccuaaaaaacuacauagacaaacaacuacucccaauacucaauaaacaauccugcucaauucccaacaucgaaacaguaauagaauuucaacaaaaaaacaaucgccuucuagaaauaacaagagaauuuucagucaacgccggaguaacaacaccaguaucaacauauaugcuaacaaacagugaacuauuauccuuaauaaacgacaugccaauaacaaaugaccaaaaaaaacuaauguccaauaauguccaaauaguaagacaacaaagcuauucaauuauguguauaauaaaagaagaaguauuagcauacguaguucaacuaccacuauauggcguuauagacacaccaugcuggaaauuacacacaagcccacuaugcacaacaaauacaaaagaaggauccaacauuugcuuaacuagaacugacagaggaugguacugcgacaacgcuggaucagucucuuucuucccacaagcagaaaccuguaaaguacaaucaaauagagucuucugcgacacaaugaacucacuaacucucccaucugaaguaaacuuaugcaacaucgauauauuuaacccaaaauacgauuguaaaauaaugacauccaaaacagacguuucaucaagcguaaucaccucccucggagcaaucguaagcugcuacgguaaaacaaaaugcacagcauccaacaaaaacagaggcaucauaaaaacauucucaaacggaugugacuauguaucaaacaaaggaguagacacaguuucaguaggcaauaccuuauacugugucaauaaacaagaaggacaaucacuauauguaaaaggagaaccuauaauaaacuucuacgacccccucgucuucccuagcgaugaauuugacgcaucaauaucgcaaguaaacgaaaaaauaaaccaaucauuagccuuuauaagaaaaucagacgaauuauuacacaacguaaacguggggaaaagcacaacuaacaucaugauaacaacuaucauaauuguaaucaucgucauccuauuacuccuaaucgcaguaggacuauuccuauacugcaaagcuagaucaacaccagucacccuaucgaaagaucaauugucaggaauaaacaauauagccuuuucaaauuaaggacuagugaagggaacacccaaauuuaauucagccuuaagcacaauuaauuaagagugaaacguaauuguacaagcaguuggucacccaccauagggcaugaucaacaccgcaaccuuuccuuuuucccccagugauucugaaaaaccccucuucccuucagcuugcuuagauguuccaaauuuaguaagcuuaaggcggccuacagaagaaaaagaaaaaaaaggccacaaaaguucccucucacuuucaguaaauaaaauaaaagcagcaacagaaauaaagaaauaaaugaaauucaaaaugaaauaaauauuguguugugcagcauuaaaaaaucaauaaaaauuaaaaaugagcaagaucuaaaaaaaaaaaaaaaaaaaaaaaaaaaaaaaaaaaaaaaaaaaaaaaaaaaaaaaaaaaaaaaaugcaucccccccccccccccccccccccccccccccaaaggcucuuuucagagccaccagaauu

SEQ ID NO: 14164 - RNA, 2193 nt, Artificial Sequence
  mRNA product Design f-1 comprising derived and/or modified sequence from HRSV(Memphis-37)__AIY60640.1__F_DSCav1_mut1 (opt11)
gggagagcggcucggccauuuugucccagucaguccggaggcugcggcugcagaaguaccgccugcggaguaacugcaaagaagcuuaccauggaacuccccauccucaaaacgaacgccaucacaaccauccucgccgccgucacccucugcuucgcgucaucccaaaacauaacugaagaguucuaucaaucaaccugcuccgcagucucaaaaggcuaccucggcgcccuacggaccggcugguacacaagcgucaucacaauagaacuuuccaacaucaaagaaaacaaauguaacggcaccgacgcaaaagucaaacucauaaaacaagaacuagacaaauauaaaaacgccguaacugaacuacaacuccucaugcaaucaacuccugcagccgguagcggcuccgcaaucugcucaggcaucgcagucugcaaagucuuacaccuagaaggcgaagucaacaaaaucaagaacgcccuacuauccacaaacaaagcaguagucucucuauccaacggagucuccguccucacauucaaaguacucgaccuaaagaacuacaucgacaaacaacuacuaccaaucuuaaacaaacaauccugcucaaucccuaacauugaaaccgucauagaguuccaacagaaaaacaaccgccuccucgaaauaaccagagaguucucagucaacgccggcgucaccaccccggucucaaccuacaugcuaaccaacucugaacuucucagccuaaucaacgacaugcccauuaccaacgaccaaaagaaacucauguccaauaacguccaaaucguucgacaacaauccuacucaaucaugugcaucauaaaagaagaaguccuagcauacgucguccaacucccacuauacggcguaaucgacacccccugcuggaaacuccacaccuccccucucuguaccaccaacaccaaagaaggguccaacaucugccucacgcgcaccgaccgaggcugguauugcgacaaugcaggcucugucuccuucuucccccaagccgaaaccugcaaaguccaaucuaaccgcgucuucugcgacaccaugaacagucuuacccucccgucagaagucaaccucugcaacauagauaucuucaacccaaaauacgacugcaaaaucaugaccucaaaaaccgacguuuccucauccguuaucaccucccucggcgcaaucgucagcugcuacggcaagacaaagugcacggcuucaaacaaaaaccgcggaaucaucaagacauucagcaacggcugcgacuacguauccaacaaaggaguggacacagucuccguuggaaacacccucuacugcguaaacaaacaagaaggccaaucacucuacgucaaaggcgaacccaucaucaacuucuacgacccacucgucuuccccuccgacgaguucgacgccucaaucagccaagucaacgagaaaauuaaccagucacucgccuucauacgcaaauccgacgaacuucuacacaacguaaacgucggaaaaucaaccacaaacaucaugauuaccacaauuaucauagucaucauaguaauccuccugcuacucauagcagucggacucuuccuauacugcaaagcccgcuccaccccugucacccuauccaaagaccaacuuuccggcaucaacaacauagccuuuuccaacuaaggacuagugaagggaacacccaaauuuaauucagccuuaagcacaauuaauuaagagugaaacguaauuguacaagcaguuggucacccaccauagggcaugaucaacaccgcaaccuuuccuuuuucccccagugauucugaaaaaccccucuucccuucagcuugcuuagauguuccaaauuuaguaagcuuaaggcggccuacagaagaaaaagaaaaaaaaggccacaaaaguucccucucacuuucaguaaauaaaauaaaagcagcaacagaaauaaagaaauaaaugaaauucaaaaugaaauaaauauuguguugugcagcauuaaaaaaucaauaaaaauuaaaaaugagcaagaucuaaaaaaaaaaaaaaaaaaaaaaaaaaaaaaaaaaaaaaaaaaaaaaaaaaaaaaaaaaaaaaaaugcaucccccccccccccccccccccccccccccccaaaggcucuuuucagagccaccagaauu

SEQ ID NO: 14165 - RNA, 1973 nt, Artificial Sequence
  mRNA product Design f-2 comprising derived and/or modified sequence from HRSV(Memphis-37)__AIY60640.1__F_DSCav1_mut1 (opt1)
gggagagcggcucggccauuuugucccagucaguccggaggcugcggcugcagaaguaccgccugcggaguaacugcaaagaagcuuaccauggagcugcccauccucaagaccaacgccaucaccacgauccuggccgcggugacccugugcuucgccagcucccagaacaucaccgaggaguucuaccagagcacgugcuccgccgucagcaagggcuaccucggcgcccugcgcaccgggugguacaccagcgugaucaccaucgagcuguccaacaucaaggagaacaagugcaacggcaccgacgccaaggugaagcucaucaagcaggagcuggacaaguacaagaacgcggucacggagcugcagcuccugaugcagagcaccccggccgccggcuccgggagcgcgaucugcuccggcaucgccgucugcaaggugcugcaccucgagggcgaggugaacaagaucaagaacgcccugcuguccaccaacaaggccgucgugagccucuccaacggggugagcguccugaccuucaaggugcuggaccucaagaacuacaucgacaagcagcugcugcccauccugaacaagcagagcugcuccauccccaacaucgagaccgucaucgaguuccagcagaagaacaaccgccuccuggagaucacgcgggaguucagcgugaacgcgggcgugaccacccccgucuccaccuacaugcugacgaacagcgagcuccugucccugaucaacgacaugccgaucaccaacgaccagaagaagcucaugagcaacaacgugcagaucgugcgccagcaguccuacagcaucaugugcaucaucaaggaggagguccuggccuacguggugcagcugccccucuacggggucaucgacacccccugcuggaagcugcacaccagcccccugugcacgaccaacaccaaggagggcuccaacaucugccucacccggacggaccgcgggugguacugcgacaacgccggcagcguguccuucuucccgcaggccgagaccugcaagguccagagcaaccggguguucugcgacaccaugaacucccugacccugcccagcgaggugaaccucugcaacaucgacaucuucaaccccaaguacgacugcaagaucaugacguccaagaccgacgucagcuccagcgugaucaccucccugggcgccaucgugagcugcuacgggaagaccaagugcacggcgagcaacaagaaccgcggcaucaucaagaccuucuccaacgggugcgacuacgucagcaacaagggcguggacaccguguccgucggcaacacccuguacugcgugaacaagcaggagggccagagccucuacgugaagggggagcccaucaucaacuucuacgacccgcuggucuuccccuccgacgaguucgacgccagcaucucccaggugaacgagaagaucaaccagagccuggccuucauccggaaguccgacgagcuccugcacaacgugaacgucggcaagagcaccacgaacaucaugaucaccaccaucaucaucgugaucaucgugauccugcugcuccugaucgccgucgggcuguuccucuacugcaaggcccgcuccacccccgugacgcugagcaaggaccagcuguccgggaucaacaacaucgcguucagcaacugaggacuaguggaagcauuuuccuggcugauuaaaagaaauuacucagcuauggucaucuguuccuguuagaaggcuaugcagcauauuauauacuaugcgcauguuaugaaaugcauaauaaaaaauuuuaaaaaaucuaaaagaucuaaaaaaaaaaaaaaaaaaaaaaaaaaaaaaaaaaaaaaaaaaaaaaaaaaaaaaaaaaaaaaaaugcaucccccccccccccccccccccccccccccccaaaggcucuuuucagagccaccagaauu

SEQ ID NO: 14166 - RNA, 1973 nt, Artificial Sequence
  mRNA product Design f-2 comprising derived and/or modified sequence from HRSV(Memphis-37)__AIY60640.1__F_DSCav1_mut1 (opt1)
gggagagcggcucggccauuuugucccagucaguccggaggcugcggcugcagaaguaccgccugcggaguaacugcaaagaagcuuaccauggagcugcccauccucaagaccaacgccaucaccacgauccuggccgcggugacccugugcuucgccagcucccagaacaucaccgaggaguucuaccagagcacgugcuccgccgucagcaagggcuaccucggggcccugcgcaccggcugguacaccuccgugaucaccaucgagcugagcaacaucaaggagaacaagugcaacgggaccgacgccaaggugaagcucaucaagcaggagcuggacaaguacaagaacgcggucacggagcugcagcuccugaugcaguccaccccggccgccggcagcggguccgccaucugcagcggcaucgcggugugcaaggugcugcaccucgagggcgaggucaacaagaucaagaacgcccugcuguccaccaacaaggccguggugagccucuccaacggggucagcgugcugaccuucaaggugcuggaccucaagaacuacaucgacaagcagcugcugcccauccucaacaagcaguccugcagcauccccaacaucgagacggucaucgaguuccagcagaagaacaaccggcugcuggagaucacccgcgaguucuccgugaacgccggcgugaccacccccgucagcacguacaugcucaccaacuccgagcugcugagccucaucaacgacaugccgaucaccaacgaccagaagaagcugaugagcaacaacgugcagaucgugcggcagcaguccuacagcaucaugugcaucaucaaggaggagguccuggccuacguggugcagcucccccuguacggggucaucgacacccccugcuggaagcugcacacgagcccccucugcaccaccaacaccaaggagggcuccaacaucugccugacgcgcaccgaccgggggugguacugcgacaacgcgggcuccgugagcuucuucccgcaggccgagaccugcaaggugcaguccaaccgcgucuucugcgacaccaugaacagccugacgcuccccuccgaggugaaccugugcaacaucgacaucuucaaccccaaguacgacugcaagaucaugaccagcaagaccgacgucuccagcuccgugaucaccagccugggcgccaucguguccugcuacgggaagacgaagugcaccgccagcaacaagaaccggggcaucaucaagaccuucuccaacgggugcgacuacgucagcaacaagggcguggacaccguguccgucggcaacacgcucuacugcgugaacaagcaggaggggcagagccuguacgugaagggcgagcccaucaucaacuucuacgacccgcuggucuuccccagcgacgaguucgacgccuccaucagccaggugaacgagaagaucaaccagucccucgcguucauccgcaagagcgacgagcugcugcacaacgugaacgucgggaaguccaccaccaacaucaugaucaccaccaucaucaucgugaucaucgugauccuccugcugcucaucgccgucggccuguuccuguacugcaaggcccggagcacgcccgugacccuguccaaggaccagcucagcgggaucaacaacaucgccuucuccaacugaggacuaguggaagcauuuuccuggcugauuaaaagaaauuacucagcuauggucaucuguuccuguuagaaggcuaugcagcauauuauauacuaugcgcauguuaugaaaugcauaauaaaaaauuuuaaaaaaucuaaaagaucuaaaaaaaaaaaaaaaaaaaaaaaaaaaaaaaaaaaaaaaaaaaaaaaaaaaaaaaaaaaaaaaaugcaucccccccccccccccccccccccccccccccaaaggcucuuuucagagccaccagaauu

SEQ ID NO: 14167 - RNA, 1973 nt, Artificial Sequence
  mRNA product Design f-2 comprising derived and/or modified sequence from HRSV(Memphis-37)__AIY60640.1__F_DSCav1_mut1 (opt2)
gggagagcggcucggccauuuugucccagucaguccggaggcugcggcugcagaaguaccgccugcggaguaacugcaaagaagcuuaccauggagcuccccauccucaagaccaacgccaucaccaccauccucgccgccgucacccucugcuucgccuccucccagaacaucaccgaggaguucuaccaguccaccugcuccgccgucuccaagggcuaccucggcgcccuccgcaccggcugguacaccuccgucaucaccaucgagcucuccaacaucaaggagaacaagugcaacggcaccgacgccaaggucaagcucaucaagcaggagcucgacaaguacaagaacgccgucaccgagcuccagcuccucaugcaguccacccccgccgccggcuccggcuccgccaucugcuccggcaucgccgucugcaagguccuccaccucgagggcgaggucaacaagaucaagaacgcccuccucuccaccaacaaggccgucgucucccucuccaacggcgucuccguccucaccuucaagguccucgaccucaagaacuacaucgacaagcagcuccuccccauccucaacaagcaguccugcuccauccccaacaucgagaccgucaucgaguuccagcagaagaacaaccgccuccucgagaucacccgcgaguucuccgucaacgccggcgucaccacccccgucuccaccuacaugcucaccaacuccgagcuccucucccucaucaacgacaugcccaucaccaacgaccagaagaagcucauguccaacaacguccagaucguccgccagcaguccuacuccaucaugugcaucaucaaggaggagguccucgccuacgucguccagcucccccucuacggcgucaucgacacccccugcuggaagcuccacaccuccccccucugcaccaccaacaccaaggagggcuccaacaucugccucacccgcaccgaccgcggcugguacugcgacaacgccggcuccgucuccuucuucccccaggccgagaccugcaagguccaguccaaccgcgucuucugcgacaccaugaacucccucacccuccccuccgaggucaaccucugcaacaucgacaucuucaaccccaaguacgacugcaagaucaugaccuccaagaccgacgucuccuccuccgucaucaccucccucggcgccaucgucuccugcuacggcaagaccaagugcaccgccuccaacaagaaccgcggcaucaucaagaccuucuccaacggcugcgacuacgucuccaacaagggcgucgacaccgucuccgucggcaacacccucuacugcgucaacaagcaggagggccagucccucuacgucaagggcgagcccaucaucaacuucuacgacccccucgucuuccccuccgacgaguucgacgccuccaucucccaggucaacgagaagaucaaccagucccucgccuucauccgcaaguccgacgagcuccuccacaacgucaacgucggcaaguccaccaccaacaucaugaucaccaccaucaucaucgucaucaucgucauccuccuccuccucaucgccgucggccucuuccucuacugcaaggcccgcuccacccccgucacccucuccaaggaccagcucuccggcaucaacaacaucgccuucuccaacugaggacuaguggaagcauuuuccuggcugauuaaaagaaauuacucagcuauggucaucuguuccuguuagaaggcuaugcagcauauuauauacuaugcgcauguuaugaaaugcauaauaaaaaauuuuaaaaaaucuaaaagaucuaaaaaaaaaaaaaaaaaaaaaaaaaaaaaaaaaaaaaaaaaaaaaaaaaaaaaaaaaaaaaaaaugcaucccccccccccccccccccccccccccccccaaaggcucuuuucagagccaccagaauu

SEQ ID NO: 14168 - RNA, 1973 nt, Artificial Sequence
  mRNA product Design f-2 comprising derived and/or modified sequence from HRSV(Memphis-37)__AIY60640.1__F_DSCav1_mut1 (opt3)
gggagagcggcucggccauuuugucccagucaguccggaggcugcggcugcagaaguaccgccugcggaguaacugcaaagaagcuuaccauggagcugcccauccucaagaccaacgccauuacaacuauacuugcugcagugacgcugugcuucgccagcucccagaauaucaccgaagaguuuuaccaaucuacauguucagcggucaguaaaggcuauuugggggcuuuaagaacuggaugguacaccagcguuauuacaaucgaacuguccaacauuaaggagaauaaaugcaacgguaccgacgccaaggugaaacuaaucaagcaggaacucgauaaguauaaaaaugcaguaacugagcugcagcuucugaugcagucuacuccugccgcuggcucggggucagcaauauguagcggaaucgccgugugcaaggucuugcaccucgagggcgaagugaacaaaauuaagaaugcucugcugaguaccaacaaagccguugugucccucucuaauggugucagcguguuaacguucaagguacuggaccuuaagaacuacaucgauaaacaauugcugccaauucuaaauaagcaguccuguucaaucccgaacauagagacuguuauugaauuucagcagaaaaauaacaggcuccuggagaucacccgggaguucagugugaaugcgggggucacaacucccgugagcaccuauaugcuuacaaacucugaacuguugucccucauuaacgacaugccuaucaccaaugaucaaaagaaacugaugucaaacaaugugcagaucguccgccagcagagcuacaguauuaugugcauaaucaaggaggaaguuuuagcauaugugguacaacugccacucuacggagugauugacacgcccuguuggaaacuucauacuucuccucugugcacaaccaacacuaaggagggcuccaauaucuguuugacacgaaccgaucguggcugguacugcgacaacgccgggagcgucucguuuuucccacaggcugaaacguguaaggugcagucuaauagaguguuuugcgauaccaugaacucccuaacacugcccucagagguuaaucucugcaacauagacauuuucaauccuaaauaugauuguaagaucaugacaaguaaaaccgacgucagcuccucugugaucacaagccugggagccauuguaucaugcuacgguaagacuaaauguaccgcaaguaacaagaauaggggcaucauuaagacauuuuccaacgggugcgauuauguuagcaauaaaggaguggacaccgucucugugggcaacacucuuuacugugucaacaagcaagagggucagucacuguaugugaaaggggaaccaauaaucaauuucuacgacccguugguuuuucccagugaugaguucgacgcuagcauuucccaggugaacgaaaagaucaaucagucucucgccuuuauccggaaaucggaugagcuguuacacaacguaaaugucggaaagagcacgacaaacauuaugauaaccacuaucauuaucgugauuaucguuauacugcuacuccugaucgcggugggccuuuucuuguauugcaaggcccgcuccaccccugucacacugucaaaagaccaacucaguggcauuaauaacaucgcauucucuaauugaggacuaguggaagcauuuuccuggcugauuaaaagaaauuacucagcuauggucaucuguuccuguuagaaggcuaugcagcauauuauauacuaugcgcauguuaugaaaugcauaauaaaaaauuuuaaaaaaucuaaaagaucuaaaaaaaaaaaaaaaaaaaaaaaaaaaaaaaaaaaaaaaaaaaaaaaaaaaaaaaaaaaaaaaaugcaucccccccccccccccccccccccccccccccaaaggcucuuuucagagccaccagaauu

SEQ ID NO: 14169 - RNA, 1973 nt, Artificial Sequence
  mRNA product Design f-2 comprising derived and/or modified sequence from HRSV(Memphis-37)__AIY60640.1__F_DSCav1_mut1 (opt4)
gggagagcggcucggccauuuugucccagucaguccggaggcugcggcugcagaaguaccgccugcggaguaacugcaaagaagcuuaccauggagcugcccauccugaagaccaacgccaucaccaccauccuggccgccgugacccugugcuucgccagcagccagaacaucaccgaggaguucuaccagagcaccugcagcgccgugagcaagggcuaccugggcgcccugagaaccggcugguacaccagcgugaucaccaucgagcugagcaacaucaaggagaacaagugcaacggcaccgacgccaaggugaagcugaucaagcaggagcuggacaaguacaagaacgccgugaccgagcugcagcugcugaugcagagcacccccgccgccggcagcggcagcgccaucugcagcggcaucgccgugugcaaggugcugcaccuggagggcgaggugaacaagaucaagaacgcccugcugagcaccaacaaggccguggugagccugagcaacggcgugagcgugcugaccuucaaggugcuggaccugaagaacuacaucgacaagcagcugcugcccauccugaacaagcagagcugcagcauccccaacaucgagaccgugaucgaguuccagcagaagaacaacagacugcuggagaucaccagagaguucagcgugaacgccggcgugaccacccccgugagcaccuacaugcugaccaacagcgagcugcugagccugaucaacgacaugcccaucaccaacgaccagaagaagcugaugagcaacaacgugcagaucgugagacagcagagcuacagcaucaugugcaucaucaaggaggaggugcuggccuacguggugcagcugccccuguacggcgugaucgacacccccugcuggaagcugcacaccagcccccugugcaccaccaacaccaaggagggcagcaacaucugccugaccagaaccgacagaggcugguacugcgacaacgccggcagcgugagcuucuucccccaggccgagaccugcaaggugcagagcaacagaguguucugcgacaccaugaacagccugacccugcccagcgaggugaaccugugcaacaucgacaucuucaaccccaaguacgacugcaagaucaugaccagcaagaccgacgugagcagcagcgugaucaccagccugggcgccaucgugagcugcuacggcaagaccaagugcaccgccagcaacaagaacagaggcaucaucaagaccuucagcaacggcugcgacuacgugagcaacaagggcguggacaccgugagcgugggcaacacccuguacugcgugaacaagcaggagggccagagccuguacgugaagggcgagcccaucaucaacuucuacgacccccugguguuccccagcgacgaguucgacgccagcaucagccaggugaacgagaagaucaaccagagccuggccuucaucagaaagagcgacgagcugcugcacaacgugaacgugggcaagagcaccaccaacaucaugaucaccaccaucaucaucgugaucaucgugauccugcugcugcugaucgccgugggccuguuccuguacugcaaggccagaagcacccccgugacccugagcaaggaccagcugagcggcaucaacaacaucgccuucagcaacugaggacuaguggaagcauuuuccuggcugauuaaaagaaauuacucagcuauggucaucuguuccuguuagaaggcuaugcagcauauuauauacuaugcgcauguuaugaaaugcauaauaaaaaauuuuaaaaaaucuaaaagaucuaaaaaaaaaaaaaaaaaaaaaaaaaaaaaaaaaaaaaaaaaaaaaaaaaaaaaaaaaaaaaaaaugcaucccccccccccccccccccccccccccccccaaaggcucuuuucagagccaccagaauu

SEQ ID NO: 14170 - RNA, 1973 nt, Artificial Sequence
  mRNA product Design f-2 comprising derived and/or modified sequence from HRSV(Memphis-37)__AIY60640.1__F_DSCav1_mut1 (opt5)
gggagagcggcucggccauuuugucccagucaguccggaggcugcggcugcagaaguaccgccugcggaguaacugcaaagaagcuuaccauggagcugcccauccucaagaccaacgccauuacaacgauccuggcugccgugacccuuugcuucgcgagcucccagaauauuacagaagaguuuuaccaaucuaccuguagcgcugucuccaaaggcuaucugggggcccucagaacaggaugguacaccucuguuaucacaauugaacugagcaacaucaaggagaauaaaugcaacggcaccgacgccaaggugaaacuuaucaagcaggaacuggauaaguauaaaaaugcugugacggagcuccagcugcugaugcaguccaccccugccgcugggucuggaagcgccauuuguuccggcaucgcggucugcaaggugcuccaccuggagggggaaguuaacaaaauuaagaaugcccuucugagcacaaacaaagcuguggucucucucuccaauggagugagcguucugaccuucaaggugcuugaccugaagaacuacaucgauaaacaacuccugccgauucugaauaagcagucuuguuccauccccaacauugagacagucaucgaauuucagcagaaaaauaaccggcuccuggagaucacccgcgaguucagcgugaaugccggcgugacgacaccugucucuaccuauaugcuuacaaacuccgaacugcucagccugauuaacgacaugcccaucaccaaugaucaaaagaaacuuauguccaacaauguucagauugugagacagcagucuuacagcaucaugugcauuaucaaggaggaagugcuggcuuaugucgugcaacucccucuguacggcguuaucgacacccccuguuggaaacugcauacauccccucucugcacgaccaacacaaaggaggggagcaauauuugucugacccggacagaucgcggaugguacugcgacaacgccggcucuguguccuuuuucccgcaggcggaaaccuguaagguccagagcaauagaguguuuugcgauacgaugaacucucuuacacugcccagcgagguuaaucucugcaacaucgacauuuucaauccuaaauaugauuguaagaucaugaccuccaaaaccgacgugucuagcuccgucauuacaagccugggggccaucgugucuugcuacggaaagaccaaauguacagcuuccaacaagaaucggggcaucauuaagacguuuagcaacgggugcgauuaugucucuaauaaaggaguggacaccguuuccgugggcaacacacuuuacugugucaacaagcaagagggccagagccuguaugugaaaggggaacccaucauuaauuucuacgacccucucguuuuucccuccgaugaguucgacgccucuaucagccaggugaacgaaaagauuaaucagucccuggcuuuuauccgcaaaucugaugagcugcuccacaacgucaaugugggaaagagcaccacaaacauuaugaucaccacgaucauuaucgugauuaucguuauucugcuucugcucaucgccgucggccuguuccuguauugcaaggccagauccaccccggugacacuuagcaaagaccaacucucugggaucaauaacauugcuuucuccaauugaggacuaguggaagcauuuuccuggcugauuaaaagaaauuacucagcuauggucaucuguuccuguuagaaggcuaugcagcauauuauauacuaugcgcauguuaugaaaugcauaauaaaaaauuuuaaaaaaucuaaaagaucuaaaaaaaaaaaaaaaaaaaaaaaaaaaaaaaaaaaaaaaaaaaaaaaaaaaaaaaaaaaaaaaaugcaucccccccccccccccccccccccccccccccaaaggcucuuuucagagccaccagaauu

SEQ ID NO: 14171 - RNA, 1973 nt, Artificial Sequence
  mRNA product Design f-2 comprising derived and/or modified sequence from HRSV(Memphis-37)__AIY60640.1__F_DSCav1_mut1 (opt6)
gggagagcggcucggccauuuugucccagucaguccggaggcugcggcugcagaaguaccgccugcggaguaacugcaaagaagcuuaccauggaacuuccaauucuaaaaaccaaugcuauaacaacaauauuagcagcaguuacauuaugcuucgccucaucacaaaauaucacagaagaauuuuaccaauccacaugcucagcaguaucuaaaggguaccuaggagcccuacgaacaggaugguacacaucaguaauaacaauagaacucucaaacaucaaagaaaacaaaugcaauggaacagacgcuaaaguaaaauuaauaaaacaagaacuagacaaauacaaaaacgccgucaccgaacuucaguuacucaugcaaagcacaccugcagcaggaucagguucagcaauaugcucaggaauagcaguuugcaaaguauuacaccuagaaggugaagucaacaaaauaaaaaacgcacuucuaaguacuaacaaagcuguaguaucauuaucaaacggaguauccguacuaaccuuuaaaguccuagaccuaaaaaacuacauagacaaacaacuacucccaauacucaauaaacaauccugcucaauucccaacaucgaaacaguaauagaauuucaacaaaaaaacaaucgccuucuagaaauaacaagagaauuuucagucaacgccggaguaacaacaccaguaucaacauauaugcuaacaaacagugaacuauuauccuuaauaaacgacaugccaauaacaaaugaccaaaaaaaacuaauguccaauaauguccaaauaguaagacaacaaagcuauucaauuauguguauaauaaaagaagaaguauuagcauacguaguucaacuaccacuauauggcguuauagacacaccaugcuggaaauuacacacaagcccacuaugcacaacaaauacaaaagaaggauccaacauuugcuuaacuagaacugacagaggaugguacugcgacaacgcuggaucagucucuuucuucccacaagcagaaaccuguaaaguacaaucaaauagagucuucugcgacacaaugaacucacuaacucucccaucugaaguaaacuuaugcaacaucgauauauuuaacccaaaauacgauuguaaaauaaugacauccaaaacagacguuucaucaagcguaaucaccucccucggagcaaucguaagcugcuacgguaaaacaaaaugcacagcauccaacaaaaacagaggcaucauaaaaacauucucaaacggaugugacuauguaucaaacaaaggaguagacacaguuucaguaggcaauaccuuauacugugucaauaaacaagaaggacaaucacuauauguaaaaggagaaccuauaauaaacuucuacgacccccucgucuucccuagcgaugaauuugacgcaucaauaucgcaaguaaacgaaaaaauaaaccaaucauuagccuuuauaagaaaaucagacgaauuauuacacaacguaaacguggggaaaagcacaacuaacaucaugauaacaacuaucauaauuguaaucaucgucauccuauuacuccuaaucgcaguaggacuauuccuauacugcaaagcuagaucaacaccagucacccuaucgaaagaucaauugucaggaauaaacaauauagccuuuucaaauuaaggacuaguggaagcauuuuccuggcugauuaaaagaaauuacucagcuauggucaucuguuccuguuagaaggcuaugcagcauauuauauacuaugcgcauguuaugaaaugcauaauaaaaaauuuuaaaaaaucuaaaagaucuaaaaaaaaaaaaaaaaaaaaaaaaaaaaaaaaaaaaaaaaaaaaaaaaaaaaaaaaaaaaaaaaugcaucccccccccccccccccccccccccccccccaaaggcucuuuucagagccaccagaauu

SEQ ID NO: 14172 - RNA, 1973 nt, Artificial Sequence
  mRNA product Design f-2 comprising derived and/or modified sequence from HRSV(Memphis-37)__AIY60640.1__F_DSCav1_mut1 (opt11)
gggagagcggcucggccauuuugucccagucaguccggaggcugcggcugcagaaguaccgccugcggaguaacugcaaagaagcuuaccauggaacuccccauccucaaaacgaacgccaucacaaccauccucgccgccgucacccucugcuucgcgucaucccaaaacauaacugaagaguucuaucaaucaaccugcuccgcagucucaaaaggcuaccucggcgcccuacggaccggcugguacacaagcgucaucacaauagaacuuuccaacaucaaagaaaacaaauguaacggcaccgacgcaaaagucaaacucauaaaacaagaacuagacaaauauaaaaacgccguaacugaacuacaacuccucaugcaaucaacuccugcagccgguagcggcuccgcaaucugcucaggcaucgcagucugcaaagucuuacaccuagaaggcgaagucaacaaaaucaagaacgcccuacuauccacaaacaaagcaguagucucucuauccaacggagucuccguccucacauucaaaguacucgaccuaaagaacuacaucgacaaacaacuacuaccaaucuuaaacaaacaauccugcucaaucccuaacauugaaaccgucauagaguuccaacagaaaaacaaccgccuccucgaaauaaccagagaguucucagucaacgccggcgucaccaccccggucucaaccuacaugcuaaccaacucugaacuucucagccuaaucaacgacaugcccauuaccaacgaccaaaagaaacucauguccaauaacguccaaaucguucgacaacaauccuacucaaucaugugcaucauaaaagaagaaguccuagcauacgucguccaacucccacuauacggcguaaucgacacccccugcuggaaacuccacaccuccccucucuguaccaccaacaccaaagaaggguccaacaucugccucacgcgcaccgaccgaggcugguauugcgacaaugcaggcucugucuccuucuucccccaagccgaaaccugcaaaguccaaucuaaccgcgucuucugcgacaccaugaacagucuuacccucccgucagaagucaaccucugcaacauagauaucuucaacccaaaauacgacugcaaaaucaugaccucaaaaaccgacguuuccucauccguuaucaccucccucggcgcaaucgucagcugcuacggcaagacaaagugcacggcuucaaacaaaaaccgcggaaucaucaagacauucagcaacggcugcgacuacguauccaacaaaggaguggacacagucuccguuggaaacacccucuacugcguaaacaaacaagaaggccaaucacucuacgucaaaggcgaacccaucaucaacuucuacgacccacucgucuuccccuccgacgaguucgacgccucaaucagccaagucaacgagaaaauuaaccagucacucgccuucauacgcaaauccgacgaacuucuacacaacguaaacgucggaaaaucaaccacaaacaucaugauuaccacaauuaucauagucaucauaguaauccuccugcuacucauagcagucggacucuuccuauacugcaaagcccgcuccaccccugucacccuauccaaagaccaacuuuccggcaucaacaacauagccuuuuccaacuaaggacuaguggaagcauuuuccuggcugauuaaaagaaauuacucagcuauggucaucuguuccuguuagaaggcuaugcagcauauuauauacuaugcgcauguuaugaaaugcauaauaaaaaauuuuaaaaaaucuaaaagaucuaaaaaaaaaaaaaaaaaaaaaaaaaaaaaaaaaaaaaaaaaaaaaaaaaaaaaaaaaaaaaaaaugcaucccccccccccccccccccccccccccccccaaaggcucuuuucagagccaccagaauu

SEQ ID NO: 14173 - RNA, 1964 nt, Artificial Sequence
  mRNA product Design f-3 comprising derived and/or modified sequence from HRSV(Memphis-37)__AIY60640.1__F_DSCav1_mut1 (opt1)
gggagagucccgcagucggcguccagcggcucugcuuguucgugugugugucguugcaggccuuauucaagcuuaccauggagcugcccauccucaagaccaacgccaucaccacgauccuggccgcggugacccugugcuucgccagcucccagaacaucaccgaggaguucuaccagagcacgugcuccgccgucagcaagggcuaccucggcgcccugcgcaccgggugguacaccagcgugaucaccaucgagcuguccaacaucaaggagaacaagugcaacggcaccgacgccaaggugaagcucaucaagcaggagcuggacaaguacaagaacgcggucacggagcugcagcuccugaugcagagcaccccggccgccggcuccgggagcgcgaucugcuccggcaucgccgucugcaaggugcugcaccucgagggcgaggugaacaagaucaagaacgcccugcuguccaccaacaaggccgucgugagccucuccaacggggugagcguccugaccuucaaggugcuggaccucaagaacuacaucgacaagcagcugcugcccauccugaacaagcagagcugcuccauccccaacaucgagaccgucaucgaguuccagcagaagaacaaccgccuccuggagaucacgcgggaguucagcgugaacgcgggcgugaccacccccgucuccaccuacaugcugacgaacagcgagcuccugucccugaucaacgacaugccgaucaccaacgaccagaagaagcucaugagcaacaacgugcagaucgugcgccagcaguccuacagcaucaugugcaucaucaaggaggagguccuggccuacguggugcagcugccccucuacggggucaucgacacccccugcuggaagcugcacaccagcccccugugcacgaccaacaccaaggagggcuccaacaucugccucacccggacggaccgcgggugguacugcgacaacgccggcagcguguccuucuucccgcaggccgagaccugcaagguccagagcaaccggguguucugcgacaccaugaacucccugacccugcccagcgaggugaaccucugcaacaucgacaucuucaaccccaaguacgacugcaagaucaugacguccaagaccgacgucagcuccagcgugaucaccucccugggcgccaucgugagcugcuacgggaagaccaagugcacggcgagcaacaagaaccgcggcaucaucaagaccuucuccaacgggugcgacuacgucagcaacaagggcguggacaccguguccgucggcaacacccuguacugcgugaacaagcaggagggccagagccucuacgugaagggggagcccaucaucaacuucuacgacccgcuggucuuccccuccgacgaguucgacgccagcaucucccaggugaacgagaagaucaaccagagccuggccuucauccggaaguccgacgagcuccugcacaacgugaacgucggcaagagcaccacgaacaucaugaucaccaccaucaucaucgugaucaucgugauccugcugcuccugaucgccgucgggcuguuccucuacugcaaggcccgcuccacccccgugacgcugagcaaggaccagcuguccgggaucaacaacaucgcguucagcaacugaggacuaguacuggcugcaucucccuuuccucuguccuccauccuucucccaggauggugaagggggaccugguacccagugauccccaccccaggauccuaaaucaugacuuaccugcuaauaaaaacucauuggaaaagugagaagaucuaaaaaaaaaaaaaaaaaaaaaaaaaaaaaaaaaaaaaaaaaaaaaaaaaaaaaaaaaaaaaaaaugcaucccccccccccccccccccccccccccccccaaaggcucuuuucagagccaccagaauu

SEQ ID NO: 14174 - RNA, 1964 nt, Artificial Sequence
  mRNA product Design f-3 comprising derived and/or modified sequence from HRSV(Memphis-37)__AIY60640.1__F_DSCav1_mut1 (opt1)
gggagagucccgcagucggcguccagcggcucugcuuguucgugugugugucguugcaggccuuauucaagcuuaccauggagcugcccauccucaagaccaacgccaucaccacgauccuggccgcggugacccugugcuucgccagcucccagaacaucaccgaggaguucuaccagagcacgugcuccgccgucagcaagggcuaccucggggcccugcgcaccggcugguacaccuccgugaucaccaucgagcugagcaacaucaaggagaacaagugcaacgggaccgacgccaaggugaagcucaucaagcaggagcuggacaaguacaagaacgcggucacggagcugcagcuccugaugcaguccaccccggccgccggcagcggguccgccaucugcagcggcaucgcggugugcaaggugcugcaccucgagggcgaggucaacaagaucaagaacgcccugcuguccaccaacaaggccguggugagccucuccaacggggucagcgugcugaccuucaaggugcuggaccucaagaacuacaucgacaagcagcugcugcccauccucaacaagcaguccugcagcauccccaacaucgagacggucaucgaguuccagcagaagaacaaccggcugcuggagaucacccgcgaguucuccgugaacgccggcgugaccacccccgucagcacguacaugcucaccaacuccgagcugcugagccucaucaacgacaugccgaucaccaacgaccagaagaagcugaugagcaacaacgugcagaucgugcggcagcaguccuacagcaucaugugcaucaucaaggaggagguccuggccuacguggugcagcucccccuguacggggucaucgacacccccugcuggaagcugcacacgagcccccucugcaccaccaacaccaaggagggcuccaacaucugccugacgcgcaccgaccgggggugguacugcgacaacgcgggcuccgugagcuucuucccgcaggccgagaccugcaaggugcaguccaaccgcgucuucugcgacaccaugaacagccugacgcuccccuccgaggugaaccugugcaacaucgacaucuucaaccccaaguacgacugcaagaucaugaccagcaagaccgacgucuccagcuccgugaucaccagccugggcgccaucguguccugcuacgggaagacgaagugcaccgccagcaacaagaaccggggcaucaucaagaccuucuccaacgggugcgacuacgucagcaacaagggcguggacaccguguccgucggcaacacgcucuacugcgugaacaagcaggaggggcagagccuguacgugaagggcgagcccaucaucaacuucuacgacccgcuggucuuccccagcgacgaguucgacgccuccaucagccaggugaacgagaagaucaaccagucccucgcguucauccgcaagagcgacgagcugcugcacaacgugaacgucgggaaguccaccaccaacaucaugaucaccaccaucaucaucgugaucaucgugauccuccugcugcucaucgccgucggccuguuccuguacugcaaggcccggagcacgcccgugacccuguccaaggaccagcucagcgggaucaacaacaucgccuucuccaacugaggacuaguacuggcugcaucucccuuuccucuguccuccauccuucucccaggauggugaagggggaccugguacccagugauccccaccccaggauccuaaaucaugacuuaccugcuaauaaaaacucauuggaaaagugagaagaucuaaaaaaaaaaaaaaaaaaaaaaaaaaaaaaaaaaaaaaaaaaaaaaaaaaaaaaaaaaaaaaaaugcaucccccccccccccccccccccccccccccccaaaggcucuuuucagagccaccagaauu

SEQ ID NO: 14175 - RNA, 1964 nt, Artificial Sequence
  mRNA product Design f-3 comprising derived and/or modified sequence from HRSV(Memphis-37)__AIY60640.1__F_DSCav1_mut1 (opt2)
gggagagucccgcagucggcguccagcggcucugcuuguucgugugugugucguugcaggccuuauucaagcuuaccauggagcuccccauccucaagaccaacgccaucaccaccauccucgccgccgucacccucugcuucgccuccucccagaacaucaccgaggaguucuaccaguccaccugcuccgccgucuccaagggcuaccucggcgcccuccgcaccggcugguacaccuccgucaucaccaucgagcucuccaacaucaaggagaacaagugcaacggcaccgacgccaaggucaagcucaucaagcaggagcucgacaaguacaagaacgccgucaccgagcuccagcuccucaugcaguccacccccgccgccggcuccggcuccgccaucugcuccggcaucgccgucugcaagguccuccaccucgagggcgaggucaacaagaucaagaacgcccuccucuccaccaacaaggccgucgucucccucuccaacggcgucuccguccucaccuucaagguccucgaccucaagaacuacaucgacaagcagcuccuccccauccucaacaagcaguccugcuccauccccaacaucgagaccgucaucgaguuccagcagaagaacaaccgccuccucgagaucacccgcgaguucuccgucaacgccggcgucaccacccccgucuccaccuacaugcucaccaacuccgagcuccucucccucaucaacgacaugcccaucaccaacgaccagaagaagcucauguccaacaacguccagaucguccgccagcaguccuacuccaucaugugcaucaucaaggaggagguccucgccuacgucguccagcucccccucuacggcgucaucgacacccccugcuggaagcuccacaccuccccccucugcaccaccaacaccaaggagggcuccaacaucugccucacccgcaccgaccgcggcugguacugcgacaacgccggcuccgucuccuucuucccccaggccgagaccugcaagguccaguccaaccgcgucuucugcgacaccaugaacucccucacccuccccuccgaggucaaccucugcaacaucgacaucuucaaccccaaguacgacugcaagaucaugaccuccaagaccgacgucuccuccuccgucaucaccucccucggcgccaucgucuccugcuacggcaagaccaagugcaccgccuccaacaagaaccgcggcaucaucaagaccuucuccaacggcugcgacuacgucuccaacaagggcgucgacaccgucuccgucggcaacacccucuacugcgucaacaagcaggagggccagucccucuacgucaagggcgagcccaucaucaacuucuacgacccccucgucuuccccuccgacgaguucgacgccuccaucucccaggucaacgagaagaucaaccagucccucgccuucauccgcaaguccgacgagcuccuccacaacgucaacgucggcaaguccaccaccaacaucaugaucaccaccaucaucaucgucaucaucgucauccuccuccuccucaucgccgucggccucuuccucuacugcaaggcccgcuccacccccgucacccucuccaaggaccagcucuccggcaucaacaacaucgccuucuccaacugaggacuaguacuggcugcaucucccuuuccucuguccuccauccuucucccaggauggugaagggggaccugguacccagugauccccaccccaggauccuaaaucaugacuuaccugcuaauaaaaacucauuggaaaagugagaagaucuaaaaaaaaaaaaaaaaaaaaaaaaaaaaaaaaaaaaaaaaaaaaaaaaaaaaaaaaaaaaaaaaugcaucccccccccccccccccccccccccccccccaaaggcucuuuucagagccaccagaauu

SEQ ID NO: 14176 - RNA, 1964 nt, Artificial Sequence
  mRNA product Design f-3 comprising derived and/or modified sequence from HRSV(Memphis-37)__AIY60640.1__F_DSCav1_mut1 (opt3)
gggagagucccgcagucggcguccagcggcucugcuuguucgugugugugucguugcaggccuuauucaagcuuaccauggagcugcccauccucaagaccaacgccauuacaacuauacuugcugcagugacgcugugcuucgccagcucccagaauaucaccgaagaguuuuaccaaucuacauguucagcggucaguaaaggcuauuugggggcuuuaagaacuggaugguacaccagcguuauuacaaucgaacuguccaacauuaaggagaauaaaugcaacgguaccgacgccaaggugaaacuaaucaagcaggaacucgauaaguauaaaaaugcaguaacugagcugcagcuucugaugcagucuacuccugccgcuggcucggggucagcaauauguagcggaaucgccgugugcaaggucuugcaccucgagggcgaagugaacaaaauuaagaaugcucugcugaguaccaacaaagccguugugucccucucuaauggugucagcguguuaacguucaagguacuggaccuuaagaacuacaucgauaaacaauugcugccaauucuaaauaagcaguccuguucaaucccgaacauagagacuguuauugaauuucagcagaaaaauaacaggcuccuggagaucacccgggaguucagugugaaugcgggggucacaacucccgugagcaccuauaugcuuacaaacucugaacuguugucccucauuaacgacaugccuaucaccaaugaucaaaagaaacugaugucaaacaaugugcagaucguccgccagcagagcuacaguauuaugugcauaaucaaggaggaaguuuuagcauaugugguacaacugccacucuacggagugauugacacgcccuguuggaaacuucauacuucuccucugugcacaaccaacacuaaggagggcuccaauaucuguuugacacgaaccgaucguggcugguacugcgacaacgccgggagcgucucguuuuucccacaggcugaaacguguaaggugcagucuaauagaguguuuugcgauaccaugaacucccuaacacugcccucagagguuaaucucugcaacauagacauuuucaauccuaaauaugauuguaagaucaugacaaguaaaaccgacgucagcuccucugugaucacaagccugggagccauuguaucaugcuacgguaagacuaaauguaccgcaaguaacaagaauaggggcaucauuaagacauuuuccaacgggugcgauuauguuagcaauaaaggaguggacaccgucucugugggcaacacucuuuacugugucaacaagcaagagggucagucacuguaugugaaaggggaaccaauaaucaauuucuacgacccguugguuuuucccagugaugaguucgacgcuagcauuucccaggugaacgaaaagaucaaucagucucucgccuuuauccggaaaucggaugagcuguuacacaacguaaaugucggaaagagcacgacaaacauuaugauaaccacuaucauuaucgugauuaucguuauacugcuacuccugaucgcggugggccuuuucuuguauugcaaggcccgcuccaccccugucacacugucaaaagaccaacucaguggcauuaauaacaucgcauucucuaauugaggacuaguacuggcugcaucucccuuuccucuguccuccauccuucucccaggauggugaagggggaccugguacccagugauccccaccccaggauccuaaaucaugacuuaccugcuaauaaaaacucauuggaaaagugagaagaucuaaaaaaaaaaaaaaaaaaaaaaaaaaaaaaaaaaaaaaaaaaaaaaaaaaaaaaaaaaaaaaaaugcaucccccccccccccccccccccccccccccccaaaggcucuuuucagagccaccagaauu

SEQ ID NO: 14177 - RNA, 1964 nt, Artificial Sequence
  mRNA product Design f-3 comprising derived and/or modified sequence from HRSV(Memphis-37)__AIY60640.1__F_DSCav1_mut1 (opt4)
gggagagucccgcagucggcguccagcggcucugcuuguucgugugugugucguugcaggccuuauucaagcuuaccauggagcugcccauccugaagaccaacgccaucaccaccauccuggccgccgugacccugugcuucgccagcagccagaacaucaccgaggaguucuaccagagcaccugcagcgccgugagcaagggcuaccugggcgcccugagaaccggcugguacaccagcgugaucaccaucgagcugagcaacaucaaggagaacaagugcaacggcaccgacgccaaggugaagcugaucaagcaggagcuggacaaguacaagaacgccgugaccgagcugcagcugcugaugcagagcacccccgccgccggcagcggcagcgccaucugcagcggcaucgccgugugcaaggugcugcaccuggagggcgaggugaacaagaucaagaacgcccugcugagcaccaacaaggccguggugagccugagcaacggcgugagcgugcugaccuucaaggugcuggaccugaagaacuacaucgacaagcagcugcugcccauccugaacaagcagagcugcagcauccccaacaucgagaccgugaucgaguuccagcagaagaacaacagacugcuggagaucaccagagaguucagcgugaacgccggcgugaccacccccgugagcaccuacaugcugaccaacagcgagcugcugagccugaucaacgacaugcccaucaccaacgaccagaagaagcugaugagcaacaacgugcagaucgugagacagcagagcuacagcaucaugugcaucaucaaggaggaggugcuggccuacguggugcagcugccccuguacggcgugaucgacacccccugcuggaagcugcacaccagcccccugugcaccaccaacaccaaggagggcagcaacaucugccugaccagaaccgacagaggcugguacugcgacaacgccggcagcgugagcuucuucccccaggccgagaccugcaaggugcagagcaacagaguguucugcgacaccaugaacagccugacccugcccagcgaggugaaccugugcaacaucgacaucuucaaccccaaguacgacugcaagaucaugaccagcaagaccgacgugagcagcagcgugaucaccagccugggcgccaucgugagcugcuacggcaagaccaagugcaccgccagcaacaagaacagaggcaucaucaagaccuucagcaacggcugcgacuacgugagcaacaagggcguggacaccgugagcgugggcaacacccuguacugcgugaacaagcaggagggccagagccuguacgugaagggcgagcccaucaucaacuucuacgacccccugguguuccccagcgacgaguucgacgccagcaucagccaggugaacgagaagaucaaccagagccuggccuucaucagaaagagcgacgagcugcugcacaacgugaacgugggcaagagcaccaccaacaucaugaucaccaccaucaucaucgugaucaucgugauccugcugcugcugaucgccgugggccuguuccuguacugcaaggccagaagcacccccgugacccugagcaaggaccagcugagcggcaucaacaacaucgccuucagcaacugaggacuaguacuggcugcaucucccuuuccucuguccuccauccuucucccaggauggugaagggggaccugguacccagugauccccaccccaggauccuaaaucaugacuuaccugcuaauaaaaacucauuggaaaagugagaagaucuaaaaaaaaaaaaaaaaaaaaaaaaaaaaaaaaaaaaaaaaaaaaaaaaaaaaaaaaaaaaaaaaugcaucccccccccccccccccccccccccccccccaaaggcucuuuucagagccaccagaauu

SEQ ID NO: 14178 - RNA, 1964 nt, Artificial Sequence
  mRNA product Design f-3 comprising derived and/or modified sequence from HRSV(Memphis-37)__AIY60640.1__F_DSCav1_mut1 (opt5)
gggagagucccgcagucggcguccagcggcucugcuuguucgugugugugucguugcaggccuuauucaagcuuaccauggagcugcccauccucaagaccaacgccauuacaacgauccuggcugccgugacccuuugcuucgcgagcucccagaauauuacagaagaguuuuaccaaucuaccuguagcgcugucuccaaaggcuaucugggggcccucagaacaggaugguacaccucuguuaucacaauugaacugagcaacaucaaggagaauaaaugcaacggcaccgacgccaaggugaaacuuaucaagcaggaacuggauaaguauaaaaaugcugugacggagcuccagcugcugaugcaguccaccccugccgcugggucuggaagcgccauuuguuccggcaucgcggucugcaaggugcuccaccuggagggggaaguuaacaaaauuaagaaugcccuucugagcacaaacaaagcuguggucucucucuccaauggagugagcguucugaccuucaaggugcuugaccugaagaacuacaucgauaaacaacuccugccgauucugaauaagcagucuuguuccauccccaacauugagacagucaucgaauuucagcagaaaaauaaccggcuccuggagaucacccgcgaguucagcgugaaugccggcgugacgacaccugucucuaccuauaugcuuacaaacuccgaacugcucagccugauuaacgacaugcccaucaccaaugaucaaaagaaacuuauguccaacaauguucagauugugagacagcagucuuacagcaucaugugcauuaucaaggaggaagugcuggcuuaugucgugcaacucccucuguacggcguuaucgacacccccuguuggaaacugcauacauccccucucugcacgaccaacacaaaggaggggagcaauauuugucugacccggacagaucgcggaugguacugcgacaacgccggcucuguguccuuuuucccgcaggcggaaaccuguaagguccagagcaauagaguguuuugcgauacgaugaacucucuuacacugcccagcgagguuaaucucugcaacaucgacauuuucaauccuaaauaugauuguaagaucaugaccuccaaaaccgacgugucuagcuccgucauuacaagccugggggccaucgugucuugcuacggaaagaccaaauguacagcuuccaacaagaaucggggcaucauuaagacguuuagcaacgggugcgauuaugucucuaauaaaggaguggacaccguuuccgugggcaacacacuuuacugugucaacaagcaagagggccagagccuguaugugaaaggggaacccaucauuaauuucuacgacccucucguuuuucccuccgaugaguucgacgccucuaucagccaggugaacgaaaagauuaaucagucccuggcuuuuauccgcaaaucugaugagcugcuccacaacgucaaugugggaaagagcaccacaaacauuaugaucaccacgaucauuaucgugauuaucguuauucugcuucugcucaucgccgucggccuguuccuguauugcaaggccagauccaccccggugacacuuagcaaagaccaacucucugggaucaauaacauugcuuucuccaauugaggacuaguacuggcugcaucucccuuuccucuguccuccauccuucucccaggauggugaagggggaccugguacccagugauccccaccccaggauccuaaaucaugacuuaccugcuaauaaaaacucauuggaaaagugagaagaucuaaaaaaaaaaaaaaaaaaaaaaaaaaaaaaaaaaaaaaaaaaaaaaaaaaaaaaaaaaaaaaaaugcaucccccccccccccccccccccccccccccccaaaggcucuuuucagagccaccagaauu

SEQ ID NO: 14179 - RNA, 1964 nt, Artificial Sequence
  mRNA product Design f-3 comprising derived and/or modified sequence from HRSV(Memphis-37)__AIY60640.1__F_DSCav1_mut1 (opt6)
gggagagucccgcagucggcguccagcggcucugcuuguucgugugugugucguugcaggccuuauucaagcuuaccauggaacuuccaauucuaaaaaccaaugcuauaacaacaauauuagcagcaguuacauuaugcuucgccucaucacaaaauaucacagaagaauuuuaccaauccacaugcucagcaguaucuaaaggguaccuaggagcccuacgaacaggaugguacacaucaguaauaacaauagaacucucaaacaucaaagaaaacaaaugcaauggaacagacgcuaaaguaaaauuaauaaaacaagaacuagacaaauacaaaaacgccgucaccgaacuucaguuacucaugcaaagcacaccugcagcaggaucagguucagcaauaugcucaggaauagcaguuugcaaaguauuacaccuagaaggugaagucaacaaaauaaaaaacgcacuucuaaguacuaacaaagcuguaguaucauuaucaaacggaguauccguacuaaccuuuaaaguccuagaccuaaaaaacuacauagacaaacaacuacucccaauacucaauaaacaauccugcucaauucccaacaucgaaacaguaauagaauuucaacaaaaaaacaaucgccuucuagaaauaacaagagaauuuucagucaacgccggaguaacaacaccaguaucaacauauaugcuaacaaacagugaacuauuauccuuaauaaacgacaugccaauaacaaaugaccaaaaaaaacuaauguccaauaauguccaaauaguaagacaacaaagcuauucaauuauguguauaauaaaagaagaaguauuagcauacguaguucaacuaccacuauauggcguuauagacacaccaugcuggaaauuacacacaagcccacuaugcacaacaaauacaaaagaaggauccaacauuugcuuaacuagaacugacagaggaugguacugcgacaacgcuggaucagucucuuucuucccacaagcagaaaccuguaaaguacaaucaaauagagucuucugcgacacaaugaacucacuaacucucccaucugaaguaaacuuaugcaacaucgauauauuuaacccaaaauacgauuguaaaauaaugacauccaaaacagacguuucaucaagcguaaucaccucccucggagcaaucguaagcugcuacgguaaaacaaaaugcacagcauccaacaaaaacagaggcaucauaaaaacauucucaaacggaugugacuauguaucaaacaaaggaguagacacaguuucaguaggcaauaccuuauacugugucaauaaacaagaaggacaaucacuauauguaaaaggagaaccuauaauaaacuucuacgacccccucgucuucccuagcgaugaauuugacgcaucaauaucgcaaguaaacgaaaaaauaaaccaaucauuagccuuuauaagaaaaucagacgaauuauuacacaacguaaacguggggaaaagcacaacuaacaucaugauaacaacuaucauaauuguaaucaucgucauccuauuacuccuaaucgcaguaggacuauuccuauacugcaaagcuagaucaacaccagucacccuaucgaaagaucaauugucaggaauaaacaauauagccuuuucaaauuaaggacuaguacuggcugcaucucccuuuccucuguccuccauccuucucccaggauggugaagggggaccugguacccagugauccccaccccaggauccuaaaucaugacuuaccugcuaauaaaaacucauuggaaaagugagaagaucuaaaaaaaaaaaaaaaaaaaaaaaaaaaaaaaaaaaaaaaaaaaaaaaaaaaaaaaaaaaaaaaaugcaucccccccccccccccccccccccccccccccaaaggcucuuuucagagccaccagaauu

SEQ ID NO: 14180 - RNA, 1964 nt, Artificial Sequence
  mRNA product Design f-3 comprising derived and/or modified sequence from HRSV(Memphis-37)__AIY60640.1__F_DSCav1_mut1 (opt11)
gggagagucccgcagucggcguccagcggcucugcuuguucgugugugugucguugcaggccuuauucaagcuuaccauggaacuccccauccucaaaacgaacgccaucacaaccauccucgccgccgucacccucugcuucgcgucaucccaaaacauaacugaagaguucuaucaaucaaccugcuccgcagucucaaaaggcuaccucggcgcccuacggaccggcugguacacaagcgucaucacaauagaacuuuccaacaucaaagaaaacaaauguaacggcaccgacgcaaaagucaaacucauaaaacaagaacuagacaaauauaaaaacgccguaacugaacuacaacuccucaugcaaucaacuccugcagccgguagcggcuccgcaaucugcucaggcaucgcagucugcaaagucuuacaccuagaaggcgaagucaacaaaaucaagaacgcccuacuauccacaaacaaagcaguagucucucuauccaacggagucuccguccucacauucaaaguacucgaccuaaagaacuacaucgacaaacaacuacuaccaaucuuaaacaaacaauccugcucaaucccuaacauugaaaccgucauagaguuccaacagaaaaacaaccgccuccucgaaauaaccagagaguucucagucaacgccggcgucaccaccccggucucaaccuacaugcuaaccaacucugaacuucucagccuaaucaacgacaugcccauuaccaacgaccaaaagaaacucauguccaauaacguccaaaucguucgacaacaauccuacucaaucaugugcaucauaaaagaagaaguccuagcauacgucguccaacucccacuauacggcguaaucgacacccccugcuggaaacuccacaccuccccucucuguaccaccaacaccaaagaaggguccaacaucugccucacgcgcaccgaccgaggcugguauugcgacaaugcaggcucugucuccuucuucccccaagccgaaaccugcaaaguccaaucuaaccgcgucuucugcgacaccaugaacagucuuacccucccgucagaagucaaccucugcaacauagauaucuucaacccaaaauacgacugcaaaaucaugaccucaaaaaccgacguuuccucauccguuaucaccucccucggcgcaaucgucagcugcuacggcaagacaaagugcacggcuucaaacaaaaaccgcggaaucaucaagacauucagcaacggcugcgacuacguauccaacaaaggaguggacacagucuccguuggaaacacccucuacugcguaaacaaacaagaaggccaaucacucuacgucaaaggcgaacccaucaucaacuucuacgacccacucgucuuccccuccgacgaguucgacgccucaaucagccaagucaacgagaaaauuaaccagucacucgccuucauacgcaaauccgacgaacuucuacacaacguaaacgucggaaaaucaaccacaaacaucaugauuaccacaauuaucauagucaucauaguaauccuccugcuacucauagcagucggacucuuccuauacugcaaagcccgcuccaccccugucacccuauccaaagaccaacuuuccggcaucaacaacauagccuuuuccaacuaaggacuaguacuggcugcaucucccuuuccucuguccuccauccuucucccaggauggugaagggggaccugguacccagugauccccaccccaggauccuaaaucaugacuuaccugcuaauaaaaacucauuggaaaagugagaagaucuaaaaaaaaaaaaaaaaaaaaaaaaaaaaaaaaaaaaaaaaaaaaaaaaaaaaaaaaaaaaaaaaugcaucccccccccccccccccccccccccccccccaaaggcucuuuucagagccaccagaauu

SEQ ID NO: 14181 - RNA, 2180 nt, Artificial Sequence
  mRNA product Design f-4 comprising derived and/or modified sequence from HRSV(Memphis-37)__AIY60640.1__F_DSCav1_mut1 (opt1)
gggagagucccgcagucggcguccagcggcucugcuuguucgugugugugucguugcaggccuuauucaagcuuaccauggagcugcccauccucaagaccaacgccaucaccacgauccuggccgcggugacccugugcuucgccagcucccagaacaucaccgaggaguucuaccagagcacgugcuccgccgucagcaagggcuaccucggcgcccugcgcaccgggugguacaccagcgugaucaccaucgagcuguccaacaucaaggagaacaagugcaacggcaccgacgccaaggugaagcucaucaagcaggagcuggacaaguacaagaacgcggucacggagcugcagcuccugaugcagagcaccccggccgccggcuccgggagcgcgaucugcuccggcaucgccgucugcaaggugcugcaccucgagggcgaggugaacaagaucaagaacgcccugcuguccaccaacaaggccgucgugagccucuccaacggggugagcguccugaccuucaaggugcuggaccucaagaacuacaucgacaagcagcugcugcccauccugaacaagcagagcugcuccauccccaacaucgagaccgucaucgaguuccagcagaagaacaaccgccuccuggagaucacgcgggaguucagcgugaacgcgggcgugaccacccccgucuccaccuacaugcugacgaacagcgagcuccugucccugaucaacgacaugccgaucaccaacgaccagaagaagcucaugagcaacaacgugcagaucgugcgccagcaguccuacagcaucaugugcaucaucaaggaggagguccuggccuacguggugcagcugccccucuacggggucaucgacacccccugcuggaagcugcacaccagcccccugugcacgaccaacaccaaggagggcuccaacaucugccucacccggacggaccgcgggugguacugcgacaacgccggcagcguguccuucuucccgcaggccgagaccugcaagguccagagcaaccggguguucugcgacaccaugaacucccugacccugcccagcgaggugaaccucugcaacaucgacaucuucaaccccaaguacgacugcaagaucaugacguccaagaccgacgucagcuccagcgugaucaccucccugggcgccaucgugagcugcuacgggaagaccaagugcacggcgagcaacaagaaccgcggcaucaucaagaccuucuccaacgggugcgacuacgucagcaacaagggcguggacaccguguccgucggcaacacccuguacugcgugaacaagcaggagggccagagccucuacgugaagggggagcccaucaucaacuucuacgacccgcuggucuuccccuccgacgaguucgacgccagcaucucccaggugaacgagaagaucaaccagagccuggccuucauccggaaguccgacgagcuccugcacaacgugaacgucggcaagagcaccacgaacaucaugaucaccaccaucaucaucgugaucaucgugauccugcugcuccugaucgccgucgggcuguuccucuacugcaaggcccgcuccacccccgugacgcugagcaaggaccagcuguccgggaucaacaacaucgcguucagcaacugaggacuagugaagggaacacccaaauuuaauucagccuuaagcacaauuaauuaagagugaaacguaauuguacaagcaguuggucacccaccauagggcaugaucaacaccgcaaccuuuccuuuuucccccagugauucugaaaaaccccucuucccuucagcuugcuuagauguuccaaauuuaguaagcuuaaggcggccuacagaagaaaaagaaaaaaaaggccacaaaaguucccucucacuuucaguaaauaaaauaaaagcagcaacagaaauaaagaaauaaaugaaauucaaaaugaaauaaauauuguguugugcagcauuaaaaaaucaauaaaaauuaaaaaugagcaagaucuaaaaaaaaaaaaaaaaaaaaaaaaaaaaaaaaaaaaaaaaaaaaaaaaaaaaaaaaaaaaaaaaugcaucccccccccccccccccccccccccccccccaaaggcucuuuucagagccaccagaauu

SEQ ID NO: 14182 - RNA, 2180 nt, Artificial Sequence
  mRNA product Design f-4 comprising derived and/or modified sequence from HRSV(Memphis-37)__AIY60640.1__F_DSCav1_mut1 (opt1)
gggagagucccgcagucggcguccagcggcucugcuuguucgugugugugucguugcaggccuuauucaagcuuaccauggagcugcccauccucaagaccaacgccaucaccacgauccuggccgcggugacccugugcuucgccagcucccagaacaucaccgaggaguucuaccagagcacgugcuccgccgucagcaagggcuaccucggggcccugcgcaccggcugguacaccuccgugaucaccaucgagcugagcaacaucaaggagaacaagugcaacgggaccgacgccaaggugaagcucaucaagcaggagcuggacaaguacaagaacgcggucacggagcugcagcuccugaugcaguccaccccggccgccggcagcggguccgccaucugcagcggcaucgcggugugcaaggugcugcaccucgagggcgaggucaacaagaucaagaacgcccugcuguccaccaacaaggccguggugagccucuccaacggggucagcgugcugaccuucaaggugcuggaccucaagaacuacaucgacaagcagcugcugcccauccucaacaagcaguccugcagcauccccaacaucgagacggucaucgaguuccagcagaagaacaaccggcugcuggagaucacccgcgaguucuccgugaacgccggcgugaccacccccgucagcacguacaugcucaccaacuccgagcugcugagccucaucaacgacaugccgaucaccaacgaccagaagaagcugaugagcaacaacgugcagaucgugcggcagcaguccuacagcaucaugugcaucaucaaggaggagguccuggccuacguggugcagcucccccuguacggggucaucgacacccccugcuggaagcugcacacgagcccccucugcaccaccaacaccaaggagggcuccaacaucugccugacgcgcaccgaccgggggugguacugcgacaacgcgggcuccgugagcuucuucccgcaggccgagaccugcaaggugcaguccaaccgcgucuucugcgacaccaugaacagccugacgcuccccuccgaggugaaccugugcaacaucgacaucuucaaccccaaguacgacugcaagaucaugaccagcaagaccgacgucuccagcuccgugaucaccagccugggcgccaucguguccugcuacgggaagacgaagugcaccgccagcaacaagaaccggggcaucaucaagaccuucuccaacgggugcgacuacgucagcaacaagggcguggacaccguguccgucggcaacacgcucuacugcgugaacaagcaggaggggcagagccuguacgugaagggcgagcccaucaucaacuucuacgacccgcuggucuuccccagcgacgaguucgacgccuccaucagccaggugaacgagaagaucaaccagucccucgcguucauccgcaagagcgacgagcugcugcacaacgugaacgucgggaaguccaccaccaacaucaugaucaccaccaucaucaucgugaucaucgugauccuccugcugcucaucgccgucggccuguuccuguacugcaaggcccggagcacgcccgugacccuguccaaggaccagcucagcgggaucaacaacaucgccuucuccaacugaggacuagugaagggaacacccaaauuuaauucagccuuaagcacaauuaauuaagagugaaacguaauuguacaagcaguuggucacccaccauagggcaugaucaacaccgcaaccuuuccuuuuucccccagugauucugaaaaaccccucuucccuucagcuugcuuagauguuccaaauuuaguaagcuuaaggcggccuacagaagaaaaagaaaaaaaaggccacaaaaguucccucucacuuucaguaaauaaaauaaaagcagcaacagaaauaaagaaauaaaugaaauucaaaaugaaauaaauauuguguugugcagcauuaaaaaaucaauaaaaauuaaaaaugagcaagaucuaaaaaaaaaaaaaaaaaaaaaaaaaaaaaaaaaaaaaaaaaaaaaaaaaaaaaaaaaaaaaaaaugcaucccccccccccccccccccccccccccccccaaaggcucuuuucagagccaccagaauu

SEQ ID NO: 14183 - RNA, 2180 nt, Artificial Sequence
  mRNA product Design f-4 comprising derived and/or modified sequence from HRSV(Memphis-37)__AIY60640.1__F_DSCav1_mut1 (opt2)
gggagagucccgcagucggcguccagcggcucugcuuguucgugugugugucguugcaggccuuauucaagcuuaccauggagcuccccauccucaagaccaacgccaucaccaccauccucgccgccgucacccucugcuucgccuccucccagaacaucaccgaggaguucuaccaguccaccugcuccgccgucuccaagggcuaccucggcgcccuccgcaccggcugguacaccuccgucaucaccaucgagcucuccaacaucaaggagaacaagugcaacggcaccgacgccaaggucaagcucaucaagcaggagcucgacaaguacaagaacgccgucaccgagcuccagcuccucaugcaguccacccccgccgccggcuccggcuccgccaucugcuccggcaucgccgucugcaagguccuccaccucgagggcgaggucaacaagaucaagaacgcccuccucuccaccaacaaggccgucgucucccucuccaacggcgucuccguccucaccuucaagguccucgaccucaagaacuacaucgacaagcagcuccuccccauccucaacaagcaguccugcuccauccccaacaucgagaccgucaucgaguuccagcagaagaacaaccgccuccucgagaucacccgcgaguucuccgucaacgccggcgucaccacccccgucuccaccuacaugcucaccaacuccgagcuccucucccucaucaacgacaugcccaucaccaacgaccagaagaagcucauguccaacaacguccagaucguccgccagcaguccuacuccaucaugugcaucaucaaggaggagguccucgccuacgucguccagcucccccucuacggcgucaucgacacccccugcuggaagcuccacaccuccccccucugcaccaccaacaccaaggagggcuccaacaucugccucacccgcaccgaccgcggcugguacugcgacaacgccggcuccgucuccuucuucccccaggccgagaccugcaagguccaguccaaccgcgucuucugcgacaccaugaacucccucacccuccccuccgaggucaaccucugcaacaucgacaucuucaaccccaaguacgacugcaagaucaugaccuccaagaccgacgucuccuccuccgucaucaccucccucggcgccaucgucuccugcuacggcaagaccaagugcaccgccuccaacaagaaccgcggcaucaucaagaccuucuccaacggcugcgacuacgucuccaacaagggcgucgacaccgucuccgucggcaacacccucuacugcgucaacaagcaggagggccagucccucuacgucaagggcgagcccaucaucaacuucuacgacccccucgucuuccccuccgacgaguucgacgccuccaucucccaggucaacgagaagaucaaccagucccucgccuucauccgcaaguccgacgagcuccuccacaacgucaacgucggcaaguccaccaccaacaucaugaucaccaccaucaucaucgucaucaucgucauccuccuccuccucaucgccgucggccucuuccucuacugcaaggcccgcuccacccccgucacccucuccaaggaccagcucuccggcaucaacaacaucgccuucuccaacugaggacuagugaagggaacacccaaauuuaauucagccuuaagcacaauuaauuaagagugaaacguaauuguacaagcaguuggucacccaccauagggcaugaucaacaccgcaaccuuuccuuuuucccccagugauucugaaaaaccccucuucccuucagcuugcuuagauguuccaaauuuaguaagcuuaaggcggccuacagaagaaaaagaaaaaaaaggccacaaaaguucccucucacuuucaguaaauaaaauaaaagcagcaacagaaauaaagaaauaaaugaaauucaaaaugaaauaaauauuguguugugcagcauuaaaaaaucaauaaaaauuaaaaaugagcaagaucuaaaaaaaaaaaaaaaaaaaaaaaaaaaaaaaaaaaaaaaaaaaaaaaaaaaaaaaaaaaaaaaaugcaucccccccccccccccccccccccccccccccaaaggcucuuuucagagccaccagaauu

SEQ ID NO: 14184 - RNA, 2180 nt, Artificial Sequence
  mRNA product Design f-4 comprising derived and/or modified sequence from HRSV(Memphis-37)__AIY60640.1__F_DSCav1_mut1 (opt3)
gggagagucccgcagucggcguccagcggcucugcuuguucgugugugugucguugcaggccuuauucaagcuuaccauggagcugcccauccucaagaccaacgccauuacaacuauacuugcugcagugacgcugugcuucgccagcucccagaauaucaccgaagaguuuuaccaaucuacauguucagcggucaguaaaggcuauuugggggcuuuaagaacuggaugguacaccagcguuauuacaaucgaacuguccaacauuaaggagaauaaaugcaacgguaccgacgccaaggugaaacuaaucaagcaggaacucgauaaguauaaaaaugcaguaacugagcugcagcuucugaugcagucuacuccugccgcuggcucggggucagcaauauguagcggaaucgccgugugcaaggucuugcaccucgagggcgaagugaacaaaauuaagaaugcucugcugaguaccaacaaagccguugugucccucucuaauggugucagcguguuaacguucaagguacuggaccuuaagaacuacaucgauaaacaauugcugccaauucuaaauaagcaguccuguucaaucccgaacauagagacuguuauugaauuucagcagaaaaauaacaggcuccuggagaucacccgggaguucagugugaaugcgggggucacaacucccgugagcaccuauaugcuuacaaacucugaacuguugucccucauuaacgacaugccuaucaccaaugaucaaaagaaacugaugucaaacaaugugcagaucguccgccagcagagcuacaguauuaugugcauaaucaaggaggaaguuuuagcauaugugguacaacugccacucuacggagugauugacacgcccuguuggaaacuucauacuucuccucugugcacaaccaacacuaaggagggcuccaauaucuguuugacacgaaccgaucguggcugguacugcgacaacgccgggagcgucucguuuuucccacaggcugaaacguguaaggugcagucuaauagaguguuuugcgauaccaugaacucccuaacacugcccucagagguuaaucucugcaacauagacauuuucaauccuaaauaugauuguaagaucaugacaaguaaaaccgacgucagcuccucugugaucacaagccugggagccauuguaucaugcuacgguaagacuaaauguaccgcaaguaacaagaauaggggcaucauuaagacauuuuccaacgggugcgauuauguuagcaauaaaggaguggacaccgucucugugggcaacacucuuuacugugucaacaagcaagagggucagucacuguaugugaaaggggaaccaauaaucaauuucuacgacccguugguuuuucccagugaugaguucgacgcuagcauuucccaggugaacgaaaagaucaaucagucucucgccuuuauccggaaaucggaugagcuguuacacaacguaaaugucggaaagagcacgacaaacauuaugauaaccacuaucauuaucgugauuaucguuauacugcuacuccugaucgcggugggccuuuucuuguauugcaaggcccgcuccaccccugucacacugucaaaagaccaacucaguggcauuaauaacaucgcauucucuaauugaggacuagugaagggaacacccaaauuuaauucagccuuaagcacaauuaauuaagagugaaacguaauuguacaagcaguuggucacccaccauagggcaugaucaacaccgcaaccuuuccuuuuucccccagugauucugaaaaaccccucuucccuucagcuugcuuagauguuccaaauuuaguaagcuuaaggcggccuacagaagaaaaagaaaaaaaaggccacaaaaguucccucucacuuucaguaaauaaaauaaaagcagcaacagaaauaaagaaauaaaugaaauucaaaaugaaauaaauauuguguugugcagcauuaaaaaaucaauaaaaauuaaaaaugagcaagaucuaaaaaaaaaaaaaaaaaaaaaaaaaaaaaaaaaaaaaaaaaaaaaaaaaaaaaaaaaaaaaaaaugcaucccccccccccccccccccccccccccccccaaaggcucuuuucagagccaccagaauu

SEQ ID NO: 14185 - RNA, 2180 nt, Artificial Sequence
  mRNA product Design f-4 comprising derived and/or modified sequence from HRSV(Memphis-37)__AIY60640.1__F_DSCav1_mut1 (opt4)
gggagagucccgcagucggcguccagcggcucugcuuguucgugugugugucguugcaggccuuauucaagcuuaccauggagcugcccauccugaagaccaacgccaucaccaccauccuggccgccgugacccugugcuucgccagcagccagaacaucaccgaggaguucuaccagagcaccugcagcgccgugagcaagggcuaccugggcgcccugagaaccggcugguacaccagcgugaucaccaucgagcugagcaacaucaaggagaacaagugcaacggcaccgacgccaaggugaagcugaucaagcaggagcuggacaaguacaagaacgccgugaccgagcugcagcugcugaugcagagcacccccgccgccggcagcggcagcgccaucugcagcggcaucgccgugugcaaggugcugcaccuggagggcgaggugaacaagaucaagaacgcccugcugagcaccaacaaggccguggugagccugagcaacggcgugagcgugcugaccuucaaggugcuggaccugaagaacuacaucgacaagcagcugcugcccauccugaacaagcagagcugcagcauccccaacaucgagaccgugaucgaguuccagcagaagaacaacagacugcuggagaucaccagagaguucagcgugaacgccggcgugaccacccccgugagcaccuacaugcugaccaacagcgagcugcugagccugaucaacgacaugcccaucaccaacgaccagaagaagcugaugagcaacaacgugcagaucgugagacagcagagcuacagcaucaugugcaucaucaaggaggaggugcuggccuacguggugcagcugccccuguacggcgugaucgacacccccugcuggaagcugcacaccagcccccugugcaccaccaacaccaaggagggcagcaacaucugccugaccagaaccgacagaggcugguacugcgacaacgccggcagcgugagcuucuucccccaggccgagaccugcaaggugcagagcaacagaguguucugcgacaccaugaacagccugacccugcccagcgaggugaaccugugcaacaucgacaucuucaaccccaaguacgacugcaagaucaugaccagcaagaccgacgugagcagcagcgugaucaccagccugggcgccaucgugagcugcuacggcaagaccaagugcaccgccagcaacaagaacagaggcaucaucaagaccuucagcaacggcugcgacuacgugagcaacaagggcguggacaccgugagcgugggcaacacccuguacugcgugaacaagcaggagggccagagccuguacgugaagggcgagcccaucaucaacuucuacgacccccugguguuccccagcgacgaguucgacgccagcaucagccaggugaacgagaagaucaaccagagccuggccuucaucagaaagagcgacgagcugcugcacaacgugaacgugggcaagagcaccaccaacaucaugaucaccaccaucaucaucgugaucaucgugauccugcugcugcugaucgccgugggccuguuccuguacugcaaggccagaagcacccccgugacccugagcaaggaccagcugagcggcaucaacaacaucgccuucagcaacugaggacuagugaagggaacacccaaauuuaauucagccuuaagcacaauuaauuaagagugaaacguaauuguacaagcaguuggucacccaccauagggcaugaucaacaccgcaaccuuuccuuuuucccccagugauucugaaaaaccccucuucccuucagcuugcuuagauguuccaaauuuaguaagcuuaaggcggccuacagaagaaaaagaaaaaaaaggccacaaaaguucccucucacuuucaguaaauaaaauaaaagcagcaacagaaauaaagaaauaaaugaaauucaaaaugaaauaaauauuguguugugcagcauuaaaaaaucaauaaaaauuaaaaaugagcaagaucuaaaaaaaaaaaaaaaaaaaaaaaaaaaaaaaaaaaaaaaaaaaaaaaaaaaaaaaaaaaaaaaaugcaucccccccccccccccccccccccccccccccaaaggcucuuuucagagccaccagaauu

SEQ ID NO: 14186 - RNA, 2180 nt, Artificial Sequence
  mRNA product Design f-4 comprising derived and/or modified sequence from HRSV(Memphis-37)__AIY60640.1__F_DSCav1_mut1 (opt5)
gggagagucccgcagucggcguccagcggcucugcuuguucgugugugugucguugcaggccuuauucaagcuuaccauggagcugcccauccucaagaccaacgccauuacaacgauccuggcugccgugacccuuugcuucgcgagcucccagaauauuacagaagaguuuuaccaaucuaccuguagcgcugucuccaaaggcuaucugggggcccucagaacaggaugguacaccucuguuaucacaauugaacugagcaacaucaaggagaauaaaugcaacggcaccgacgccaaggugaaacuuaucaagcaggaacuggauaaguauaaaaaugcugugacggagcuccagcugcugaugcaguccaccccugccgcugggucuggaagcgccauuuguuccggcaucgcggucugcaaggugcuccaccuggagggggaaguuaacaaaauuaagaaugcccuucugagcacaaacaaagcuguggucucucucuccaauggagugagcguucugaccuucaaggugcuugaccugaagaacuacaucgauaaacaacuccugccgauucugaauaagcagucuuguuccauccccaacauugagacagucaucgaauuucagcagaaaaauaaccggcuccuggagaucacccgcgaguucagcgugaaugccggcgugacgacaccugucucuaccuauaugcuuacaaacuccgaacugcucagccugauuaacgacaugcccaucaccaaugaucaaaagaaacuuauguccaacaauguucagauugugagacagcagucuuacagcaucaugugcauuaucaaggaggaagugcuggcuuaugucgugcaacucccucuguacggcguuaucgacacccccuguuggaaacugcauacauccccucucugcacgaccaacacaaaggaggggagcaauauuugucugacccggacagaucgcggaugguacugcgacaacgccggcucuguguccuuuuucccgcaggcggaaaccuguaagguccagagcaauagaguguuuugcgauacgaugaacucucuuacacugcccagcgagguuaaucucugcaacaucgacauuuucaauccuaaauaugauuguaagaucaugaccuccaaaaccgacgugucuagcuccgucauuacaagccugggggccaucgugucuugcuacggaaagaccaaauguacagcuuccaacaagaaucggggcaucauuaagacguuuagcaacgggugcgauuaugucucuaauaaaggaguggacaccguuuccgugggcaacacacuuuacugugucaacaagcaagagggccagagccuguaugugaaaggggaacccaucauuaauuucuacgacccucucguuuuucccuccgaugaguucgacgccucuaucagccaggugaacgaaaagauuaaucagucccuggcuuuuauccgcaaaucugaugagcugcuccacaacgucaaugugggaaagagcaccacaaacauuaugaucaccacgaucauuaucgugauuaucguuauucugcuucugcucaucgccgucggccuguuccuguauugcaaggccagauccaccccggugacacuuagcaaagaccaacucucugggaucaauaacauugcuuucuccaauugaggacuagugaagggaacacccaaauuuaauucagccuuaagcacaauuaauuaagagugaaacguaauuguacaagcaguuggucacccaccauagggcaugaucaacaccgcaaccuuuccuuuuucccccagugauucugaaaaaccccucuucccuucagcuugcuuagauguuccaaauuuaguaagcuuaaggcggccuacagaagaaaaagaaaaaaaaggccacaaaaguucccucucacuuucaguaaauaaaauaaaagcagcaacagaaauaaagaaauaaaugaaauucaaaaugaaauaaauauuguguugugcagcauuaaaaaaucaauaaaaauuaaaaaugagcaagaucuaaaaaaaaaaaaaaaaaaaaaaaaaaaaaaaaaaaaaaaaaaaaaaaaaaaaaaaaaaaaaaaaugcaucccccccccccccccccccccccccccccccaaaggcucuuuucagagccaccagaauu

SEQ ID NO: 14187 - RNA, 2180 nt, Artificial Sequence
  mRNA product Design f-4 comprising derived and/or modified sequence from HRSV(Memphis-37)__AIY60640.1__F_DSCav1_mut1 (opt6)
gggagagucccgcagucggcguccagcggcucugcuuguucgugugugugucguugcaggccuuauucaagcuuaccauggaacuuccaauucuaaaaaccaaugcuauaacaacaauauuagcagcaguuacauuaugcuucgccucaucacaaaauaucacagaagaauuuuaccaauccacaugcucagcaguaucuaaaggguaccuaggagcccuacgaacaggaugguacacaucaguaauaacaauagaacucucaaacaucaaagaaaacaaaugcaauggaacagacgcuaaaguaaaauuaauaaaacaagaacuagacaaauacaaaaacgccgucaccgaacuucaguuacucaugcaaagcacaccugcagcaggaucagguucagcaauaugcucaggaauagcaguuugcaaaguauuacaccuagaaggugaagucaacaaaauaaaaaacgcacuucuaaguacuaacaaagcuguaguaucauuaucaaacggaguauccguacuaaccuuuaaaguccuagaccuaaaaaacuacauagacaaacaacuacucccaauacucaauaaacaauccugcucaauucccaacaucgaaacaguaauagaauuucaacaaaaaaacaaucgccuucuagaaauaacaagagaauuuucagucaacgccggaguaacaacaccaguaucaacauauaugcuaacaaacagugaacuauuauccuuaauaaacgacaugccaauaacaaaugaccaaaaaaaacuaauguccaauaauguccaaauaguaagacaacaaagcuauucaauuauguguauaauaaaagaagaaguauuagcauacguaguucaacuaccacuauauggcguuauagacacaccaugcuggaaauuacacacaagcccacuaugcacaacaaauacaaaagaaggauccaacauuugcuuaacuagaacugacagaggaugguacugcgacaacgcuggaucagucucuuucuucccacaagcagaaaccuguaaaguacaaucaaauagagucuucugcgacacaaugaacucacuaacucucccaucugaaguaaacuuaugcaacaucgauauauuuaacccaaaauacgauuguaaaauaaugacauccaaaacagacguuucaucaagcguaaucaccucccucggagcaaucguaagcugcuacgguaaaacaaaaugcacagcauccaacaaaaacagaggcaucauaaaaacauucucaaacggaugugacuauguaucaaacaaaggaguagacacaguuucaguaggcaauaccuuauacugugucaauaaacaagaaggacaaucacuauauguaaaaggagaaccuauaauaaacuucuacgacccccucgucuucccuagcgaugaauuugacgcaucaauaucgcaaguaaacgaaaaaauaaaccaaucauuagccuuuauaagaaaaucagacgaauuauuacacaacguaaacguggggaaaagcacaacuaacaucaugauaacaacuaucauaauuguaaucaucgucauccuauuacuccuaaucgcaguaggacuauuccuauacugcaaagcuagaucaacaccagucacccuaucgaaagaucaauugucaggaauaaacaauauagccuuuucaaauuaaggacuagugaagggaacacccaaauuuaauucagccuuaagcacaauuaauuaagagugaaacguaauuguacaagcaguuggucacccaccauagggcaugaucaacaccgcaaccuuuccuuuuucccccagugauucugaaaaaccccucuucccuucagcuugcuuagauguuccaaauuuaguaagcuuaaggcggccuacagaagaaaaagaaaaaaaaggccacaaaaguucccucucacuuucaguaaauaaaauaaaagcagcaacagaaauaaagaaauaaaugaaauucaaaaugaaauaaauauuguguugugcagcauuaaaaaaucaauaaaaauuaaaaaugagcaagaucuaaaaaaaaaaaaaaaaaaaaaaaaaaaaaaaaaaaaaaaaaaaaaaaaaaaaaaaaaaaaaaaaugcaucccccccccccccccccccccccccccccccaaaggcucuuuucagagccaccagaauu

SEQ ID NO: 14188 - RNA, 2180 nt, Artificial Sequence
  mRNA product Design f-4 comprising derived and/or modified sequence from HRSV(Memphis-37)__AIY60640.1__F_DSCav1_mut1 (opt11)
gggagagucccgcagucggcguccagcggcucugcuuguucgugugugugucguugcaggccuuauucaagcuuaccauggaacuccccauccucaaaacgaacgccaucacaaccauccucgccgccgucacccucugcuucgcgucaucccaaaacauaacugaagaguucuaucaaucaaccugcuccgcagucucaaaaggcuaccucggcgcccuacggaccggcugguacacaagcgucaucacaauagaacuuuccaacaucaaagaaaacaaauguaacggcaccgacgcaaaagucaaacucauaaaacaagaacuagacaaauauaaaaacgccguaacugaacuacaacuccucaugcaaucaacuccugcagccgguagcggcuccgcaaucugcucaggcaucgcagucugcaaagucuuacaccuagaaggcgaagucaacaaaaucaagaacgcccuacuauccacaaacaaagcaguagucucucuauccaacggagucuccguccucacauucaaaguacucgaccuaaagaacuacaucgacaaacaacuacuaccaaucuuaaacaaacaauccugcucaaucccuaacauugaaaccgucauagaguuccaacagaaaaacaaccgccuccucgaaauaaccagagaguucucagucaacgccggcgucaccaccccggucucaaccuacaugcuaaccaacucugaacuucucagccuaaucaacgacaugcccauuaccaacgaccaaaagaaacucauguccaauaacguccaaaucguucgacaacaauccuacucaaucaugugcaucauaaaagaagaaguccuagcauacgucguccaacucccacuauacggcguaaucgacacccccugcuggaaacuccacaccuccccucucuguaccaccaacaccaaagaaggguccaacaucugccucacgcgcaccgaccgaggcugguauugcgacaaugcaggcucugucuccuucuucccccaagccgaaaccugcaaaguccaaucuaaccgcgucuucugcgacaccaugaacagucuuacccucccgucagaagucaaccucugcaacauagauaucuucaacccaaaauacgacugcaaaaucaugaccucaaaaaccgacguuuccucauccguuaucaccucccucggcgcaaucgucagcugcuacggcaagacaaagugcacggcuucaaacaaaaaccgcggaaucaucaagacauucagcaacggcugcgacuacguauccaacaaaggaguggacacagucuccguuggaaacacccucuacugcguaaacaaacaagaaggccaaucacucuacgucaaaggcgaacccaucaucaacuucuacgacccacucgucuuccccuccgacgaguucgacgccucaaucagccaagucaacgagaaaauuaaccagucacucgccuucauacgcaaauccgacgaacuucuacacaacguaaacgucggaaaaucaaccacaaacaucaugauuaccacaauuaucauagucaucauaguaauccuccugcuacucauagcagucggacucuuccuauacugcaaagcccgcuccaccccugucacccuauccaaagaccaacuuuccggcaucaacaacauagccuuuuccaacuaaggacuagugaagggaacacccaaauuuaauucagccuuaagcacaauuaauuaagagugaaacguaauuguacaagcaguuggucacccaccauagggcaugaucaacaccgcaaccuuuccuuuuucccccagugauucugaaaaaccccucuucccuucagcuugcuuagauguuccaaauuuaguaagcuuaaggcggccuacagaagaaaaagaaaaaaaaggccacaaaaguucccucucacuuucaguaaauaaaauaaaagcagcaacagaaauaaagaaauaaaugaaauucaaaaugaaauaaauauuguguugugcagcauuaaaaaaucaauaaaaauuaaaaaugagcaagaucuaaaaaaaaaaaaaaaaaaaaaaaaaaaaaaaaaaaaaaaaaaaaaaaaaaaaaaaaaaaaaaaaugcaucccccccccccccccccccccccccccccccaaaggcucuuuucagagccaccagaauu

SEQ ID NO: 14189 - RNA, 1956 nt, Artificial Sequence
  mRNA product Design f-5 comprising derived and/or modified sequence from HRSV(Memphis-37)__AIY60640.1__F_DSCav1_mut1 (opt1)
gggagacuuucccauucuguagcagaauuugguguugccuguggucuuggucccgcggagaagcuuaccauggagcugcccauccucaagaccaacgccaucaccacgauccuggccgcggugacccugugcuucgccagcucccagaacaucaccgaggaguucuaccagagcacgugcuccgccgucagcaagggcuaccucggcgcccugcgcaccgggugguacaccagcgugaucaccaucgagcuguccaacaucaaggagaacaagugcaacggcaccgacgccaaggugaagcucaucaagcaggagcuggacaaguacaagaacgcggucacggagcugcagcuccugaugcagagcaccccggccgccggcuccgggagcgcgaucugcuccggcaucgccgucugcaaggugcugcaccucgagggcgaggugaacaagaucaagaacgcccugcuguccaccaacaaggccgucgugagccucuccaacggggugagcguccugaccuucaaggugcuggaccucaagaacuacaucgacaagcagcugcugcccauccugaacaagcagagcugcuccauccccaacaucgagaccgucaucgaguuccagcagaagaacaaccgccuccuggagaucacgcgggaguucagcgugaacgcgggcgugaccacccccgucuccaccuacaugcugacgaacagcgagcuccugucccugaucaacgacaugccgaucaccaacgaccagaagaagcucaugagcaacaacgugcagaucgugcgccagcaguccuacagcaucaugugcaucaucaaggaggagguccuggccuacguggugcagcugccccucuacggggucaucgacacccccugcuggaagcugcacaccagcccccugugcacgaccaacaccaaggagggcuccaacaucugccucacccggacggaccgcgggugguacugcgacaacgccggcagcguguccuucuucccgcaggccgagaccugcaagguccagagcaaccggguguucugcgacaccaugaacucccugacccugcccagcgaggugaaccucugcaacaucgacaucuucaaccccaaguacgacugcaagaucaugacguccaagaccgacgucagcuccagcgugaucaccucccugggcgccaucgugagcugcuacgggaagaccaagugcacggcgagcaacaagaaccgcggcaucaucaagaccuucuccaacgggugcgacuacgucagcaacaagggcguggacaccguguccgucggcaacacccuguacugcgugaacaagcaggagggccagagccucuacgugaagggggagcccaucaucaacuucuacgacccgcuggucuuccccuccgacgaguucgacgccagcaucucccaggugaacgagaagaucaaccagagccuggccuucauccggaaguccgacgagcuccugcacaacgugaacgucggcaagagcaccacgaacaucaugaucaccaccaucaucaucgugaucaucgugauccugcugcuccugaucgccgucgggcuguuccucuacugcaaggcccgcuccacccccgugacgcugagcaaggaccagcuguccgggaucaacaacaucgcguucagcaacugaggacuaguacuggcugcaucucccuuuccucuguccuccauccuucucccaggauggugaagggggaccugguacccagugauccccaccccaggauccuaaaucaugacuuaccugcuaauaaaaacucauuggaaaagugagaagaucuaaaaaaaaaaaaaaaaaaaaaaaaaaaaaaaaaaaaaaaaaaaaaaaaaaaaaaaaaaaaaaaaugcaucccccccccccccccccccccccccccccccaaaggcucuuuucagagccaccagaauu

SEQ ID NO: 14190 - RNA, 1956 nt, Artificial Sequence
  mRNA product Design f-5 comprising derived and/or modified sequence from HRSV(Memphis-37)__AIY60640.1__F_DSCav1_mut1 (opt1)
gggagacuuucccauucuguagcagaauuugguguugccuguggucuuggucccgcggagaagcuuaccauggagcugcccauccucaagaccaacgccaucaccacgauccuggccgcggugacccugugcuucgccagcucccagaacaucaccgaggaguucuaccagagcacgugcuccgccgucagcaagggcuaccucggggcccugcgcaccggcugguacaccuccgugaucaccaucgagcugagcaacaucaaggagaacaagugcaacgggaccgacgccaaggugaagcucaucaagcaggagcuggacaaguacaagaacgcggucacggagcugcagcuccugaugcaguccaccccggccgccggcagcggguccgccaucugcagcggcaucgcggugugcaaggugcugcaccucgagggcgaggucaacaagaucaagaacgcccugcuguccaccaacaaggccguggugagccucuccaacggggucagcgugcugaccuucaaggugcuggaccucaagaacuacaucgacaagcagcugcugcccauccucaacaagcaguccugcagcauccccaacaucgagacggucaucgaguuccagcagaagaacaaccggcugcuggagaucacccgcgaguucuccgugaacgccggcgugaccacccccgucagcacguacaugcucaccaacuccgagcugcugagccucaucaacgacaugccgaucaccaacgaccagaagaagcugaugagcaacaacgugcagaucgugcggcagcaguccuacagcaucaugugcaucaucaaggaggagguccuggccuacguggugcagcucccccuguacggggucaucgacacccccugcuggaagcugcacacgagcccccucugcaccaccaacaccaaggagggcuccaacaucugccugacgcgcaccgaccgggggugguacugcgacaacgcgggcuccgugagcuucuucccgcaggccgagaccugcaaggugcaguccaaccgcgucuucugcgacaccaugaacagccugacgcuccccuccgaggugaaccugugcaacaucgacaucuucaaccccaaguacgacugcaagaucaugaccagcaagaccgacgucuccagcuccgugaucaccagccugggcgccaucguguccugcuacgggaagacgaagugcaccgccagcaacaagaaccggggcaucaucaagaccuucuccaacgggugcgacuacgucagcaacaagggcguggacaccguguccgucggcaacacgcucuacugcgugaacaagcaggaggggcagagccuguacgugaagggcgagcccaucaucaacuucuacgacccgcuggucuuccccagcgacgaguucgacgccuccaucagccaggugaacgagaagaucaaccagucccucgcguucauccgcaagagcgacgagcugcugcacaacgugaacgucgggaaguccaccaccaacaucaugaucaccaccaucaucaucgugaucaucgugauccuccugcugcucaucgccgucggccuguuccuguacugcaaggcccggagcacgcccgugacccuguccaaggaccagcucagcgggaucaacaacaucgccuucuccaacugaggacuaguacuggcugcaucucccuuuccucuguccuccauccuucucccaggauggugaagggggaccugguacccagugauccccaccccaggauccuaaaucaugacuuaccugcuaauaaaaacucauuggaaaagugagaagaucuaaaaaaaaaaaaaaaaaaaaaaaaaaaaaaaaaaaaaaaaaaaaaaaaaaaaaaaaaaaaaaaaugcaucccccccccccccccccccccccccccccccaaaggcucuuuucagagccaccagaauu

SEQ ID NO: 14191 - RNA, 1956 nt, Artificial Sequence
  mRNA product Design f-5 comprising derived and/or modified sequence from HRSV(Memphis-37)__AIY60640.1__F_DSCav1_mut1 (opt2)
gggagacuuucccauucuguagcagaauuugguguugccuguggucuuggucccgcggagaagcuuaccauggagcuccccauccucaagaccaacgccaucaccaccauccucgccgccgucacccucugcuucgccuccucccagaacaucaccgaggaguucuaccaguccaccugcuccgccgucuccaagggcuaccucggcgcccuccgcaccggcugguacaccuccgucaucaccaucgagcucuccaacaucaaggagaacaagugcaacggcaccgacgccaaggucaagcucaucaagcaggagcucgacaaguacaagaacgccgucaccgagcuccagcuccucaugcaguccacccccgccgccggcuccggcuccgccaucugcuccggcaucgccgucugcaagguccuccaccucgagggcgaggucaacaagaucaagaacgcccuccucuccaccaacaaggccgucgucucccucuccaacggcgucuccguccucaccuucaagguccucgaccucaagaacuacaucgacaagcagcuccuccccauccucaacaagcaguccugcuccauccccaacaucgagaccgucaucgaguuccagcagaagaacaaccgccuccucgagaucacccgcgaguucuccgucaacgccggcgucaccacccccgucuccaccuacaugcucaccaacuccgagcuccucucccucaucaacgacaugcccaucaccaacgaccagaagaagcucauguccaacaacguccagaucguccgccagcaguccuacuccaucaugugcaucaucaaggaggagguccucgccuacgucguccagcucccccucuacggcgucaucgacacccccugcuggaagcuccacaccuccccccucugcaccaccaacaccaaggagggcuccaacaucugccucacccgcaccgaccgcggcugguacugcgacaacgccggcuccgucuccuucuucccccaggccgagaccugcaagguccaguccaaccgcgucuucugcgacaccaugaacucccucacccuccccuccgaggucaaccucugcaacaucgacaucuucaaccccaaguacgacugcaagaucaugaccuccaagaccgacgucuccuccuccgucaucaccucccucggcgccaucgucuccugcuacggcaagaccaagugcaccgccuccaacaagaaccgcggcaucaucaagaccuucuccaacggcugcgacuacgucuccaacaagggcgucgacaccgucuccgucggcaacacccucuacugcgucaacaagcaggagggccagucccucuacgucaagggcgagcccaucaucaacuucuacgacccccucgucuuccccuccgacgaguucgacgccuccaucucccaggucaacgagaagaucaaccagucccucgccuucauccgcaaguccgacgagcuccuccacaacgucaacgucggcaaguccaccaccaacaucaugaucaccaccaucaucaucgucaucaucgucauccuccuccuccucaucgccgucggccucuuccucuacugcaaggcccgcuccacccccgucacccucuccaaggaccagcucuccggcaucaacaacaucgccuucuccaacugaggacuaguacuggcugcaucucccuuuccucuguccuccauccuucucccaggauggugaagggggaccugguacccagugauccccaccccaggauccuaaaucaugacuuaccugcuaauaaaaacucauuggaaaagugagaagaucuaaaaaaaaaaaaaaaaaaaaaaaaaaaaaaaaaaaaaaaaaaaaaaaaaaaaaaaaaaaaaaaaugcaucccccccccccccccccccccccccccccccaaaggcucuuuucagagccaccagaauu

SEQ ID NO: 14192 - RNA, 1956 nt, Artificial Sequence
  mRNA product Design f-5 comprising derived and/or modified sequence from HRSV(Memphis-37)__AIY60640.1__F_DSCav1_mut1 (opt3)
gggagacuuucccauucuguagcagaauuugguguugccuguggucuuggucccgcggagaagcuuaccauggagcugcccauccucaagaccaacgccauuacaacuauacuugcugcagugacgcugugcuucgccagcucccagaauaucaccgaagaguuuuaccaaucuacauguucagcggucaguaaaggcuauuugggggcuuuaagaacuggaugguacaccagcguuauuacaaucgaacuguccaacauuaaggagaauaaaugcaacgguaccgacgccaaggugaaacuaaucaagcaggaacucgauaaguauaaaaaugcaguaacugagcugcagcuucugaugcagucuacuccugccgcuggcucggggucagcaauauguagcggaaucgccgugugcaaggucuugcaccucgagggcgaagugaacaaaauuaagaaugcucugcugaguaccaacaaagccguugugucccucucuaauggugucagcguguuaacguucaagguacuggaccuuaagaacuacaucgauaaacaauugcugccaauucuaaauaagcaguccuguucaaucccgaacauagagacuguuauugaauuucagcagaaaaauaacaggcuccuggagaucacccgggaguucagugugaaugcgggggucacaacucccgugagcaccuauaugcuuacaaacucugaacuguugucccucauuaacgacaugccuaucaccaaugaucaaaagaaacugaugucaaacaaugugcagaucguccgccagcagagcuacaguauuaugugcauaaucaaggaggaaguuuuagcauaugugguacaacugccacucuacggagugauugacacgcccuguuggaaacuucauacuucuccucugugcacaaccaacacuaaggagggcuccaauaucuguuugacacgaaccgaucguggcugguacugcgacaacgccgggagcgucucguuuuucccacaggcugaaacguguaaggugcagucuaauagaguguuuugcgauaccaugaacucccuaacacugcccucagagguuaaucucugcaacauagacauuuucaauccuaaauaugauuguaagaucaugacaaguaaaaccgacgucagcuccucugugaucacaagccugggagccauuguaucaugcuacgguaagacuaaauguaccgcaaguaacaagaauaggggcaucauuaagacauuuuccaacgggugcgauuauguuagcaauaaaggaguggacaccgucucugugggcaacacucuuuacugugucaacaagcaagagggucagucacuguaugugaaaggggaaccaauaaucaauuucuacgacccguugguuuuucccagugaugaguucgacgcuagcauuucccaggugaacgaaaagaucaaucagucucucgccuuuauccggaaaucggaugagcuguuacacaacguaaaugucggaaagagcacgacaaacauuaugauaaccacuaucauuaucgugauuaucguuauacugcuacuccugaucgcggugggccuuuucuuguauugcaaggcccgcuccaccccugucacacugucaaaagaccaacucaguggcauuaauaacaucgcauucucuaauugaggacuaguacuggcugcaucucccuuuccucuguccuccauccuucucccaggauggugaagggggaccugguacccagugauccccaccccaggauccuaaaucaugacuuaccugcuaauaaaaacucauuggaaaagugagaagaucuaaaaaaaaaaaaaaaaaaaaaaaaaaaaaaaaaaaaaaaaaaaaaaaaaaaaaaaaaaaaaaaaugcaucccccccccccccccccccccccccccccccaaaggcucuuuucagagccaccagaauu

SEQ ID NO: 14193 - RNA, 1956 nt, Artificial Sequence
  mRNA product Design f-5 comprising derived and/or modified sequence from HRSV(Memphis-37)__AIY60640.1__F_DSCav1_mut1 (opt4)
gggagacuuucccauucuguagcagaauuugguguugccuguggucuuggucccgcggagaagcuuaccauggagcugcccauccugaagaccaacgccaucaccaccauccuggccgccgugacccugugcuucgccagcagccagaacaucaccgaggaguucuaccagagcaccugcagcgccgugagcaagggcuaccugggcgcccugagaaccggcugguacaccagcgugaucaccaucgagcugagcaacaucaaggagaacaagugcaacggcaccgacgccaaggugaagcugaucaagcaggagcuggacaaguacaagaacgccgugaccgagcugcagcugcugaugcagagcacccccgccgccggcagcggcagcgccaucugcagcggcaucgccgugugcaaggugcugcaccuggagggcgaggugaacaagaucaagaacgcccugcugagcaccaacaaggccguggugagccugagcaacggcgugagcgugcugaccuucaaggugcuggaccugaagaacuacaucgacaagcagcugcugcccauccugaacaagcagagcugcagcauccccaacaucgagaccgugaucgaguuccagcagaagaacaacagacugcuggagaucaccagagaguucagcgugaacgccggcgugaccacccccgugagcaccuacaugcugaccaacagcgagcugcugagccugaucaacgacaugcccaucaccaacgaccagaagaagcugaugagcaacaacgugcagaucgugagacagcagagcuacagcaucaugugcaucaucaaggaggaggugcuggccuacguggugcagcugccccuguacggcgugaucgacacccccugcuggaagcugcacaccagcccccugugcaccaccaacaccaaggagggcagcaacaucugccugaccagaaccgacagaggcugguacugcgacaacgccggcagcgugagcuucuucccccaggccgagaccugcaaggugcagagcaacagaguguucugcgacaccaugaacagccugacccugcccagcgaggugaaccugugcaacaucgacaucuucaaccccaaguacgacugcaagaucaugaccagcaagaccgacgugagcagcagcgugaucaccagccugggcgccaucgugagcugcuacggcaagaccaagugcaccgccagcaacaagaacagaggcaucaucaagaccuucagcaacggcugcgacuacgugagcaacaagggcguggacaccgugagcgugggcaacacccuguacugcgugaacaagcaggagggccagagccuguacgugaagggcgagcccaucaucaacuucuacgacccccugguguuccccagcgacgaguucgacgccagcaucagccaggugaacgagaagaucaaccagagccuggccuucaucagaaagagcgacgagcugcugcacaacgugaacgugggcaagagcaccaccaacaucaugaucaccaccaucaucaucgugaucaucgugauccugcugcugcugaucgccgugggccuguuccuguacugcaaggccagaagcacccccgugacccugagcaaggaccagcugagcggcaucaacaacaucgccuucagcaacugaggacuaguacuggcugcaucucccuuuccucuguccuccauccuucucccaggauggugaagggggaccugguacccagugauccccaccccaggauccuaaaucaugacuuaccugcuaauaaaaacucauuggaaaagugagaagaucuaaaaaaaaaaaaaaaaaaaaaaaaaaaaaaaaaaaaaaaaaaaaaaaaaaaaaaaaaaaaaaaaugcaucccccccccccccccccccccccccccccccaaaggcucuuuucagagccaccagaauu

SEQ ID NO: 14194 - RNA, 1956 nt, Artificial Sequence
  mRNA product Design f-5 comprising derived and/or modified sequence from HRSV(Memphis-37)__AIY60640.1__F_DSCav1_mut1 (opt5)
gggagacuuucccauucuguagcagaauuugguguugccuguggucuuggucccgcggagaagcuuaccauggagcugcccauccucaagaccaacgccauuacaacgauccuggcugccgugacccuuugcuucgcgagcucccagaauauuacagaagaguuuuaccaaucuaccuguagcgcugucuccaaaggcuaucugggggcccucagaacaggaugguacaccucuguuaucacaauugaacugagcaacaucaaggagaauaaaugcaacggcaccgacgccaaggugaaacuuaucaagcaggaacuggauaaguauaaaaaugcugugacggagcuccagcugcugaugcaguccaccccugccgcugggucuggaagcgccauuuguuccggcaucgcggucugcaaggugcuccaccuggagggggaaguuaacaaaauuaagaaugcccuucugagcacaaacaaagcuguggucucucucuccaauggagugagcguucugaccuucaaggugcuugaccugaagaacuacaucgauaaacaacuccugccgauucugaauaagcagucuuguuccauccccaacauugagacagucaucgaauuucagcagaaaaauaaccggcuccuggagaucacccgcgaguucagcgugaaugccggcgugacgacaccugucucuaccuauaugcuuacaaacuccgaacugcucagccugauuaacgacaugcccaucaccaaugaucaaaagaaacuuauguccaacaauguucagauugugagacagcagucuuacagcaucaugugcauuaucaaggaggaagugcuggcuuaugucgugcaacucccucuguacggcguuaucgacacccccuguuggaaacugcauacauccccucucugcacgaccaacacaaaggaggggagcaauauuugucugacccggacagaucgcggaugguacugcgacaacgccggcucuguguccuuuuucccgcaggcggaaaccuguaagguccagagcaauagaguguuuugcgauacgaugaacucucuuacacugcccagcgagguuaaucucugcaacaucgacauuuucaauccuaaauaugauuguaagaucaugaccuccaaaaccgacgugucuagcuccgucauuacaagccugggggccaucgugucuugcuacggaaagaccaaauguacagcuuccaacaagaaucggggcaucauuaagacguuuagcaacgggugcgauuaugucucuaauaaaggaguggacaccguuuccgugggcaacacacuuuacugugucaacaagcaagagggccagagccuguaugugaaaggggaacccaucauuaauuucuacgacccucucguuuuucccuccgaugaguucgacgccucuaucagccaggugaacgaaaagauuaaucagucccuggcuuuuauccgcaaaucugaugagcugcuccacaacgucaaugugggaaagagcaccacaaacauuaugaucaccacgaucauuaucgugauuaucguuauucugcuucugcucaucgccgucggccuguuccuguauugcaaggccagauccaccccggugacacuuagcaaagaccaacucucugggaucaauaacauugcuuucuccaauugaggacuaguacuggcugcaucucccuuuccucuguccuccauccuucucccaggauggugaagggggaccugguacccagugauccccaccccaggauccuaaaucaugacuuaccugcuaauaaaaacucauuggaaaagugagaagaucuaaaaaaaaaaaaaaaaaaaaaaaaaaaaaaaaaaaaaaaaaaaaaaaaaaaaaaaaaaaaaaaaugcaucccccccccccccccccccccccccccccccaaaggcucuuuucagagccaccagaauu

SEQ ID NO: 14195 - RNA, 1956 nt, Artificial Sequence
  mRNA product Design f-5 comprising derived and/or modified sequence from HRSV(Memphis-37)__AIY60640.1__F_DSCav1_mut1 (opt6)
gggagacuuucccauucuguagcagaauuugguguugccuguggucuuggucccgcggagaagcuuaccauggaacuuccaauucuaaaaaccaaugcuauaacaacaauauuagcagcaguuacauuaugcuucgccucaucacaaaauaucacagaagaauuuuaccaauccacaugcucagcaguaucuaaaggguaccuaggagcccuacgaacaggaugguacacaucaguaauaacaauagaacucucaaacaucaaagaaaacaaaugcaauggaacagacgcuaaaguaaaauuaauaaaacaagaacuagacaaauacaaaaacgccgucaccgaacuucaguuacucaugcaaagcacaccugcagcaggaucagguucagcaauaugcucaggaauagcaguuugcaaaguauuacaccuagaaggugaagucaacaaaauaaaaaacgcacuucuaaguacuaacaaagcuguaguaucauuaucaaacggaguauccguacuaaccuuuaaaguccuagaccuaaaaaacuacauagacaaacaacuacucccaauacucaauaaacaauccugcucaauucccaacaucgaaacaguaauagaauuucaacaaaaaaacaaucgccuucuagaaauaacaagagaauuuucagucaacgccggaguaacaacaccaguaucaacauauaugcuaacaaacagugaacuauuauccuuaauaaacgacaugccaauaacaaaugaccaaaaaaaacuaauguccaauaauguccaaauaguaagacaacaaagcuauucaauuauguguauaauaaaagaagaaguauuagcauacguaguucaacuaccacuauauggcguuauagacacaccaugcuggaaauuacacacaagcccacuaugcacaacaaauacaaaagaaggauccaacauuugcuuaacuagaacugacagaggaugguacugcgacaacgcuggaucagucucuuucuucccacaagcagaaaccuguaaaguacaaucaaauagagucuucugcgacacaaugaacucacuaacucucccaucugaaguaaacuuaugcaacaucgauauauuuaacccaaaauacgauuguaaaauaaugacauccaaaacagacguuucaucaagcguaaucaccucccucggagcaaucguaagcugcuacgguaaaacaaaaugcacagcauccaacaaaaacagaggcaucauaaaaacauucucaaacggaugugacuauguaucaaacaaaggaguagacacaguuucaguaggcaauaccuuauacugugucaauaaacaagaaggacaaucacuauauguaaaaggagaaccuauaauaaacuucuacgacccccucgucuucccuagcgaugaauuugacgcaucaauaucgcaaguaaacgaaaaaauaaaccaaucauuagccuuuauaagaaaaucagacgaauuauuacacaacguaaacguggggaaaagcacaacuaacaucaugauaacaacuaucauaauuguaaucaucgucauccuauuacuccuaaucgcaguaggacuauuccuauacugcaaagcuagaucaacaccagucacccuaucgaaagaucaauugucaggaauaaacaauauagccuuuucaaauuaaggacuaguacuggcugcaucucccuuuccucuguccuccauccuucucccaggauggugaagggggaccugguacccagugauccccaccccaggauccuaaaucaugacuuaccugcuaauaaaaacucauuggaaaagugagaagaucuaaaaaaaaaaaaaaaaaaaaaaaaaaaaaaaaaaaaaaaaaaaaaaaaaaaaaaaaaaaaaaaaugcaucccccccccccccccccccccccccccccccaaaggcucuuuucagagccaccagaauu

SEQ ID NO: 14196 - RNA, 1956 nt, Artificial Sequence
  mRNA product Design f-5 comprising derived and/or modified sequence from HRSV(Memphis-37)__AIY60640.1__F_DSCav1_mut1 (opt11)
gggagacuuucccauucuguagcagaauuugguguugccuguggucuuggucccgcggagaagcuuaccauggaacuccccauccucaaaacgaacgccaucacaaccauccucgccgccgucacccucugcuucgcgucaucccaaaacauaacugaagaguucuaucaaucaaccugcuccgcagucucaaaaggcuaccucggcgcccuacggaccggcugguacacaagcgucaucacaauagaacuuuccaacaucaaagaaaacaaauguaacggcaccgacgcaaaagucaaacucauaaaacaagaacuagacaaauauaaaaacgccguaacugaacuacaacuccucaugcaaucaacuccugcagccgguagcggcuccgcaaucugcucaggcaucgcagucugcaaagucuuacaccuagaaggcgaagucaacaaaaucaagaacgcccuacuauccacaaacaaagcaguagucucucuauccaacggagucuccguccucacauucaaaguacucgaccuaaagaacuacaucgacaaacaacuacuaccaaucuuaaacaaacaauccugcucaaucccuaacauugaaaccgucauagaguuccaacagaaaaacaaccgccuccucgaaauaaccagagaguucucagucaacgccggcgucaccaccccggucucaaccuacaugcuaaccaacucugaacuucucagccuaaucaacgacaugcccauuaccaacgaccaaaagaaacucauguccaauaacguccaaaucguucgacaacaauccuacucaaucaugugcaucauaaaagaagaaguccuagcauacgucguccaacucccacuauacggcguaaucgacacccccugcuggaaacuccacaccuccccucucuguaccaccaacaccaaagaaggguccaacaucugccucacgcgcaccgaccgaggcugguauugcgacaaugcaggcucugucuccuucuucccccaagccgaaaccugcaaaguccaaucuaaccgcgucuucugcgacaccaugaacagucuuacccucccgucagaagucaaccucugcaacauagauaucuucaacccaaaauacgacugcaaaaucaugaccucaaaaaccgacguuuccucauccguuaucaccucccucggcgcaaucgucagcugcuacggcaagacaaagugcacggcuucaaacaaaaaccgcggaaucaucaagacauucagcaacggcugcgacuacguauccaacaaaggaguggacacagucuccguuggaaacacccucuacugcguaaacaaacaagaaggccaaucacucuacgucaaaggcgaacccaucaucaacuucuacgacccacucgucuuccccuccgacgaguucgacgccucaaucagccaagucaacgagaaaauuaaccagucacucgccuucauacgcaaauccgacgaacuucuacacaacguaaacgucggaaaaucaaccacaaacaucaugauuaccacaauuaucauagucaucauaguaauccuccugcuacucauagcagucggacucuuccuauacugcaaagcccgcuccaccccugucacccuauccaaagaccaacuuuccggcaucaacaacauagccuuuuccaacuaaggacuaguacuggcugcaucucccuuuccucuguccuccauccuucucccaggauggugaagggggaccugguacccagugauccccaccccaggauccuaaaucaugacuuaccugcuaauaaaaacucauuggaaaagugagaagaucuaaaaaaaaaaaaaaaaaaaaaaaaaaaaaaaaaaaaaaaaaaaaaaaaaaaaaaaaaaaaaaaaugcaucccccccccccccccccccccccccccccccaaaggcucuuuucagagccaccagaauu

SEQ ID NO: 14197 - RNA, 1952 nt, Artificial Sequence
  mRNA product Design g-1 comprising derived and/or modified sequence from HRSV(Memphis-37)__AIY60640.1__F_DSCav1_mut1 (opt1)
gggagacuuucccauucuguagcagaauuugguguugccuguggucuuggucccgcggagaagcuuaccauggagcugcccauccucaagaccaacgccaucaccacgauccuggccgcggugacccugugcuucgccagcucccagaacaucaccgaggaguucuaccagagcacgugcuccgccgucagcaagggcuaccucggcgcccugcgcaccgggugguacaccagcgugaucaccaucgagcuguccaacaucaaggagaacaagugcaacggcaccgacgccaaggugaagcucaucaagcaggagcuggacaaguacaagaacgcggucacggagcugcagcuccugaugcagagcaccccggccgccggcuccgggagcgcgaucugcuccggcaucgccgucugcaaggugcugcaccucgagggcgaggugaacaagaucaagaacgcccugcuguccaccaacaaggccgucgugagccucuccaacggggugagcguccugaccuucaaggugcuggaccucaagaacuacaucgacaagcagcugcugcccauccugaacaagcagagcugcuccauccccaacaucgagaccgucaucgaguuccagcagaagaacaaccgccuccuggagaucacgcgggaguucagcgugaacgcgggcgugaccacccccgucuccaccuacaugcugacgaacagcgagcuccugucccugaucaacgacaugccgaucaccaacgaccagaagaagcucaugagcaacaacgugcagaucgugcgccagcaguccuacagcaucaugugcaucaucaaggaggagguccuggccuacguggugcagcugccccucuacggggucaucgacacccccugcuggaagcugcacaccagcccccugugcacgaccaacaccaaggagggcuccaacaucugccucacccggacggaccgcgggugguacugcgacaacgccggcagcguguccuucuucccgcaggccgagaccugcaagguccagagcaaccggguguucugcgacaccaugaacucccugacccugcccagcgaggugaaccucugcaacaucgacaucuucaaccccaaguacgacugcaagaucaugacguccaagaccgacgucagcuccagcgugaucaccucccugggcgccaucgugagcugcuacgggaagaccaagugcacggcgagcaacaagaaccgcggcaucaucaagaccuucuccaacgggugcgacuacgucagcaacaagggcguggacaccguguccgucggcaacacccuguacugcgugaacaagcaggagggccagagccucuacgugaagggggagcccaucaucaacuucuacgacccgcuggucuuccccuccgacgaguucgacgccagcaucucccaggugaacgagaagaucaaccagagccuggccuucauccggaaguccgacgagcuccugcacaacgugaacgucggcaagagcaccacgaacaucaugaucaccaccaucaucaucgugaucaucgugauccugcugcuccugaucgccgucgggcuguuccucuacugcaaggcccgcuccacccccgugacgcugagcaaggaccagcuguccgggaucaacaacaucgcguucagcaacugaggacuaguggaagcauuuuccuggcugauuaaaagaaauuacucagcuauggucaucuguuccuguuagaaggcuaugcagcauauuauauacuaugcgcauguuaugaaaugcauaauaaaaaauuuuaaaaaaucuaaaagaucuaaaaaaaaaaaaaaaaaaaaaaaaaaaaaaaaaaaaaaaaaaaaaaaaaaaaaaaaaaaaaaaaugcaucccccccccccccccccccccccccccccccaaaggcucuuuucagagccaccagaauu

SEQ ID NO: 14198 - RNA, 1952 nt, Artificial Sequence
  mRNA product Design g-1 comprising derived and/or modified sequence from HRSV(Memphis-37)__AIY60640.1__F_DSCav1_mut1 (opt1)
gggagacuuucccauucuguagcagaauuugguguugccuguggucuuggucccgcggagaagcuuaccauggagcugcccauccucaagaccaacgccaucaccacgauccuggccgcggugacccugugcuucgccagcucccagaacaucaccgaggaguucuaccagagcacgugcuccgccgucagcaagggcuaccucggggcccugcgcaccggcugguacaccuccgugaucaccaucgagcugagcaacaucaaggagaacaagugcaacgggaccgacgccaaggugaagcucaucaagcaggagcuggacaaguacaagaacgcggucacggagcugcagcuccugaugcaguccaccccggccgccggcagcggguccgccaucugcagcggcaucgcggugugcaaggugcugcaccucgagggcgaggucaacaagaucaagaacgcccugcuguccaccaacaaggccguggugagccucuccaacggggucagcgugcugaccuucaaggugcuggaccucaagaacuacaucgacaagcagcugcugcccauccucaacaagcaguccugcagcauccccaacaucgagacggucaucgaguuccagcagaagaacaaccggcugcuggagaucacccgcgaguucuccgugaacgccggcgugaccacccccgucagcacguacaugcucaccaacuccgagcugcugagccucaucaacgacaugccgaucaccaacgaccagaagaagcugaugagcaacaacgugcagaucgugcggcagcaguccuacagcaucaugugcaucaucaaggaggagguccuggccuacguggugcagcucccccuguacggggucaucgacacccccugcuggaagcugcacacgagcccccucugcaccaccaacaccaaggagggcuccaacaucugccugacgcgcaccgaccgggggugguacugcgacaacgcgggcuccgugagcuucuucccgcaggccgagaccugcaaggugcaguccaaccgcgucuucugcgacaccaugaacagccugacgcuccccuccgaggugaaccugugcaacaucgacaucuucaaccccaaguacgacugcaagaucaugaccagcaagaccgacgucuccagcuccgugaucaccagccugggcgccaucguguccugcuacgggaagacgaagugcaccgccagcaacaagaaccggggcaucaucaagaccuucuccaacgggugcgacuacgucagcaacaagggcguggacaccguguccgucggcaacacgcucuacugcgugaacaagcaggaggggcagagccuguacgugaagggcgagcccaucaucaacuucuacgacccgcuggucuuccccagcgacgaguucgacgccuccaucagccaggugaacgagaagaucaaccagucccucgcguucauccgcaagagcgacgagcugcugcacaacgugaacgucgggaaguccaccaccaacaucaugaucaccaccaucaucaucgugaucaucgugauccuccugcugcucaucgccgucggccuguuccuguacugcaaggcccggagcacgcccgugacccuguccaaggaccagcucagcgggaucaacaacaucgccuucuccaacugaggacuaguggaagcauuuuccuggcugauuaaaagaaauuacucagcuauggucaucuguuccuguuagaaggcuaugcagcauauuauauacuaugcgcauguuaugaaaugcauaauaaaaaauuuuaaaaaaucuaaaagaucuaaaaaaaaaaaaaaaaaaaaaaaaaaaaaaaaaaaaaaaaaaaaaaaaaaaaaaaaaaaaaaaaugcaucccccccccccccccccccccccccccccccaaaggcucuuuucagagccaccagaauu

SEQ ID NO: 14199 - RNA, 1952 nt, Artificial Sequence
  mRNA product Design g-1 comprising derived and/or modified sequence from HRSV(Memphis-37)__AIY60640.1__F_DSCav1_mut1 (opt2)
gggagacuuucccauucuguagcagaauuugguguugccuguggucuuggucccgcggagaagcuuaccauggagcuccccauccucaagaccaacgccaucaccaccauccucgccgccgucacccucugcuucgccuccucccagaacaucaccgaggaguucuaccaguccaccugcuccgccgucuccaagggcuaccucggcgcccuccgcaccggcugguacaccuccgucaucaccaucgagcucuccaacaucaaggagaacaagugcaacggcaccgacgccaaggucaagcucaucaagcaggagcucgacaaguacaagaacgccgucaccgagcuccagcuccucaugcaguccacccccgccgccggcuccggcuccgccaucugcuccggcaucgccgucugcaagguccuccaccucgagggcgaggucaacaagaucaagaacgcccuccucuccaccaacaaggccgucgucucccucuccaacggcgucuccguccucaccuucaagguccucgaccucaagaacuacaucgacaagcagcuccuccccauccucaacaagcaguccugcuccauccccaacaucgagaccgucaucgaguuccagcagaagaacaaccgccuccucgagaucacccgcgaguucuccgucaacgccggcgucaccacccccgucuccaccuacaugcucaccaacuccgagcuccucucccucaucaacgacaugcccaucaccaacgaccagaagaagcucauguccaacaacguccagaucguccgccagcaguccuacuccaucaugugcaucaucaaggaggagguccucgccuacgucguccagcucccccucuacggcgucaucgacacccccugcuggaagcuccacaccuccccccucugcaccaccaacaccaaggagggcuccaacaucugccucacccgcaccgaccgcggcugguacugcgacaacgccggcuccgucuccuucuucccccaggccgagaccugcaagguccaguccaaccgcgucuucugcgacaccaugaacucccucacccuccccuccgaggucaaccucugcaacaucgacaucuucaaccccaaguacgacugcaagaucaugaccuccaagaccgacgucuccuccuccgucaucaccucccucggcgccaucgucuccugcuacggcaagaccaagugcaccgccuccaacaagaaccgcggcaucaucaagaccuucuccaacggcugcgacuacgucuccaacaagggcgucgacaccgucuccgucggcaacacccucuacugcgucaacaagcaggagggccagucccucuacgucaagggcgagcccaucaucaacuucuacgacccccucgucuuccccuccgacgaguucgacgccuccaucucccaggucaacgagaagaucaaccagucccucgccuucauccgcaaguccgacgagcuccuccacaacgucaacgucggcaaguccaccaccaacaucaugaucaccaccaucaucaucgucaucaucgucauccuccuccuccucaucgccgucggccucuuccucuacugcaaggcccgcuccacccccgucacccucuccaaggaccagcucuccggcaucaacaacaucgccuucuccaacugaggacuaguggaagcauuuuccuggcugauuaaaagaaauuacucagcuauggucaucuguuccuguuagaaggcuaugcagcauauuauauacuaugcgcauguuaugaaaugcauaauaaaaaauuuuaaaaaaucuaaaagaucuaaaaaaaaaaaaaaaaaaaaaaaaaaaaaaaaaaaaaaaaaaaaaaaaaaaaaaaaaaaaaaaaugcaucccccccccccccccccccccccccccccccaaaggcucuuuucagagccaccagaauu

SEQ ID NO: 14200 - RNA, 1952 nt, Artificial Sequence
  mRNA product Design g-1 comprising derived and/or modified sequence from HRSV(Memphis-37)__AIY60640.1__F_DSCav1_mut1 (opt3)
gggagacuuucccauucuguagcagaauuugguguugccuguggucuuggucccgcggagaagcuuaccauggagcugcccauccucaagaccaacgccauuacaacuauacuugcugcagugacgcugugcuucgccagcucccagaauaucaccgaagaguuuuaccaaucuacauguucagcggucaguaaaggcuauuugggggcuuuaagaacuggaugguacaccagcguuauuacaaucgaacuguccaacauuaaggagaauaaaugcaacgguaccgacgccaaggugaaacuaaucaagcaggaacucgauaaguauaaaaaugcaguaacugagcugcagcuucugaugcagucuacuccugccgcuggcucggggucagcaauauguagcggaaucgccgugugcaaggucuugcaccucgagggcgaagugaacaaaauuaagaaugcucugcugaguaccaacaaagccguugugucccucucuaauggugucagcguguuaacguucaagguacuggaccuuaagaacuacaucgauaaacaauugcugccaauucuaaauaagcaguccuguucaaucccgaacauagagacuguuauugaauuucagcagaaaaauaacaggcuccuggagaucacccgggaguucagugugaaugcgggggucacaacucccgugagcaccuauaugcuuacaaacucugaacuguugucccucauuaacgacaugccuaucaccaaugaucaaaagaaacugaugucaaacaaugugcagaucguccgccagcagagcuacaguauuaugugcauaaucaaggaggaaguuuuagcauaugugguacaacugccacucuacggagugauugacacgcccuguuggaaacuucauacuucuccucugugcacaaccaacacuaaggagggcuccaauaucuguuugacacgaaccgaucguggcugguacugcgacaacgccgggagcgucucguuuuucccacaggcugaaacguguaaggugcagucuaauagaguguuuugcgauaccaugaacucccuaacacugcccucagagguuaaucucugcaacauagacauuuucaauccuaaauaugauuguaagaucaugacaaguaaaaccgacgucagcuccucugugaucacaagccugggagccauuguaucaugcuacgguaagacuaaauguaccgcaaguaacaagaauaggggcaucauuaagacauuuuccaacgggugcgauuauguuagcaauaaaggaguggacaccgucucugugggcaacacucuuuacugugucaacaagcaagagggucagucacuguaugugaaaggggaaccaauaaucaauuucuacgacccguugguuuuucccagugaugaguucgacgcuagcauuucccaggugaacgaaaagaucaaucagucucucgccuuuauccggaaaucggaugagcuguuacacaacguaaaugucggaaagagcacgacaaacauuaugauaaccacuaucauuaucgugauuaucguuauacugcuacuccugaucgcggugggccuuuucuuguauugcaaggcccgcuccaccccugucacacugucaaaagaccaacucaguggcauuaauaacaucgcauucucuaauugaggacuaguggaagcauuuuccuggcugauuaaaagaaauuacucagcuauggucaucuguuccuguuagaaggcuaugcagcauauuauauacuaugcgcauguuaugaaaugcauaauaaaaaauuuuaaaaaaucuaaaagaucuaaaaaaaaaaaaaaaaaaaaaaaaaaaaaaaaaaaaaaaaaaaaaaaaaaaaaaaaaaaaaaaaugcaucccccccccccccccccccccccccccccccaaaggcucuuuucagagccaccagaauu

SEQ ID NO: 14201 - RNA, 1952 nt, Artificial Sequence
  mRNA product Design g-1 comprising derived and/or modified sequence from HRSV(Memphis-37)__AIY60640.1__F_DSCav1_mut1 (opt4)
gggagacuuucccauucuguagcagaauuugguguugccuguggucuuggucccgcggagaagcuuaccauggagcugcccauccugaagaccaacgccaucaccaccauccuggccgccgugacccugugcuucgccagcagccagaacaucaccgaggaguucuaccagagcaccugcagcgccgugagcaagggcuaccugggcgcccugagaaccggcugguacaccagcgugaucaccaucgagcugagcaacaucaaggagaacaagugcaacggcaccgacgccaaggugaagcugaucaagcaggagcuggacaaguacaagaacgccgugaccgagcugcagcugcugaugcagagcacccccgccgccggcagcggcagcgccaucugcagcggcaucgccgugugcaaggugcugcaccuggagggcgaggugaacaagaucaagaacgcccugcugagcaccaacaaggccguggugagccugagcaacggcgugagcgugcugaccuucaaggugcuggaccugaagaacuacaucgacaagcagcugcugcccauccugaacaagcagagcugcagcauccccaacaucgagaccgugaucgaguuccagcagaagaacaacagacugcuggagaucaccagagaguucagcgugaacgccggcgugaccacccccgugagcaccuacaugcugaccaacagcgagcugcugagccugaucaacgacaugcccaucaccaacgaccagaagaagcugaugagcaacaacgugcagaucgugagacagcagagcuacagcaucaugugcaucaucaaggaggaggugcuggccuacguggugcagcugccccuguacggcgugaucgacacccccugcuggaagcugcacaccagcccccugugcaccaccaacaccaaggagggcagcaacaucugccugaccagaaccgacagaggcugguacugcgacaacgccggcagcgugagcuucuucccccaggccgagaccugcaaggugcagagcaacagaguguucugcgacaccaugaacagccugacccugcccagcgaggugaaccugugcaacaucgacaucuucaaccccaaguacgacugcaagaucaugaccagcaagaccgacgugagcagcagcgugaucaccagccugggcgccaucgugagcugcuacggcaagaccaagugcaccgccagcaacaagaacagaggcaucaucaagaccuucagcaacggcugcgacuacgugagcaacaagggcguggacaccgugagcgugggcaacacccuguacugcgugaacaagcaggagggccagagccuguacgugaagggcgagcccaucaucaacuucuacgacccccugguguuccccagcgacgaguucgacgccagcaucagccaggugaacgagaagaucaaccagagccuggccuucaucagaaagagcgacgagcugcugcacaacgugaacgugggcaagagcaccaccaacaucaugaucaccaccaucaucaucgugaucaucgugauccugcugcugcugaucgccgugggccuguuccuguacugcaaggccagaagcacccccgugacccugagcaaggaccagcugagcggcaucaacaacaucgccuucagcaacugaggacuaguggaagcauuuuccuggcugauuaaaagaaauuacucagcuauggucaucuguuccuguuagaaggcuaugcagcauauuauauacuaugcgcauguuaugaaaugcauaauaaaaaauuuuaaaaaaucuaaaagaucuaaaaaaaaaaaaaaaaaaaaaaaaaaaaaaaaaaaaaaaaaaaaaaaaaaaaaaaaaaaaaaaaugcaucccccccccccccccccccccccccccccccaaaggcucuuuucagagccaccagaauu

SEQ ID NO: 14202 - RNA, 1952 nt, Artificial Sequence
  mRNA product Design g-1 comprising derived and/or modified sequence from HRSV(Memphis-37)__AIY60640.1__F_DSCav1_mut1 (opt5)
gggagacuuucccauucuguagcagaauuugguguugccuguggucuuggucccgcggagaagcuuaccauggagcugcccauccucaagaccaacgccauuacaacgauccuggcugccgugacccuuugcuucgcgagcucccagaauauuacagaagaguuuuaccaaucuaccuguagcgcugucuccaaaggcuaucugggggcccucagaacaggaugguacaccucuguuaucacaauugaacugagcaacaucaaggagaauaaaugcaacggcaccgacgccaaggugaaacuuaucaagcaggaacuggauaaguauaaaaaugcugugacggagcuccagcugcugaugcaguccaccccugccgcugggucuggaagcgccauuuguuccggcaucgcggucugcaaggugcuccaccuggagggggaaguuaacaaaauuaagaaugcccuucugagcacaaacaaagcuguggucucucucuccaauggagugagcguucugaccuucaaggugcuugaccugaagaacuacaucgauaaacaacuccugccgauucugaauaagcagucuuguuccauccccaacauugagacagucaucgaauuucagcagaaaaauaaccggcuccuggagaucacccgcgaguucagcgugaaugccggcgugacgacaccugucucuaccuauaugcuuacaaacuccgaacugcucagccugauuaacgacaugcccaucaccaaugaucaaaagaaacuuauguccaacaauguucagauugugagacagcagucuuacagcaucaugugcauuaucaaggaggaagugcuggcuuaugucgugcaacucccucuguacggcguuaucgacacccccuguuggaaacugcauacauccccucucugcacgaccaacacaaaggaggggagcaauauuugucugacccggacagaucgcggaugguacugcgacaacgccggcucuguguccuuuuucccgcaggcggaaaccuguaagguccagagcaauagaguguuuugcgauacgaugaacucucuuacacugcccagcgagguuaaucucugcaacaucgacauuuucaauccuaaauaugauuguaagaucaugaccuccaaaaccgacgugucuagcuccgucauuacaagccugggggccaucgugucuugcuacggaaagaccaaauguacagcuuccaacaagaaucggggcaucauuaagacguuuagcaacgggugcgauuaugucucuaauaaaggaguggacaccguuuccgugggcaacacacuuuacugugucaacaagcaagagggccagagccuguaugugaaaggggaacccaucauuaauuucuacgacccucucguuuuucccuccgaugaguucgacgccucuaucagccaggugaacgaaaagauuaaucagucccuggcuuuuauccgcaaaucugaugagcugcuccacaacgucaaugugggaaagagcaccacaaacauuaugaucaccacgaucauuaucgugauuaucguuauucugcuucugcucaucgccgucggccuguuccuguauugcaaggccagauccaccccggugacacuuagcaaagaccaacucucugggaucaauaacauugcuuucuccaauugaggacuaguggaagcauuuuccuggcugauuaaaagaaauuacucagcuauggucaucuguuccuguuagaaggcuaugcagcauauuauauacuaugcgcauguuaugaaaugcauaauaaaaaauuuuaaaaaaucuaaaagaucuaaaaaaaaaaaaaaaaaaaaaaaaaaaaaaaaaaaaaaaaaaaaaaaaaaaaaaaaaaaaaaaaugcaucccccccccccccccccccccccccccccccaaaggcucuuuucagagccaccagaauu

SEQ ID NO: 14203 - RNA, 1952 nt, Artificial Sequence
  mRNA product Design g-1 comprising derived and/or modified sequence from HRSV(Memphis-37)__AIY60640.1__F_DSCav1_mut1 (opt6)
gggagacuuucccauucuguagcagaauuugguguugccuguggucuuggucccgcggagaagcuuaccauggaacuuccaauucuaaaaaccaaugcuauaacaacaauauuagcagcaguuacauuaugcuucgccucaucacaaaauaucacagaagaauuuuaccaauccacaugcucagcaguaucuaaaggguaccuaggagcccuacgaacaggaugguacacaucaguaauaacaauagaacucucaaacaucaaagaaaacaaaugcaauggaacagacgcuaaaguaaaauuaauaaaacaagaacuagacaaauacaaaaacgccgucaccgaacuucaguuacucaugcaaagcacaccugcagcaggaucagguucagcaauaugcucaggaauagcaguuugcaaaguauuacaccuagaaggugaagucaacaaaauaaaaaacgcacuucuaaguacuaacaaagcuguaguaucauuaucaaacggaguauccguacuaaccuuuaaaguccuagaccuaaaaaacuacauagacaaacaacuacucccaauacucaauaaacaauccugcucaauucccaacaucgaaacaguaauagaauuucaacaaaaaaacaaucgccuucuagaaauaacaagagaauuuucagucaacgccggaguaacaacaccaguaucaacauauaugcuaacaaacagugaacuauuauccuuaauaaacgacaugccaauaacaaaugaccaaaaaaaacuaauguccaauaauguccaaauaguaagacaacaaagcuauucaauuauguguauaauaaaagaagaaguauuagcauacguaguucaacuaccacuauauggcguuauagacacaccaugcuggaaauuacacacaagcccacuaugcacaacaaauacaaaagaaggauccaacauuugcuuaacuagaacugacagaggaugguacugcgacaacgcuggaucagucucuuucuucccacaagcagaaaccuguaaaguacaaucaaauagagucuucugcgacacaaugaacucacuaacucucccaucugaaguaaacuuaugcaacaucgauauauuuaacccaaaauacgauuguaaaauaaugacauccaaaacagacguuucaucaagcguaaucaccucccucggagcaaucguaagcugcuacgguaaaacaaaaugcacagcauccaacaaaaacagaggcaucauaaaaacauucucaaacggaugugacuauguaucaaacaaaggaguagacacaguuucaguaggcaauaccuuauacugugucaauaaacaagaaggacaaucacuauauguaaaaggagaaccuauaauaaacuucuacgacccccucgucuucccuagcgaugaauuugacgcaucaauaucgcaaguaaacgaaaaaauaaaccaaucauuagccuuuauaagaaaaucagacgaauuauuacacaacguaaacguggggaaaagcacaacuaacaucaugauaacaacuaucauaauuguaaucaucgucauccuauuacuccuaaucgcaguaggacuauuccuauacugcaaagcuagaucaacaccagucacccuaucgaaagaucaauugucaggaauaaacaauauagccuuuucaaauuaaggacuaguggaagcauuuuccuggcugauuaaaagaaauuacucagcuauggucaucuguuccuguuagaaggcuaugcagcauauuauauacuaugcgcauguuaugaaaugcauaauaaaaaauuuuaaaaaaucuaaaagaucuaaaaaaaaaaaaaaaaaaaaaaaaaaaaaaaaaaaaaaaaaaaaaaaaaaaaaaaaaaaaaaaaugcaucccccccccccccccccccccccccccccccaaaggcucuuuucagagccaccagaauu

SEQ ID NO: 14204 - RNA, 1952 nt, Artificial Sequence
  mRNA product Design g-1 comprising derived and/or modified sequence from HRSV(Memphis-37)__AIY60640.1__F_DSCav1_mut1 (opt11)
gggagacuuucccauucuguagcagaauuugguguugccuguggucuuggucccgcggagaagcuuaccauggaacuccccauccucaaaacgaacgccaucacaaccauccucgccgccgucacccucugcuucgcgucaucccaaaacauaacugaagaguucuaucaaucaaccugcuccgcagucucaaaaggcuaccucggcgcccuacggaccggcugguacacaagcgucaucacaauagaacuuuccaacaucaaagaaaacaaauguaacggcaccgacgcaaaagucaaacucauaaaacaagaacuagacaaauauaaaaacgccguaacugaacuacaacuccucaugcaaucaacuccugcagccgguagcggcuccgcaaucugcucaggcaucgcagucugcaaagucuuacaccuagaaggcgaagucaacaaaaucaagaacgcccuacuauccacaaacaaagcaguagucucucuauccaacggagucuccguccucacauucaaaguacucgaccuaaagaacuacaucgacaaacaacuacuaccaaucuuaaacaaacaauccugcucaaucccuaacauugaaaccgucauagaguuccaacagaaaaacaaccgccuccucgaaauaaccagagaguucucagucaacgccggcgucaccaccccggucucaaccuacaugcuaaccaacucugaacuucucagccuaaucaacgacaugcccauuaccaacgaccaaaagaaacucauguccaauaacguccaaaucguucgacaacaauccuacucaaucaugugcaucauaaaagaagaaguccuagcauacgucguccaacucccacuauacggcguaaucgacacccccugcuggaaacuccacaccuccccucucuguaccaccaacaccaaagaaggguccaacaucugccucacgcgcaccgaccgaggcugguauugcgacaaugcaggcucugucuccuucuucccccaagccgaaaccugcaaaguccaaucuaaccgcgucuucugcgacaccaugaacagucuuacccucccgucagaagucaaccucugcaacauagauaucuucaacccaaaauacgacugcaaaaucaugaccucaaaaaccgacguuuccucauccguuaucaccucccucggcgcaaucgucagcugcuacggcaagacaaagugcacggcuucaaacaaaaaccgcggaaucaucaagacauucagcaacggcugcgacuacguauccaacaaaggaguggacacagucuccguuggaaacacccucuacugcguaaacaaacaagaaggccaaucacucuacgucaaaggcgaacccaucaucaacuucuacgacccacucgucuuccccuccgacgaguucgacgccucaaucagccaagucaacgagaaaauuaaccagucacucgccuucauacgcaaauccgacgaacuucuacacaacguaaacgucggaaaaucaaccacaaacaucaugauuaccacaauuaucauagucaucauaguaauccuccugcuacucauagcagucggacucuuccuauacugcaaagcccgcuccaccccugucacccuauccaaagaccaacuuuccggcaucaacaacauagccuuuuccaacuaaggacuaguggaagcauuuuccuggcugauuaaaagaaauuacucagcuauggucaucuguuccuguuagaaggcuaugcagcauauuauauacuaugcgcauguuaugaaaugcauaauaaaaaauuuuaaaaaaucuaaaagaucuaaaaaaaaaaaaaaaaaaaaaaaaaaaaaaaaaaaaaaaaaaaaaaaaaaaaaaaaaaaaaaaaugcaucccccccccccccccccccccccccccccccaaaggcucuuuucagagccaccagaauu

SEQ ID NO: 14205 - RNA, 1967 nt, Artificial Sequence
  mRNA product Design g-2 comprising derived and/or modified sequence from HRSV(Memphis-37)__AIY60640.1__F_DSCav1_mut1 (opt1)
gggagaguccgcucagccagguugcagaagcggcuuagcguguguccuaaucuucucucugcguguagguaggccugugccgcaaacaagcuuaccauggagcugcccauccucaagaccaacgccaucaccacgauccuggccgcggugacccugugcuucgccagcucccagaacaucaccgaggaguucuaccagagcacgugcuccgccgucagcaagggcuaccucggcgcccugcgcaccgggugguacaccagcgugaucaccaucgagcuguccaacaucaaggagaacaagugcaacggcaccgacgccaaggugaagcucaucaagcaggagcuggacaaguacaagaacgcggucacggagcugcagcuccugaugcagagcaccccggccgccggcuccgggagcgcgaucugcuccggcaucgccgucugcaaggugcugcaccucgagggcgaggugaacaagaucaagaacgcccugcuguccaccaacaaggccgucgugagccucuccaacggggugagcguccugaccuucaaggugcuggaccucaagaacuacaucgacaagcagcugcugcccauccugaacaagcagagcugcuccauccccaacaucgagaccgucaucgaguuccagcagaagaacaaccgccuccuggagaucacgcgggaguucagcgugaacgcgggcgugaccacccccgucuccaccuacaugcugacgaacagcgagcuccugucccugaucaacgacaugccgaucaccaacgaccagaagaagcucaugagcaacaacgugcagaucgugcgccagcaguccuacagcaucaugugcaucaucaaggaggagguccuggccuacguggugcagcugccccucuacggggucaucgacacccccugcuggaagcugcacaccagcccccugugcacgaccaacaccaaggagggcuccaacaucugccucacccggacggaccgcgggugguacugcgacaacgccggcagcguguccuucuucccgcaggccgagaccugcaagguccagagcaaccggguguucugcgacaccaugaacucccugacccugcccagcgaggugaaccucugcaacaucgacaucuucaaccccaaguacgacugcaagaucaugacguccaagaccgacgucagcuccagcgugaucaccucccugggcgccaucgugagcugcuacgggaagaccaagugcacggcgagcaacaagaaccgcggcaucaucaagaccuucuccaacgggugcgacuacgucagcaacaagggcguggacaccguguccgucggcaacacccuguacugcgugaacaagcaggagggccagagccucuacgugaagggggagcccaucaucaacuucuacgacccgcuggucuuccccuccgacgaguucgacgccagcaucucccaggugaacgagaagaucaaccagagccuggccuucauccggaaguccgacgagcuccugcacaacgugaacgucggcaagagcaccacgaacaucaugaucaccaccaucaucaucgugaucaucgugauccugcugcuccugaucgccgucgggcuguuccucuacugcaaggcccgcuccacccccgugacgcugagcaaggaccagcuguccgggaucaacaacaucgcguucagcaacugaggacuaguaauaaggaaacuguaugaaugucugugggcaggaagugaagagauccuucuguaaagguuuuuggaauuaugucugcugaauaauaaacuuuuuugaaauaauaaaucugguagaaaaaugagaucuaaaaaaaaaaaaaaaaaaaaaaaaaaaaaaaaaaaaaaaaaaaaaaaaaaaaaaaaaaaaaaaaugcaucccccccccccccccccccccccccccccccaaaggcucuuuucagagccaccagaauu

SEQ ID NO: 14206 - RNA, 1967 nt, Artificial Sequence
  mRNA product Design g-2 comprising derived and/or modified sequence from HRSV(Memphis-37)__AIY60640.1__F_DSCav1_mut1 (opt1)
gggagaguccgcucagccagguugcagaagcggcuuagcguguguccuaaucuucucucugcguguagguaggccugugccgcaaacaagcuuaccauggagcugcccauccucaagaccaacgccaucaccacgauccuggccgcggugacccugugcuucgccagcucccagaacaucaccgaggaguucuaccagagcacgugcuccgccgucagcaagggcuaccucggggcccugcgcaccggcugguacaccuccgugaucaccaucgagcugagcaacaucaaggagaacaagugcaacgggaccgacgccaaggugaagcucaucaagcaggagcuggacaaguacaagaacgcggucacggagcugcagcuccugaugcaguccaccccggccgccggcagcggguccgccaucugcagcggcaucgcggugugcaaggugcugcaccucgagggcgaggucaacaagaucaagaacgcccugcuguccaccaacaaggccguggugagccucuccaacggggucagcgugcugaccuucaaggugcuggaccucaagaacuacaucgacaagcagcugcugcccauccucaacaagcaguccugcagcauccccaacaucgagacggucaucgaguuccagcagaagaacaaccggcugcuggagaucacccgcgaguucuccgugaacgccggcgugaccacccccgucagcacguacaugcucaccaacuccgagcugcugagccucaucaacgacaugccgaucaccaacgaccagaagaagcugaugagcaacaacgugcagaucgugcggcagcaguccuacagcaucaugugcaucaucaaggaggagguccuggccuacguggugcagcucccccuguacggggucaucgacacccccugcuggaagcugcacacgagcccccucugcaccaccaacaccaaggagggcuccaacaucugccugacgcgcaccgaccgggggugguacugcgacaacgcgggcuccgugagcuucuucccgcaggccgagaccugcaaggugcaguccaaccgcgucuucugcgacaccaugaacagccugacgcuccccuccgaggugaaccugugcaacaucgacaucuucaaccccaaguacgacugcaagaucaugaccagcaagaccgacgucuccagcuccgugaucaccagccugggcgccaucguguccugcuacgggaagacgaagugcaccgccagcaacaagaaccggggcaucaucaagaccuucuccaacgggugcgacuacgucagcaacaagggcguggacaccguguccgucggcaacacgcucuacugcgugaacaagcaggaggggcagagccuguacgugaagggcgagcccaucaucaacuucuacgacccgcuggucuuccccagcgacgaguucgacgccuccaucagccaggugaacgagaagaucaaccagucccucgcguucauccgcaagagcgacgagcugcugcacaacgugaacgucgggaaguccaccaccaacaucaugaucaccaccaucaucaucgugaucaucgugauccuccugcugcucaucgccgucggccuguuccuguacugcaaggcccggagcacgcccgugacccuguccaaggaccagcucagcgggaucaacaacaucgccuucuccaacugaggacuaguaauaaggaaacuguaugaaugucugugggcaggaagugaagagauccuucuguaaagguuuuuggaauuaugucugcugaauaauaaacuuuuuugaaauaauaaaucugguagaaaaaugagaucuaaaaaaaaaaaaaaaaaaaaaaaaaaaaaaaaaaaaaaaaaaaaaaaaaaaaaaaaaaaaaaaaugcaucccccccccccccccccccccccccccccccaaaggcucuuuucagagccaccagaauu

SEQ ID NO: 14207 - RNA, 1967 nt, Artificial Sequence
  mRNA product Design g-2 comprising derived and/or modified sequence from HRSV(Memphis-37)__AIY60640.1__F_DSCav1_mut1 (opt2)
gggagaguccgcucagccagguugcagaagcggcuuagcguguguccuaaucuucucucugcguguagguaggccugugccgcaaacaagcuuaccauggagcuccccauccucaagaccaacgccaucaccaccauccucgccgccgucacccucugcuucgccuccucccagaacaucaccgaggaguucuaccaguccaccugcuccgccgucuccaagggcuaccucggcgcccuccgcaccggcugguacaccuccgucaucaccaucgagcucuccaacaucaaggagaacaagugcaacggcaccgacgccaaggucaagcucaucaagcaggagcucgacaaguacaagaacgccgucaccgagcuccagcuccucaugcaguccacccccgccgccggcuccggcuccgccaucugcuccggcaucgccgucugcaagguccuccaccucgagggcgaggucaacaagaucaagaacgcccuccucuccaccaacaaggccgucgucucccucuccaacggcgucuccguccucaccuucaagguccucgaccucaagaacuacaucgacaagcagcuccuccccauccucaacaagcaguccugcuccauccccaacaucgagaccgucaucgaguuccagcagaagaacaaccgccuccucgagaucacccgcgaguucuccgucaacgccggcgucaccacccccgucuccaccuacaugcucaccaacuccgagcuccucucccucaucaacgacaugcccaucaccaacgaccagaagaagcucauguccaacaacguccagaucguccgccagcaguccuacuccaucaugugcaucaucaaggaggagguccucgccuacgucguccagcucccccucuacggcgucaucgacacccccugcuggaagcuccacaccuccccccucugcaccaccaacaccaaggagggcuccaacaucugccucacccgcaccgaccgcggcugguacugcgacaacgccggcuccgucuccuucuucccccaggccgagaccugcaagguccaguccaaccgcgucuucugcgacaccaugaacucccucacccuccccuccgaggucaaccucugcaacaucgacaucuucaaccccaaguacgacugcaagaucaugaccuccaagaccgacgucuccuccuccgucaucaccucccucggcgccaucgucuccugcuacggcaagaccaagugcaccgccuccaacaagaaccgcggcaucaucaagaccuucuccaacggcugcgacuacgucuccaacaagggcgucgacaccgucuccgucggcaacacccucuacugcgucaacaagcaggagggccagucccucuacgucaagggcgagcccaucaucaacuucuacgacccccucgucuuccccuccgacgaguucgacgccuccaucucccaggucaacgagaagaucaaccagucccucgccuucauccgcaaguccgacgagcuccuccacaacgucaacgucggcaaguccaccaccaacaucaugaucaccaccaucaucaucgucaucaucgucauccuccuccuccucaucgccgucggccucuuccucuacugcaaggcccgcuccacccccgucacccucuccaaggaccagcucuccggcaucaacaacaucgccuucuccaacugaggacuaguaauaaggaaacuguaugaaugucugugggcaggaagugaagagauccuucuguaaagguuuuuggaauuaugucugcugaauaauaaacuuuuuugaaauaauaaaucugguagaaaaaugagaucuaaaaaaaaaaaaaaaaaaaaaaaaaaaaaaaaaaaaaaaaaaaaaaaaaaaaaaaaaaaaaaaaugcaucccccccccccccccccccccccccccccccaaaggcucuuuucagagccaccagaauu

SEQ ID NO: 14208 - RNA, 1967 nt, Artificial Sequence
  mRNA product Design g-2 comprising derived and/or modified sequence from HRSV(Memphis-37)__AIY60640.1__F_DSCav1_mut1 (opt3)
gggagaguccgcucagccagguugcagaagcggcuuagcguguguccuaaucuucucucugcguguagguaggccugugccgcaaacaagcuuaccauggagcugcccauccucaagaccaacgccauuacaacuauacuugcugcagugacgcugugcuucgccagcucccagaauaucaccgaagaguuuuaccaaucuacauguucagcggucaguaaaggcuauuugggggcuuuaagaacuggaugguacaccagcguuauuacaaucgaacuguccaacauuaaggagaauaaaugcaacgguaccgacgccaaggugaaacuaaucaagcaggaacucgauaaguauaaaaaugcaguaacugagcugcagcuucugaugcagucuacuccugccgcuggcucggggucagcaauauguagcggaaucgccgugugcaaggucuugcaccucgagggcgaagugaacaaaauuaagaaugcucugcugaguaccaacaaagccguugugucccucucuaauggugucagcguguuaacguucaagguacuggaccuuaagaacuacaucgauaaacaauugcugccaauucuaaauaagcaguccuguucaaucccgaacauagagacuguuauugaauuucagcagaaaaauaacaggcuccuggagaucacccgggaguucagugugaaugcgggggucacaacucccgugagcaccuauaugcuuacaaacucugaacuguugucccucauuaacgacaugccuaucaccaaugaucaaaagaaacugaugucaaacaaugugcagaucguccgccagcagagcuacaguauuaugugcauaaucaaggaggaaguuuuagcauaugugguacaacugccacucuacggagugauugacacgcccuguuggaaacuucauacuucuccucugugcacaaccaacacuaaggagggcuccaauaucuguuugacacgaaccgaucguggcugguacugcgacaacgccgggagcgucucguuuuucccacaggcugaaacguguaaggugcagucuaauagaguguuuugcgauaccaugaacucccuaacacugcccucagagguuaaucucugcaacauagacauuuucaauccuaaauaugauuguaagaucaugacaaguaaaaccgacgucagcuccucugugaucacaagccugggagccauuguaucaugcuacgguaagacuaaauguaccgcaaguaacaagaauaggggcaucauuaagacauuuuccaacgggugcgauuauguuagcaauaaaggaguggacaccgucucugugggcaacacucuuuacugugucaacaagcaagagggucagucacuguaugugaaaggggaaccaauaaucaauuucuacgacccguugguuuuucccagugaugaguucgacgcuagcauuucccaggugaacgaaaagaucaaucagucucucgccuuuauccggaaaucggaugagcuguuacacaacguaaaugucggaaagagcacgacaaacauuaugauaaccacuaucauuaucgugauuaucguuauacugcuacuccugaucgcggugggccuuuucuuguauugcaaggcccgcuccaccccugucacacugucaaaagaccaacucaguggcauuaauaacaucgcauucucuaauugaggacuaguaauaaggaaacuguaugaaugucugugggcaggaagugaagagauccuucuguaaagguuuuuggaauuaugucugcugaauaauaaacuuuuuugaaauaauaaaucugguagaaaaaugagaucuaaaaaaaaaaaaaaaaaaaaaaaaaaaaaaaaaaaaaaaaaaaaaaaaaaaaaaaaaaaaaaaaugcaucccccccccccccccccccccccccccccccaaaggcucuuuucagagccaccagaauu

SEQ ID NO: 14209 - RNA, 1967 nt, Artificial Sequence
  mRNA product Design g-2 comprising derived and/or modified sequence from HRSV(Memphis-37)__AIY60640.1__F_DSCav1_mut1 (opt4)
gggagaguccgcucagccagguugcagaagcggcuuagcguguguccuaaucuucucucugcguguagguaggccugugccgcaaacaagcuuaccauggagcugcccauccugaagaccaacgccaucaccaccauccuggccgccgugacccugugcuucgccagcagccagaacaucaccgaggaguucuaccagagcaccugcagcgccgugagcaagggcuaccugggcgcccugagaaccggcugguacaccagcgugaucaccaucgagcugagcaacaucaaggagaacaagugcaacggcaccgacgccaaggugaagcugaucaagcaggagcuggacaaguacaagaacgccgugaccgagcugcagcugcugaugcagagcacccccgccgccggcagcggcagcgccaucugcagcggcaucgccgugugcaaggugcugcaccuggagggcgaggugaacaagaucaagaacgcccugcugagcaccaacaaggccguggugagccugagcaacggcgugagcgugcugaccuucaaggugcuggaccugaagaacuacaucgacaagcagcugcugcccauccugaacaagcagagcugcagcauccccaacaucgagaccgugaucgaguuccagcagaagaacaacagacugcuggagaucaccagagaguucagcgugaacgccggcgugaccacccccgugagcaccuacaugcugaccaacagcgagcugcugagccugaucaacgacaugcccaucaccaacgaccagaagaagcugaugagcaacaacgugcagaucgugagacagcagagcuacagcaucaugugcaucaucaaggaggaggugcuggccuacguggugcagcugccccuguacggcgugaucgacacccccugcuggaagcugcacaccagcccccugugcaccaccaacaccaaggagggcagcaacaucugccugaccagaaccgacagaggcugguacugcgacaacgccggcagcgugagcuucuucccccaggccgagaccugcaaggugcagagcaacagaguguucugcgacaccaugaacagccugacccugcccagcgaggugaaccugugcaacaucgacaucuucaaccccaaguacgacugcaagaucaugaccagcaagaccgacgugagcagcagcgugaucaccagccugggcgccaucgugagcugcuacggcaagaccaagugcaccgccagcaacaagaacagaggcaucaucaagaccuucagcaacggcugcgacuacgugagcaacaagggcguggacaccgugagcgugggcaacacccuguacugcgugaacaagcaggagggccagagccuguacgugaagggcgagcccaucaucaacuucuacgacccccugguguuccccagcgacgaguucgacgccagcaucagccaggugaacgagaagaucaaccagagccuggccuucaucagaaagagcgacgagcugcugcacaacgugaacgugggcaagagcaccaccaacaucaugaucaccaccaucaucaucgugaucaucgugauccugcugcugcugaucgccgugggccuguuccuguacugcaaggccagaagcacccccgugacccugagcaaggaccagcugagcggcaucaacaacaucgccuucagcaacugaggacuaguaauaaggaaacuguaugaaugucugugggcaggaagugaagagauccuucuguaaagguuuuuggaauuaugucugcugaauaauaaacuuuuuugaaauaauaaaucugguagaaaaaugagaucuaaaaaaaaaaaaaaaaaaaaaaaaaaaaaaaaaaaaaaaaaaaaaaaaaaaaaaaaaaaaaaaaugcaucccccccccccccccccccccccccccccccaaaggcucuuuucagagccaccagaauu

SEQ ID NO: 14210 - RNA, 1967 nt, Artificial Sequence
  mRNA product Design g-2 comprising derived and/or modified sequence from HRSV(Memphis-37)__AIY60640.1__F_DSCav1_mut1 (opt5)
gggagaguccgcucagccagguugcagaagcggcuuagcguguguccuaaucuucucucugcguguagguaggccugugccgcaaacaagcuuaccauggagcugcccauccucaagaccaacgccauuacaacgauccuggcugccgugacccuuugcuucgcgagcucccagaauauuacagaagaguuuuaccaaucuaccuguagcgcugucuccaaaggcuaucugggggcccucagaacaggaugguacaccucuguuaucacaauugaacugagcaacaucaaggagaauaaaugcaacggcaccgacgccaaggugaaacuuaucaagcaggaacuggauaaguauaaaaaugcugugacggagcuccagcugcugaugcaguccaccccugccgcugggucuggaagcgccauuuguuccggcaucgcggucugcaaggugcuccaccuggagggggaaguuaacaaaauuaagaaugcccuucugagcacaaacaaagcuguggucucucucuccaauggagugagcguucugaccuucaaggugcuugaccugaagaacuacaucgauaaacaacuccugccgauucugaauaagcagucuuguuccauccccaacauugagacagucaucgaauuucagcagaaaaauaaccggcuccuggagaucacccgcgaguucagcgugaaugccggcgugacgacaccugucucuaccuauaugcuuacaaacuccgaacugcucagccugauuaacgacaugcccaucaccaaugaucaaaagaaacuuauguccaacaauguucagauugugagacagcagucuuacagcaucaugugcauuaucaaggaggaagugcuggcuuaugucgugcaacucccucuguacggcguuaucgacacccccuguuggaaacugcauacauccccucucugcacgaccaacacaaaggaggggagcaauauuugucugacccggacagaucgcggaugguacugcgacaacgccggcucuguguccuuuuucccgcaggcggaaaccuguaagguccagagcaauagaguguuuugcgauacgaugaacucucuuacacugcccagcgagguuaaucucugcaacaucgacauuuucaauccuaaauaugauuguaagaucaugaccuccaaaaccgacgugucuagcuccgucauuacaagccugggggccaucgugucuugcuacggaaagaccaaauguacagcuuccaacaagaaucggggcaucauuaagacguuuagcaacgggugcgauuaugucucuaauaaaggaguggacaccguuuccgugggcaacacacuuuacugugucaacaagcaagagggccagagccuguaugugaaaggggaacccaucauuaauuucuacgacccucucguuuuucccuccgaugaguucgacgccucuaucagccaggugaacgaaaagauuaaucagucccuggcuuuuauccgcaaaucugaugagcugcuccacaacgucaaugugggaaagagcaccacaaacauuaugaucaccacgaucauuaucgugauuaucguuauucugcuucugcucaucgccgucggccuguuccuguauugcaaggccagauccaccccggugacacuuagcaaagaccaacucucugggaucaauaacauugcuuucuccaauugaggacuaguaauaaggaaacuguaugaaugucugugggcaggaagugaagagauccuucuguaaagguuuuuggaauuaugucugcugaauaauaaacuuuuuugaaauaauaaaucugguagaaaaaugagaucuaaaaaaaaaaaaaaaaaaaaaaaaaaaaaaaaaaaaaaaaaaaaaaaaaaaaaaaaaaaaaaaaugcaucccccccccccccccccccccccccccccccaaaggcucuuuucagagccaccagaauu

SEQ ID NO: 14211 - RNA, 1967 nt, Artificial Sequence
  mRNA product Design g-2 comprising derived and/or modified sequence from HRSV(Memphis-37)__AIY60640.1__F_DSCav1_mut1 (opt6)
gggagaguccgcucagccagguugcagaagcggcuuagcguguguccuaaucuucucucugcguguagguaggccugugccgcaaacaagcuuaccauggaacuuccaauucuaaaaaccaaugcuauaacaacaauauuagcagcaguuacauuaugcuucgccucaucacaaaauaucacagaagaauuuuaccaauccacaugcucagcaguaucuaaaggguaccuaggagcccuacgaacaggaugguacacaucaguaauaacaauagaacucucaaacaucaaagaaaacaaaugcaauggaacagacgcuaaaguaaaauuaauaaaacaagaacuagacaaauacaaaaacgccgucaccgaacuucaguuacucaugcaaagcacaccugcagcaggaucagguucagcaauaugcucaggaauagcaguuugcaaaguauuacaccuagaaggugaagucaacaaaauaaaaaacgcacuucuaaguacuaacaaagcuguaguaucauuaucaaacggaguauccguacuaaccuuuaaaguccuagaccuaaaaaacuacauagacaaacaacuacucccaauacucaauaaacaauccugcucaauucccaacaucgaaacaguaauagaauuucaacaaaaaaacaaucgccuucuagaaauaacaagagaauuuucagucaacgccggaguaacaacaccaguaucaacauauaugcuaacaaacagugaacuauuauccuuaauaaacgacaugccaauaacaaaugaccaaaaaaaacuaauguccaauaauguccaaauaguaagacaacaaagcuauucaauuauguguauaauaaaagaagaaguauuagcauacguaguucaacuaccacuauauggcguuauagacacaccaugcuggaaauuacacacaagcccacuaugcacaacaaauacaaaagaaggauccaacauuugcuuaacuagaacugacagaggaugguacugcgacaacgcuggaucagucucuuucuucccacaagcagaaaccuguaaaguacaaucaaauagagucuucugcgacacaaugaacucacuaacucucccaucugaaguaaacuuaugcaacaucgauauauuuaacccaaaauacgauuguaaaauaaugacauccaaaacagacguuucaucaagcguaaucaccucccucggagcaaucguaagcugcuacgguaaaacaaaaugcacagcauccaacaaaaacagaggcaucauaaaaacauucucaaacggaugugacuauguaucaaacaaaggaguagacacaguuucaguaggcaauaccuuauacugugucaauaaacaagaaggacaaucacuauauguaaaaggagaaccuauaauaaacuucuacgacccccucgucuucccuagcgaugaauuugacgcaucaauaucgcaaguaaacgaaaaaauaaaccaaucauuagccuuuauaagaaaaucagacgaauuauuacacaacguaaacguggggaaaagcacaacuaacaucaugauaacaacuaucauaauuguaaucaucgucauccuauuacuccuaaucgcaguaggacuauuccuauacugcaaagcuagaucaacaccagucacccuaucgaaagaucaauugucaggaauaaacaauauagccuuuucaaauuaaggacuaguaauaaggaaacuguaugaaugucugugggcaggaagugaagagauccuucuguaaagguuuuuggaauuaugucugcugaauaauaaacuuuuuugaaauaauaaaucugguagaaaaaugagaucuaaaaaaaaaaaaaaaaaaaaaaaaaaaaaaaaaaaaaaaaaaaaaaaaaaaaaaaaaaaaaaaaugcaucccccccccccccccccccccccccccccccaaaggcucuuuucagagccaccagaauu

SEQ ID NO: 14212 - RNA, 1967 nt, Artificial Sequence
  mRNA product Design g-2 comprising derived and/or modified sequence from HRSV(Memphis-37)__AIY60640.1__F_DSCav1_mut1 (opt11)
gggagaguccgcucagccagguugcagaagcggcuuagcguguguccuaaucuucucucugcguguagguaggccugugccgcaaacaagcuuaccauggaacuccccauccucaaaacgaacgccaucacaaccauccucgccgccgucacccucugcuucgcgucaucccaaaacauaacugaagaguucuaucaaucaaccugcuccgcagucucaaaaggcuaccucggcgcccuacggaccggcugguacacaagcgucaucacaauagaacuuuccaacaucaaagaaaacaaauguaacggcaccgacgcaaaagucaaacucauaaaacaagaacuagacaaauauaaaaacgccguaacugaacuacaacuccucaugcaaucaacuccugcagccgguagcggcuccgcaaucugcucaggcaucgcagucugcaaagucuuacaccuagaaggcgaagucaacaaaaucaagaacgcccuacuauccacaaacaaagcaguagucucucuauccaacggagucuccguccucacauucaaaguacucgaccuaaagaacuacaucgacaaacaacuacuaccaaucuuaaacaaacaauccugcucaaucccuaacauugaaaccgucauagaguuccaacagaaaaacaaccgccuccucgaaauaaccagagaguucucagucaacgccggcgucaccaccccggucucaaccuacaugcuaaccaacucugaacuucucagccuaaucaacgacaugcccauuaccaacgaccaaaagaaacucauguccaauaacguccaaaucguucgacaacaauccuacucaaucaugugcaucauaaaagaagaaguccuagcauacgucguccaacucccacuauacggcguaaucgacacccccugcuggaaacuccacaccuccccucucuguaccaccaacaccaaagaaggguccaacaucugccucacgcgcaccgaccgaggcugguauugcgacaaugcaggcucugucuccuucuucccccaagccgaaaccugcaaaguccaaucuaaccgcgucuucugcgacaccaugaacagucuuacccucccgucagaagucaaccucugcaacauagauaucuucaacccaaaauacgacugcaaaaucaugaccucaaaaaccgacguuuccucauccguuaucaccucccucggcgcaaucgucagcugcuacggcaagacaaagugcacggcuucaaacaaaaaccgcggaaucaucaagacauucagcaacggcugcgacuacguauccaacaaaggaguggacacagucuccguuggaaacacccucuacugcguaaacaaacaagaaggccaaucacucuacgucaaaggcgaacccaucaucaacuucuacgacccacucgucuuccccuccgacgaguucgacgccucaaucagccaagucaacgagaaaauuaaccagucacucgccuucauacgcaaauccgacgaacuucuacacaacguaaacgucggaaaaucaaccacaaacaucaugauuaccacaauuaucauagucaucauaguaauccuccugcuacucauagcagucggacucuuccuauacugcaaagcccgcuccaccccugucacccuauccaaagaccaacuuuccggcaucaacaacauagccuuuuccaacuaaggacuaguaauaaggaaacuguaugaaugucugugggcaggaagugaagagauccuucuguaaagguuuuuggaauuaugucugcugaauaauaaacuuuuuugaaauaauaaaucugguagaaaaaugagaucuaaaaaaaaaaaaaaaaaaaaaaaaaaaaaaaaaaaaaaaaaaaaaaaaaaaaaaaaaaaaaaaaugcaucccccccccccccccccccccccccccccccaaaggcucuuuucagagccaccagaauu

SEQ ID NO: 14213 - RNA, 2199 nt, Artificial Sequence
  mRNA product Design g-3 comprising derived and/or modified sequence from HRSV(Memphis-37)__AIY60640.1__F_DSCav1_mut1 (opt1)
gggagaguccgcucagccagguugcagaagcggcuuagcguguguccuaaucuucucucugcguguagguaggccugugccgcaaacaagcuuaccauggagcugcccauccucaagaccaacgccaucaccacgauccuggccgcggugacccugugcuucgccagcucccagaacaucaccgaggaguucuaccagagcacgugcuccgccgucagcaagggcuaccucggcgcccugcgcaccgggugguacaccagcgugaucaccaucgagcuguccaacaucaaggagaacaagugcaacggcaccgacgccaaggugaagcucaucaagcaggagcuggacaaguacaagaacgcggucacggagcugcagcuccugaugcagagcaccccggccgccggcuccgggagcgcgaucugcuccggcaucgccgucugcaaggugcugcaccucgagggcgaggugaacaagaucaagaacgcccugcuguccaccaacaaggccgucgugagccucuccaacggggugagcguccugaccuucaaggugcuggaccucaagaacuacaucgacaagcagcugcugcccauccugaacaagcagagcugcuccauccccaacaucgagaccgucaucgaguuccagcagaagaacaaccgccuccuggagaucacgcgggaguucagcgugaacgcgggcgugaccacccccgucuccaccuacaugcugacgaacagcgagcuccugucccugaucaacgacaugccgaucaccaacgaccagaagaagcucaugagcaacaacgugcagaucgugcgccagcaguccuacagcaucaugugcaucaucaaggaggagguccuggccuacguggugcagcugccccucuacggggucaucgacacccccugcuggaagcugcacaccagcccccugugcacgaccaacaccaaggagggcuccaacaucugccucacccggacggaccgcgggugguacugcgacaacgccggcagcguguccuucuucccgcaggccgagaccugcaagguccagagcaaccggguguucugcgacaccaugaacucccugacccugcccagcgaggugaaccucugcaacaucgacaucuucaaccccaaguacgacugcaagaucaugacguccaagaccgacgucagcuccagcgugaucaccucccugggcgccaucgugagcugcuacgggaagaccaagugcacggcgagcaacaagaaccgcggcaucaucaagaccuucuccaacgggugcgacuacgucagcaacaagggcguggacaccguguccgucggcaacacccuguacugcgugaacaagcaggagggccagagccucuacgugaagggggagcccaucaucaacuucuacgacccgcuggucuuccccuccgacgaguucgacgccagcaucucccaggugaacgagaagaucaaccagagccuggccuucauccggaaguccgacgagcuccugcacaacgugaacgucggcaagagcaccacgaacaucaugaucaccaccaucaucaucgugaucaucgugauccugcugcuccugaucgccgucgggcuguuccucuacugcaaggcccgcuccacccccgugacgcugagcaaggaccagcuguccgggaucaacaacaucgcguucagcaacugaggacuagugaagggaacacccaaauuuaauucagccuuaagcacaauuaauuaagagugaaacguaauuguacaagcaguuggucacccaccauagggcaugaucaacaccgcaaccuuuccuuuuucccccagugauucugaaaaaccccucuucccuucagcuugcuuagauguuccaaauuuaguaagcuuaaggcggccuacagaagaaaaagaaaaaaaaggccacaaaaguucccucucacuuucaguaaauaaaauaaaagcagcaacagaaauaaagaaauaaaugaaauucaaaaugaaauaaauauuguguugugcagcauuaaaaaaucaauaaaaauuaaaaaugagcaagaucuaaaaaaaaaaaaaaaaaaaaaaaaaaaaaaaaaaaaaaaaaaaaaaaaaaaaaaaaaaaaaaaaugcaucccccccccccccccccccccccccccccccaaaggcucuuuucagagccaccagaauu

SEQ ID NO: 14214 - RNA, 2199 nt, Artificial Sequence
  mRNA product Design g-3 comprising derived and/or modified sequence from HRSV(Memphis-37)__AIY60640.1__F_DSCav1_mut1 (opt1)
gggagaguccgcucagccagguugcagaagcggcuuagcguguguccuaaucuucucucugcguguagguaggccugugccgcaaacaagcuuaccauggagcugcccauccucaagaccaacgccaucaccacgauccuggccgcggugacccugugcuucgccagcucccagaacaucaccgaggaguucuaccagagcacgugcuccgccgucagcaagggcuaccucggggcccugcgcaccggcugguacaccuccgugaucaccaucgagcugagcaacaucaaggagaacaagugcaacgggaccgacgccaaggugaagcucaucaagcaggagcuggacaaguacaagaacgcggucacggagcugcagcuccugaugcaguccaccccggccgccggcagcggguccgccaucugcagcggcaucgcggugugcaaggugcugcaccucgagggcgaggucaacaagaucaagaacgcccugcuguccaccaacaaggccguggugagccucuccaacggggucagcgugcugaccuucaaggugcuggaccucaagaacuacaucgacaagcagcugcugcccauccucaacaagcaguccugcagcauccccaacaucgagacggucaucgaguuccagcagaagaacaaccggcugcuggagaucacccgcgaguucuccgugaacgccggcgugaccacccccgucagcacguacaugcucaccaacuccgagcugcugagccucaucaacgacaugccgaucaccaacgaccagaagaagcugaugagcaacaacgugcagaucgugcggcagcaguccuacagcaucaugugcaucaucaaggaggagguccuggccuacguggugcagcucccccuguacggggucaucgacacccccugcuggaagcugcacacgagcccccucugcaccaccaacaccaaggagggcuccaacaucugccugacgcgcaccgaccgggggugguacugcgacaacgcgggcuccgugagcuucuucccgcaggccgagaccugcaaggugcaguccaaccgcgucuucugcgacaccaugaacagccugacgcuccccuccgaggugaaccugugcaacaucgacaucuucaaccccaaguacgacugcaagaucaugaccagcaagaccgacgucuccagcuccgugaucaccagccugggcgccaucguguccugcuacgggaagacgaagugcaccgccagcaacaagaaccggggcaucaucaagaccuucuccaacgggugcgacuacgucagcaacaagggcguggacaccguguccgucggcaacacgcucuacugcgugaacaagcaggaggggcagagccuguacgugaagggcgagcccaucaucaacuucuacgacccgcuggucuuccccagcgacgaguucgacgccuccaucagccaggugaacgagaagaucaaccagucccucgcguucauccgcaagagcgacgagcugcugcacaacgugaacgucgggaaguccaccaccaacaucaugaucaccaccaucaucaucgugaucaucgugauccuccugcugcucaucgccgucggccuguuccuguacugcaaggcccggagcacgcccgugacccuguccaaggaccagcucagcgggaucaacaacaucgccuucuccaacugaggacuagugaagggaacacccaaauuuaauucagccuuaagcacaauuaauuaagagugaaacguaauuguacaagcaguuggucacccaccauagggcaugaucaacaccgcaaccuuuccuuuuucccccagugauucugaaaaaccccucuucccuucagcuugcuuagauguuccaaauuuaguaagcuuaaggcggccuacagaagaaaaagaaaaaaaaggccacaaaaguucccucucacuuucaguaaauaaaauaaaagcagcaacagaaauaaagaaauaaaugaaauucaaaaugaaauaaauauuguguugugcagcauuaaaaaaucaauaaaaauuaaaaaugagcaagaucuaaaaaaaaaaaaaaaaaaaaaaaaaaaaaaaaaaaaaaaaaaaaaaaaaaaaaaaaaaaaaaaaugcaucccccccccccccccccccccccccccccccaaaggcucuuuucagagccaccagaauu

SEQ ID NO: 14215 - RNA, 2199 nt, Artificial Sequence
  mRNA product Design g-3 comprising derived and/or modified sequence from HRSV(Memphis-37)__AIY60640.1__F_DSCav1_mut1 (opt2)
gggagaguccgcucagccagguugcagaagcggcuuagcguguguccuaaucuucucucugcguguagguaggccugugccgcaaacaagcuuaccauggagcuccccauccucaagaccaacgccaucaccaccauccucgccgccgucacccucugcuucgccuccucccagaacaucaccgaggaguucuaccaguccaccugcuccgccgucuccaagggcuaccucggcgcccuccgcaccggcugguacaccuccgucaucaccaucgagcucuccaacaucaaggagaacaagugcaacggcaccgacgccaaggucaagcucaucaagcaggagcucgacaaguacaagaacgccgucaccgagcuccagcuccucaugcaguccacccccgccgccggcuccggcuccgccaucugcuccggcaucgccgucugcaagguccuccaccucgagggcgaggucaacaagaucaagaacgcccuccucuccaccaacaaggccgucgucucccucuccaacggcgucuccguccucaccuucaagguccucgaccucaagaacuacaucgacaagcagcuccuccccauccucaacaagcaguccugcuccauccccaacaucgagaccgucaucgaguuccagcagaagaacaaccgccuccucgagaucacccgcgaguucuccgucaacgccggcgucaccacccccgucuccaccuacaugcucaccaacuccgagcuccucucccucaucaacgacaugcccaucaccaacgaccagaagaagcucauguccaacaacguccagaucguccgccagcaguccuacuccaucaugugcaucaucaaggaggagguccucgccuacgucguccagcucccccucuacggcgucaucgacacccccugcuggaagcuccacaccuccccccucugcaccaccaacaccaaggagggcuccaacaucugccucacccgcaccgaccgcggcugguacugcgacaacgccggcuccgucuccuucuucccccaggccgagaccugcaagguccaguccaaccgcgucuucugcgacaccaugaacucccucacccuccccuccgaggucaaccucugcaacaucgacaucuucaaccccaaguacgacugcaagaucaugaccuccaagaccgacgucuccuccuccgucaucaccucccucggcgccaucgucuccugcuacggcaagaccaagugcaccgccuccaacaagaaccgcggcaucaucaagaccuucuccaacggcugcgacuacgucuccaacaagggcgucgacaccgucuccgucggcaacacccucuacugcgucaacaagcaggagggccagucccucuacgucaagggcgagcccaucaucaacuucuacgacccccucgucuuccccuccgacgaguucgacgccuccaucucccaggucaacgagaagaucaaccagucccucgccuucauccgcaaguccgacgagcuccuccacaacgucaacgucggcaaguccaccaccaacaucaugaucaccaccaucaucaucgucaucaucgucauccuccuccuccucaucgccgucggccucuuccucuacugcaaggcccgcuccacccccgucacccucuccaaggaccagcucuccggcaucaacaacaucgccuucuccaacugaggacuagugaagggaacacccaaauuuaauucagccuuaagcacaauuaauuaagagugaaacguaauuguacaagcaguuggucacccaccauagggcaugaucaacaccgcaaccuuuccuuuuucccccagugauucugaaaaaccccucuucccuucagcuugcuuagauguuccaaauuuaguaagcuuaaggcggccuacagaagaaaaagaaaaaaaaggccacaaaaguucccucucacuuucaguaaauaaaauaaaagcagcaacagaaauaaagaaauaaaugaaauucaaaaugaaauaaauauuguguugugcagcauuaaaaaaucaauaaaaauuaaaaaugagcaagaucuaaaaaaaaaaaaaaaaaaaaaaaaaaaaaaaaaaaaaaaaaaaaaaaaaaaaaaaaaaaaaaaaugcaucccccccccccccccccccccccccccccccaaaggcucuuuucagagccaccagaauu

SEQ ID NO: 14216 - RNA, 2199 nt, Artificial Sequence
  mRNA product Design g-3 comprising derived and/or modified sequence from HRSV(Memphis-37)__AIY60640.1__F_DSCav1_mut1 (opt3)
gggagaguccgcucagccagguugcagaagcggcuuagcguguguccuaaucuucucucugcguguagguaggccugugccgcaaacaagcuuaccauggagcugcccauccucaagaccaacgccauuacaacuauacuugcugcagugacgcugugcuucgccagcucccagaauaucaccgaagaguuuuaccaaucuacauguucagcggucaguaaaggcuauuugggggcuuuaagaacuggaugguacaccagcguuauuacaaucgaacuguccaacauuaaggagaauaaaugcaacgguaccgacgccaaggugaaacuaaucaagcaggaacucgauaaguauaaaaaugcaguaacugagcugcagcuucugaugcagucuacuccugccgcuggcucggggucagcaauauguagcggaaucgccgugugcaaggucuugcaccucgagggcgaagugaacaaaauuaagaaugcucugcugaguaccaacaaagccguugugucccucucuaauggugucagcguguuaacguucaagguacuggaccuuaagaacuacaucgauaaacaauugcugccaauucuaaauaagcaguccuguucaaucccgaacauagagacuguuauugaauuucagcagaaaaauaacaggcuccuggagaucacccgggaguucagugugaaugcgggggucacaacucccgugagcaccuauaugcuuacaaacucugaacuguugucccucauuaacgacaugccuaucaccaaugaucaaaagaaacugaugucaaacaaugugcagaucguccgccagcagagcuacaguauuaugugcauaaucaaggaggaaguuuuagcauaugugguacaacugccacucuacggagugauugacacgcccuguuggaaacuucauacuucuccucugugcacaaccaacacuaaggagggcuccaauaucuguuugacacgaaccgaucguggcugguacugcgacaacgccgggagcgucucguuuuucccacaggcugaaacguguaaggugcagucuaauagaguguuuugcgauaccaugaacucccuaacacugcccucagagguuaaucucugcaacauagacauuuucaauccuaaauaugauuguaagaucaugacaaguaaaaccgacgucagcuccucugugaucacaagccugggagccauuguaucaugcuacgguaagacuaaauguaccgcaaguaacaagaauaggggcaucauuaagacauuuuccaacgggugcgauuauguuagcaauaaaggaguggacaccgucucugugggcaacacucuuuacugugucaacaagcaagagggucagucacuguaugugaaaggggaaccaauaaucaauuucuacgacccguugguuuuucccagugaugaguucgacgcuagcauuucccaggugaacgaaaagaucaaucagucucucgccuuuauccggaaaucggaugagcuguuacacaacguaaaugucggaaagagcacgacaaacauuaugauaaccacuaucauuaucgugauuaucguuauacugcuacuccugaucgcggugggccuuuucuuguauugcaaggcccgcuccaccccugucacacugucaaaagaccaacucaguggcauuaauaacaucgcauucucuaauugaggacuagugaagggaacacccaaauuuaauucagccuuaagcacaauuaauuaagagugaaacguaauuguacaagcaguuggucacccaccauagggcaugaucaacaccgcaaccuuuccuuuuucccccagugauucugaaaaaccccucuucccuucagcuugcuuagauguuccaaauuuaguaagcuuaaggcggccuacagaagaaaaagaaaaaaaaggccacaaaaguucccucucacuuucaguaaauaaaauaaaagcagcaacagaaauaaagaaauaaaugaaauucaaaaugaaauaaauauuguguugugcagcauuaaaaaaucaauaaaaauuaaaaaugagcaagaucuaaaaaaaaaaaaaaaaaaaaaaaaaaaaaaaaaaaaaaaaaaaaaaaaaaaaaaaaaaaaaaaaugcaucccccccccccccccccccccccccccccccaaaggcucuuuucagagccaccagaauu

SEQ ID NO: 14217 - RNA, 2199 nt, Artificial Sequence
  mRNA product Design g-3 comprising derived and/or modified sequence from HRSV(Memphis-37)__AIY60640.1__F_DSCav1_mut1 (opt4)
gggagaguccgcucagccagguugcagaagcggcuuagcguguguccuaaucuucucucugcguguagguaggccugugccgcaaacaagcuuaccauggagcugcccauccugaagaccaacgccaucaccaccauccuggccgccgugacccugugcuucgccagcagccagaacaucaccgaggaguucuaccagagcaccugcagcgccgugagcaagggcuaccugggcgcccugagaaccggcugguacaccagcgugaucaccaucgagcugagcaacaucaaggagaacaagugcaacggcaccgacgccaaggugaagcugaucaagcaggagcuggacaaguacaagaacgccgugaccgagcugcagcugcugaugcagagcacccccgccgccggcagcggcagcgccaucugcagcggcaucgccgugugcaaggugcugcaccuggagggcgaggugaacaagaucaagaacgcccugcugagcaccaacaaggccguggugagccugagcaacggcgugagcgugcugaccuucaaggugcuggaccugaagaacuacaucgacaagcagcugcugcccauccugaacaagcagagcugcagcauccccaacaucgagaccgugaucgaguuccagcagaagaacaacagacugcuggagaucaccagagaguucagcgugaacgccggcgugaccacccccgugagcaccuacaugcugaccaacagcgagcugcugagccugaucaacgacaugcccaucaccaacgaccagaagaagcugaugagcaacaacgugcagaucgugagacagcagagcuacagcaucaugugcaucaucaaggaggaggugcuggccuacguggugcagcugccccuguacggcgugaucgacacccccugcuggaagcugcacaccagcccccugugcaccaccaacaccaaggagggcagcaacaucugccugaccagaaccgacagaggcugguacugcgacaacgccggcagcgugagcuucuucccccaggccgagaccugcaaggugcagagcaacagaguguucugcgacaccaugaacagccugacccugcccagcgaggugaaccugugcaacaucgacaucuucaaccccaaguacgacugcaagaucaugaccagcaagaccgacgugagcagcagcgugaucaccagccugggcgccaucgugagcugcuacggcaagaccaagugcaccgccagcaacaagaacagaggcaucaucaagaccuucagcaacggcugcgacuacgugagcaacaagggcguggacaccgugagcgugggcaacacccuguacugcgugaacaagcaggagggccagagccuguacgugaagggcgagcccaucaucaacuucuacgacccccugguguuccccagcgacgaguucgacgccagcaucagccaggugaacgagaagaucaaccagagccuggccuucaucagaaagagcgacgagcugcugcacaacgugaacgugggcaagagcaccaccaacaucaugaucaccaccaucaucaucgugaucaucgugauccugcugcugcugaucgccgugggccuguuccuguacugcaaggccagaagcacccccgugacccugagcaaggaccagcugagcggcaucaacaacaucgccuucagcaacugaggacuagugaagggaacacccaaauuuaauucagccuuaagcacaauuaauuaagagugaaacguaauuguacaagcaguuggucacccaccauagggcaugaucaacaccgcaaccuuuccuuuuucccccagugauucugaaaaaccccucuucccuucagcuugcuuagauguuccaaauuuaguaagcuuaaggcggccuacagaagaaaaagaaaaaaaaggccacaaaaguucccucucacuuucaguaaauaaaauaaaagcagcaacagaaauaaagaaauaaaugaaauucaaaaugaaauaaauauuguguugugcagcauuaaaaaaucaauaaaaauuaaaaaugagcaagaucuaaaaaaaaaaaaaaaaaaaaaaaaaaaaaaaaaaaaaaaaaaaaaaaaaaaaaaaaaaaaaaaaugcaucccccccccccccccccccccccccccccccaaaggcucuuuucagagccaccagaauu

SEQ ID NO: 14218 - RNA, 2199 nt, Artificial Sequence
  mRNA product Design g-3 comprising derived and/or modified sequence from HRSV(Memphis-37)__AIY60640.1__F_DSCav1_mut1 (opt5)
gggagaguccgcucagccagguugcagaagcggcuuagcguguguccuaaucuucucucugcguguagguaggccugugccgcaaacaagcuuaccauggagcugcccauccucaagaccaacgccauuacaacgauccuggcugccgugacccuuugcuucgcgagcucccagaauauuacagaagaguuuuaccaaucuaccuguagcgcugucuccaaaggcuaucugggggcccucagaacaggaugguacaccucuguuaucacaauugaacugagcaacaucaaggagaauaaaugcaacggcaccgacgccaaggugaaacuuaucaagcaggaacuggauaaguauaaaaaugcugugacggagcuccagcugcugaugcaguccaccccugccgcugggucuggaagcgccauuuguuccggcaucgcggucugcaaggugcuccaccuggagggggaaguuaacaaaauuaagaaugcccuucugagcacaaacaaagcuguggucucucucuccaauggagugagcguucugaccuucaaggugcuugaccugaagaacuacaucgauaaacaacuccugccgauucugaauaagcagucuuguuccauccccaacauugagacagucaucgaauuucagcagaaaaauaaccggcuccuggagaucacccgcgaguucagcgugaaugccggcgugacgacaccugucucuaccuauaugcuuacaaacuccgaacugcucagccugauuaacgacaugcccaucaccaaugaucaaaagaaacuuauguccaacaauguucagauugugagacagcagucuuacagcaucaugugcauuaucaaggaggaagugcuggcuuaugucgugcaacucccucuguacggcguuaucgacacccccuguuggaaacugcauacauccccucucugcacgaccaacacaaaggaggggagcaauauuugucugacccggacagaucgcggaugguacugcgacaacgccggcucuguguccuuuuucccgcaggcggaaaccuguaagguccagagcaauagaguguuuugcgauacgaugaacucucuuacacugcccagcgagguuaaucucugcaacaucgacauuuucaauccuaaauaugauuguaagaucaugaccuccaaaaccgacgugucuagcuccgucauuacaagccugggggccaucgugucuugcuacggaaagaccaaauguacagcuuccaacaagaaucggggcaucauuaagacguuuagcaacgggugcgauuaugucucuaauaaaggaguggacaccguuuccgugggcaacacacuuuacugugucaacaagcaagagggccagagccuguaugugaaaggggaacccaucauuaauuucuacgacccucucguuuuucccuccgaugaguucgacgccucuaucagccaggugaacgaaaagauuaaucagucccuggcuuuuauccgcaaaucugaugagcugcuccacaacgucaaugugggaaagagcaccacaaacauuaugaucaccacgaucauuaucgugauuaucguuauucugcuucugcucaucgccgucggccuguuccuguauugcaaggccagauccaccccggugacacuuagcaaagaccaacucucugggaucaauaacauugcuuucuccaauugaggacuagugaagggaacacccaaauuuaauucagccuuaagcacaauuaauuaagagugaaacguaauuguacaagcaguuggucacccaccauagggcaugaucaacaccgcaaccuuuccuuuuucccccagugauucugaaaaaccccucuucccuucagcuugcuuagauguuccaaauuuaguaagcuuaaggcggccuacagaagaaaaagaaaaaaaaggccacaaaaguucccucucacuuucaguaaauaaaauaaaagcagcaacagaaauaaagaaauaaaugaaauucaaaaugaaauaaauauuguguugugcagcauuaaaaaaucaauaaaaauuaaaaaugagcaagaucuaaaaaaaaaaaaaaaaaaaaaaaaaaaaaaaaaaaaaaaaaaaaaaaaaaaaaaaaaaaaaaaaugcaucccccccccccccccccccccccccccccccaaaggcucuuuucagagccaccagaauu

SEQ ID NO: 14219 - RNA, 2199 nt, Artificial Sequence
  mRNA product Design g-3 comprising derived and/or modified sequence from HRSV(Memphis-37)__AIY60640.1__F_DSCav1_mut1 (opt6)
gggagaguccgcucagccagguugcagaagcggcuuagcguguguccuaaucuucucucugcguguagguaggccugugccgcaaacaagcuuaccauggaacuuccaauucuaaaaaccaaugcuauaacaacaauauuagcagcaguuacauuaugcuucgccucaucacaaaauaucacagaagaauuuuaccaauccacaugcucagcaguaucuaaaggguaccuaggagcccuacgaacaggaugguacacaucaguaauaacaauagaacucucaaacaucaaagaaaacaaaugcaauggaacagacgcuaaaguaaaauuaauaaaacaagaacuagacaaauacaaaaacgccgucaccgaacuucaguuacucaugcaaagcacaccugcagcaggaucagguucagcaauaugcucaggaauagcaguuugcaaaguauuacaccuagaaggugaagucaacaaaauaaaaaacgcacuucuaaguacuaacaaagcuguaguaucauuaucaaacggaguauccguacuaaccuuuaaaguccuagaccuaaaaaacuacauagacaaacaacuacucccaauacucaauaaacaauccugcucaauucccaacaucgaaacaguaauagaauuucaacaaaaaaacaaucgccuucuagaaauaacaagagaauuuucagucaacgccggaguaacaacaccaguaucaacauauaugcuaacaaacagugaacuauuauccuuaauaaacgacaugccaauaacaaaugaccaaaaaaaacuaauguccaauaauguccaaauaguaagacaacaaagcuauucaauuauguguauaauaaaagaagaaguauuagcauacguaguucaacuaccacuauauggcguuauagacacaccaugcuggaaauuacacacaagcccacuaugcacaacaaauacaaaagaaggauccaacauuugcuuaacuagaacugacagaggaugguacugcgacaacgcuggaucagucucuuucuucccacaagcagaaaccuguaaaguacaaucaaauagagucuucugcgacacaaugaacucacuaacucucccaucugaaguaaacuuaugcaacaucgauauauuuaacccaaaauacgauuguaaaauaaugacauccaaaacagacguuucaucaagcguaaucaccucccucggagcaaucguaagcugcuacgguaaaacaaaaugcacagcauccaacaaaaacagaggcaucauaaaaacauucucaaacggaugugacuauguaucaaacaaaggaguagacacaguuucaguaggcaauaccuuauacugugucaauaaacaagaaggacaaucacuauauguaaaaggagaaccuauaauaaacuucuacgacccccucgucuucccuagcgaugaauuugacgcaucaauaucgcaaguaaacgaaaaaauaaaccaaucauuagccuuuauaagaaaaucagacgaauuauuacacaacguaaacguggggaaaagcacaacuaacaucaugauaacaacuaucauaauuguaaucaucgucauccuauuacuccuaaucgcaguaggacuauuccuauacugcaaagcuagaucaacaccagucacccuaucgaaagaucaauugucaggaauaaacaauauagccuuuucaaauuaaggacuagugaagggaacacccaaauuuaauucagccuuaagcacaauuaauuaagagugaaacguaauuguacaagcaguuggucacccaccauagggcaugaucaacaccgcaaccuuuccuuuuucccccagugauucugaaaaaccccucuucccuucagcuugcuuagauguuccaaauuuaguaagcuuaaggcggccuacagaagaaaaagaaaaaaaaggccacaaaaguucccucucacuuucaguaaauaaaauaaaagcagcaacagaaauaaagaaauaaaugaaauucaaaaugaaauaaauauuguguugugcagcauuaaaaaaucaauaaaaauuaaaaaugagcaagaucuaaaaaaaaaaaaaaaaaaaaaaaaaaaaaaaaaaaaaaaaaaaaaaaaaaaaaaaaaaaaaaaaugcaucccccccccccccccccccccccccccccccaaaggcucuuuucagagccaccagaauu

SEQ ID NO: 14220 - RNA, 2199 nt, Artificial Sequence
  mRNA product Design g-3 comprising derived and/or modified sequence from HRSV(Memphis-37)__AIY60640.1__F_DSCav1_mut1 (opt11)
gggagaguccgcucagccagguugcagaagcggcuuagcguguguccuaaucuucucucugcguguagguaggccugugccgcaaacaagcuuaccauggaacuccccauccucaaaacgaacgccaucacaaccauccucgccgccgucacccucugcuucgcgucaucccaaaacauaacugaagaguucuaucaaucaaccugcuccgcagucucaaaaggcuaccucggcgcccuacggaccggcugguacacaagcgucaucacaauagaacuuuccaacaucaaagaaaacaaauguaacggcaccgacgcaaaagucaaacucauaaaacaagaacuagacaaauauaaaaacgccguaacugaacuacaacuccucaugcaaucaacuccugcagccgguagcggcuccgcaaucugcucaggcaucgcagucugcaaagucuuacaccuagaaggcgaagucaacaaaaucaagaacgcccuacuauccacaaacaaagcaguagucucucuauccaacggagucuccguccucacauucaaaguacucgaccuaaagaacuacaucgacaaacaacuacuaccaaucuuaaacaaacaauccugcucaaucccuaacauugaaaccgucauagaguuccaacagaaaaacaaccgccuccucgaaauaaccagagaguucucagucaacgccggcgucaccaccccggucucaaccuacaugcuaaccaacucugaacuucucagccuaaucaacgacaugcccauuaccaacgaccaaaagaaacucauguccaauaacguccaaaucguucgacaacaauccuacucaaucaugugcaucauaaaagaagaaguccuagcauacgucguccaacucccacuauacggcguaaucgacacccccugcuggaaacuccacaccuccccucucuguaccaccaacaccaaagaaggguccaacaucugccucacgcgcaccgaccgaggcugguauugcgacaaugcaggcucugucuccuucuucccccaagccgaaaccugcaaaguccaaucuaaccgcgucuucugcgacaccaugaacagucuuacccucccgucagaagucaaccucugcaacauagauaucuucaacccaaaauacgacugcaaaaucaugaccucaaaaaccgacguuuccucauccguuaucaccucccucggcgcaaucgucagcugcuacggcaagacaaagugcacggcuucaaacaaaaaccgcggaaucaucaagacauucagcaacggcugcgacuacguauccaacaaaggaguggacacagucuccguuggaaacacccucuacugcguaaacaaacaagaaggccaaucacucuacgucaaaggcgaacccaucaucaacuucuacgacccacucgucuuccccuccgacgaguucgacgccucaaucagccaagucaacgagaaaauuaaccagucacucgccuucauacgcaaauccgacgaacuucuacacaacguaaacgucggaaaaucaaccacaaacaucaugauuaccacaauuaucauagucaucauaguaauccuccugcuacucauagcagucggacucuuccuauacugcaaagcccgcuccaccccugucacccuauccaaagaccaacuuuccggcaucaacaacauagccuuuuccaacuaaggacuagugaagggaacacccaaauuuaauucagccuuaagcacaauuaauuaagagugaaacguaauuguacaagcaguuggucacccaccauagggcaugaucaacaccgcaaccuuuccuuuuucccccagugauucugaaaaaccccucuucccuucagcuugcuuagauguuccaaauuuaguaagcuuaaggcggccuacagaagaaaaagaaaaaaaaggccacaaaaguucccucucacuuucaguaaauaaaauaaaagcagcaacagaaauaaagaaauaaaugaaauucaaaaugaaauaaauauuguguugugcagcauuaaaaaaucaauaaaaauuaaaaaugagcaagaucuaaaaaaaaaaaaaaaaaaaaaaaaaaaaaaaaaaaaaaaaaaaaaaaaaaaaaaaaaaaaaaaaugcaucccccccccccccccccccccccccccccccaaaggcucuuuucagagccaccagaauu

SEQ ID NO: 14221 - RNA, 1994 nt, Artificial Sequence
  mRNA product Design g-4 comprising derived and/or modified sequence from HRSV(Memphis-37)__AIY60640.1__F_DSCav1_mut1 (opt1)
gggagacuccugucgggcggaaguaggaggaguagaguuuaaaaacaguacucuuuuuccgguucgggacguaguugaagcaacgacaagccggauaaccgcucuugagacaggaagcuuaccauggagcugcccauccucaagaccaacgccaucaccacgauccuggccgcggugacccugugcuucgccagcucccagaacaucaccgaggaguucuaccagagcacgugcuccgccgucagcaagggcuaccucggcgcccugcgcaccgggugguacaccagcgugaucaccaucgagcuguccaacaucaaggagaacaagugcaacggcaccgacgccaaggugaagcucaucaagcaggagcuggacaaguacaagaacgcggucacggagcugcagcuccugaugcagagcaccccggccgccggcuccgggagcgcgaucugcuccggcaucgccgucugcaaggugcugcaccucgagggcgaggugaacaagaucaagaacgcccugcuguccaccaacaaggccgucgugagccucuccaacggggugagcguccugaccuucaaggugcuggaccucaagaacuacaucgacaagcagcugcugcccauccugaacaagcagagcugcuccauccccaacaucgagaccgucaucgaguuccagcagaagaacaaccgccuccuggagaucacgcgggaguucagcgugaacgcgggcgugaccacccccgucuccaccuacaugcugacgaacagcgagcuccugucccugaucaacgacaugccgaucaccaacgaccagaagaagcucaugagcaacaacgugcagaucgugcgccagcaguccuacagcaucaugugcaucaucaaggaggagguccuggccuacguggugcagcugccccucuacggggucaucgacacccccugcuggaagcugcacaccagcccccugugcacgaccaacaccaaggagggcuccaacaucugccucacccggacggaccgcgggugguacugcgacaacgccggcagcguguccuucuucccgcaggccgagaccugcaagguccagagcaaccggguguucugcgacaccaugaacucccugacccugcccagcgaggugaaccucugcaacaucgacaucuucaaccccaaguacgacugcaagaucaugacguccaagaccgacgucagcuccagcgugaucaccucccugggcgccaucgugagcugcuacgggaagaccaagugcacggcgagcaacaagaaccgcggcaucaucaagaccuucuccaacgggugcgacuacgucagcaacaagggcguggacaccguguccgucggcaacacccuguacugcgugaacaagcaggagggccagagccucuacgugaagggggagcccaucaucaacuucuacgacccgcuggucuuccccuccgacgaguucgacgccagcaucucccaggugaacgagaagaucaaccagagccuggccuucauccggaaguccgacgagcuccugcacaacgugaacgucggcaagagcaccacgaacaucaugaucaccaccaucaucaucgugaucaucgugauccugcugcuccugaucgccgucgggcuguuccucuacugcaaggcccgcuccacccccgugacgcugagcaaggaccagcuguccgggaucaacaacaucgcguucagcaacugaggacuaguaauaaggaaacuguaugaaugucugugggcaggaagugaagagauccuucuguaaagguuuuuggaauuaugucugcugaauaauaaacuuuuuugaaauaauaaaucugguagaaaaaugagaucuaaaaaaaaaaaaaaaaaaaaaaaaaaaaaaaaaaaaaaaaaaaaaaaaaaaaaaaaaaaaaaaaugcaucccccccccccccccccccccccccccccccaaaggcucuuuucagagccaccagaauu

SEQ ID NO: 14222 - RNA, 1994 nt, Artificial Sequence
  mRNA product Design g-4 comprising derived and/or modified sequence from HRSV(Memphis-37)__AIY60640.1__F_DSCav1_mut1 (opt1)
gggagacuccugucgggcggaaguaggaggaguagaguuuaaaaacaguacucuuuuuccgguucgggacguaguugaagcaacgacaagccggauaaccgcucuugagacaggaagcuuaccauggagcugcccauccucaagaccaacgccaucaccacgauccuggccgcggugacccugugcuucgccagcucccagaacaucaccgaggaguucuaccagagcacgugcuccgccgucagcaagggcuaccucggggcccugcgcaccggcugguacaccuccgugaucaccaucgagcugagcaacaucaaggagaacaagugcaacgggaccgacgccaaggugaagcucaucaagcaggagcuggacaaguacaagaacgcggucacggagcugcagcuccugaugcaguccaccccggccgccggcagcggguccgccaucugcagcggcaucgcggugugcaaggugcugcaccucgagggcgaggucaacaagaucaagaacgcccugcuguccaccaacaaggccguggugagccucuccaacggggucagcgugcugaccuucaaggugcuggaccucaagaacuacaucgacaagcagcugcugcccauccucaacaagcaguccugcagcauccccaacaucgagacggucaucgaguuccagcagaagaacaaccggcugcuggagaucacccgcgaguucuccgugaacgccggcgugaccacccccgucagcacguacaugcucaccaacuccgagcugcugagccucaucaacgacaugccgaucaccaacgaccagaagaagcugaugagcaacaacgugcagaucgugcggcagcaguccuacagcaucaugugcaucaucaaggaggagguccuggccuacguggugcagcucccccuguacggggucaucgacacccccugcuggaagcugcacacgagcccccucugcaccaccaacaccaaggagggcuccaacaucugccugacgcgcaccgaccgggggugguacugcgacaacgcgggcuccgugagcuucuucccgcaggccgagaccugcaaggugcaguccaaccgcgucuucugcgacaccaugaacagccugacgcuccccuccgaggugaaccugugcaacaucgacaucuucaaccccaaguacgacugcaagaucaugaccagcaagaccgacgucuccagcuccgugaucaccagccugggcgccaucguguccugcuacgggaagacgaagugcaccgccagcaacaagaaccggggcaucaucaagaccuucuccaacgggugcgacuacgucagcaacaagggcguggacaccguguccgucggcaacacgcucuacugcgugaacaagcaggaggggcagagccuguacgugaagggcgagcccaucaucaacuucuacgacccgcuggucuuccccagcgacgaguucgacgccuccaucagccaggugaacgagaagaucaaccagucccucgcguucauccgcaagagcgacgagcugcugcacaacgugaacgucgggaaguccaccaccaacaucaugaucaccaccaucaucaucgugaucaucgugauccuccugcugcucaucgccgucggccuguuccuguacugcaaggcccggagcacgcccgugacccuguccaaggaccagcucagcgggaucaacaacaucgccuucuccaacugaggacuaguaauaaggaaacuguaugaaugucugugggcaggaagugaagagauccuucuguaaagguuuuuggaauuaugucugcugaauaauaaacuuuuuugaaauaauaaaucugguagaaaaaugagaucuaaaaaaaaaaaaaaaaaaaaaaaaaaaaaaaaaaaaaaaaaaaaaaaaaaaaaaaaaaaaaaaaugcaucccccccccccccccccccccccccccccccaaaggcucuuuucagagccaccagaauu

SEQ ID NO: 14223 - RNA, 1994 nt, Artificial Sequence
  mRNA product Design g-4 comprising derived and/or modified sequence from HRSV(Memphis-37)__AIY60640.1__F_DSCav1_mut1 (opt2)
gggagacuccugucgggcggaaguaggaggaguagaguuuaaaaacaguacucuuuuuccgguucgggacguaguugaagcaacgacaagccggauaaccgcucuugagacaggaagcuuaccauggagcuccccauccucaagaccaacgccaucaccaccauccucgccgccgucacccucugcuucgccuccucccagaacaucaccgaggaguucuaccaguccaccugcuccgccgucuccaagggcuaccucggcgcccuccgcaccggcugguacaccuccgucaucaccaucgagcucuccaacaucaaggagaacaagugcaacggcaccgacgccaaggucaagcucaucaagcaggagcucgacaaguacaagaacgccgucaccgagcuccagcuccucaugcaguccacccccgccgccggcuccggcuccgccaucugcuccggcaucgccgucugcaagguccuccaccucgagggcgaggucaacaagaucaagaacgcccuccucuccaccaacaaggccgucgucucccucuccaacggcgucuccguccucaccuucaagguccucgaccucaagaacuacaucgacaagcagcuccuccccauccucaacaagcaguccugcuccauccccaacaucgagaccgucaucgaguuccagcagaagaacaaccgccuccucgagaucacccgcgaguucuccgucaacgccggcgucaccacccccgucuccaccuacaugcucaccaacuccgagcuccucucccucaucaacgacaugcccaucaccaacgaccagaagaagcucauguccaacaacguccagaucguccgccagcaguccuacuccaucaugugcaucaucaaggaggagguccucgccuacgucguccagcucccccucuacggcgucaucgacacccccugcuggaagcuccacaccuccccccucugcaccaccaacaccaaggagggcuccaacaucugccucacccgcaccgaccgcggcugguacugcgacaacgccggcuccgucuccuucuucccccaggccgagaccugcaagguccaguccaaccgcgucuucugcgacaccaugaacucccucacccuccccuccgaggucaaccucugcaacaucgacaucuucaaccccaaguacgacugcaagaucaugaccuccaagaccgacgucuccuccuccgucaucaccucccucggcgccaucgucuccugcuacggcaagaccaagugcaccgccuccaacaagaaccgcggcaucaucaagaccuucuccaacggcugcgacuacgucuccaacaagggcgucgacaccgucuccgucggcaacacccucuacugcgucaacaagcaggagggccagucccucuacgucaagggcgagcccaucaucaacuucuacgacccccucgucuuccccuccgacgaguucgacgccuccaucucccaggucaacgagaagaucaaccagucccucgccuucauccgcaaguccgacgagcuccuccacaacgucaacgucggcaaguccaccaccaacaucaugaucaccaccaucaucaucgucaucaucgucauccuccuccuccucaucgccgucggccucuuccucuacugcaaggcccgcuccacccccgucacccucuccaaggaccagcucuccggcaucaacaacaucgccuucuccaacugaggacuaguaauaaggaaacuguaugaaugucugugggcaggaagugaagagauccuucuguaaagguuuuuggaauuaugucugcugaauaauaaacuuuuuugaaauaauaaaucugguagaaaaaugagaucuaaaaaaaaaaaaaaaaaaaaaaaaaaaaaaaaaaaaaaaaaaaaaaaaaaaaaaaaaaaaaaaaugcaucccccccccccccccccccccccccccccccaaaggcucuuuucagagccaccagaauu

SEQ ID NO: 14224 - RNA, 1994 nt, Artificial Sequence
  mRNA product Design g-4 comprising derived and/or modified sequence from HRSV(Memphis-37)__AIY60640.1__F_DSCav1_mut1 (opt3)
gggagacuccugucgggcggaaguaggaggaguagaguuuaaaaacaguacucuuuuuccgguucgggacguaguugaagcaacgacaagccggauaaccgcucuugagacaggaagcuuaccauggagcugcccauccucaagaccaacgccauuacaacuauacuugcugcagugacgcugugcuucgccagcucccagaauaucaccgaagaguuuuaccaaucuacauguucagcggucaguaaaggcuauuugggggcuuuaagaacuggaugguacaccagcguuauuacaaucgaacuguccaacauuaaggagaauaaaugcaacgguaccgacgccaaggugaaacuaaucaagcaggaacucgauaaguauaaaaaugcaguaacugagcugcagcuucugaugcagucuacuccugccgcuggcucggggucagcaauauguagcggaaucgccgugugcaaggucuugcaccucgagggcgaagugaacaaaauuaagaaugcucugcugaguaccaacaaagccguugugucccucucuaauggugucagcguguuaacguucaagguacuggaccuuaagaacuacaucgauaaacaauugcugccaauucuaaauaagcaguccuguucaaucccgaacauagagacuguuauugaauuucagcagaaaaauaacaggcuccuggagaucacccgggaguucagugugaaugcgggggucacaacucccgugagcaccuauaugcuuacaaacucugaacuguugucccucauuaacgacaugccuaucaccaaugaucaaaagaaacugaugucaaacaaugugcagaucguccgccagcagagcuacaguauuaugugcauaaucaaggaggaaguuuuagcauaugugguacaacugccacucuacggagugauugacacgcccuguuggaaacuucauacuucuccucugugcacaaccaacacuaaggagggcuccaauaucuguuugacacgaaccgaucguggcugguacugcgacaacgccgggagcgucucguuuuucccacaggcugaaacguguaaggugcagucuaauagaguguuuugcgauaccaugaacucccuaacacugcccucagagguuaaucucugcaacauagacauuuucaauccuaaauaugauuguaagaucaugacaaguaaaaccgacgucagcuccucugugaucacaagccugggagccauuguaucaugcuacgguaagacuaaauguaccgcaaguaacaagaauaggggcaucauuaagacauuuuccaacgggugcgauuauguuagcaauaaaggaguggacaccgucucugugggcaacacucuuuacugugucaacaagcaagagggucagucacuguaugugaaaggggaaccaauaaucaauuucuacgacccguugguuuuucccagugaugaguucgacgcuagcauuucccaggugaacgaaaagaucaaucagucucucgccuuuauccggaaaucggaugagcuguuacacaacguaaaugucggaaagagcacgacaaacauuaugauaaccacuaucauuaucgugauuaucguuauacugcuacuccugaucgcggugggccuuuucuuguauugcaaggcccgcuccaccccugucacacugucaaaagaccaacucaguggcauuaauaacaucgcauucucuaauugaggacuaguaauaaggaaacuguaugaaugucugugggcaggaagugaagagauccuucuguaaagguuuuuggaauuaugucugcugaauaauaaacuuuuuugaaauaauaaaucugguagaaaaaugagaucuaaaaaaaaaaaaaaaaaaaaaaaaaaaaaaaaaaaaaaaaaaaaaaaaaaaaaaaaaaaaaaaaugcaucccccccccccccccccccccccccccccccaaaggcucuuuucagagccaccagaauu

SEQ ID NO: 14225 - RNA, 1994 nt, Artificial Sequence
  mRNA product Design g-4 comprising derived and/or modified sequence from HRSV(Memphis-37)__AIY60640.1__F_DSCav1_mut1 (opt4)
gggagacuccugucgggcggaaguaggaggaguagaguuuaaaaacaguacucuuuuuccgguucgggacguaguugaagcaacgacaagccggauaaccgcucuugagacaggaagcuuaccauggagcugcccauccugaagaccaacgccaucaccaccauccuggccgccgugacccugugcuucgccagcagccagaacaucaccgaggaguucuaccagagcaccugcagcgccgugagcaagggcuaccugggcgcccugagaaccggcugguacaccagcgugaucaccaucgagcugagcaacaucaaggagaacaagugcaacggcaccgacgccaaggugaagcugaucaagcaggagcuggacaaguacaagaacgccgugaccgagcugcagcugcugaugcagagcacccccgccgccggcagcggcagcgccaucugcagcggcaucgccgugugcaaggugcugcaccuggagggcgaggugaacaagaucaagaacgcccugcugagcaccaacaaggccguggugagccugagcaacggcgugagcgugcugaccuucaaggugcuggaccugaagaacuacaucgacaagcagcugcugcccauccugaacaagcagagcugcagcauccccaacaucgagaccgugaucgaguuccagcagaagaacaacagacugcuggagaucaccagagaguucagcgugaacgccggcgugaccacccccgugagcaccuacaugcugaccaacagcgagcugcugagccugaucaacgacaugcccaucaccaacgaccagaagaagcugaugagcaacaacgugcagaucgugagacagcagagcuacagcaucaugugcaucaucaaggaggaggugcuggccuacguggugcagcugccccuguacggcgugaucgacacccccugcuggaagcugcacaccagcccccugugcaccaccaacaccaaggagggcagcaacaucugccugaccagaaccgacagaggcugguacugcgacaacgccggcagcgugagcuucuucccccaggccgagaccugcaaggugcagagcaacagaguguucugcgacaccaugaacagccugacccugcccagcgaggugaaccugugcaacaucgacaucuucaaccccaaguacgacugcaagaucaugaccagcaagaccgacgugagcagcagcgugaucaccagccugggcgccaucgugagcugcuacggcaagaccaagugcaccgccagcaacaagaacagaggcaucaucaagaccuucagcaacggcugcgacuacgugagcaacaagggcguggacaccgugagcgugggcaacacccuguacugcgugaacaagcaggagggccagagccuguacgugaagggcgagcccaucaucaacuucuacgacccccugguguuccccagcgacgaguucgacgccagcaucagccaggugaacgagaagaucaaccagagccuggccuucaucagaaagagcgacgagcugcugcacaacgugaacgugggcaagagcaccaccaacaucaugaucaccaccaucaucaucgugaucaucgugauccugcugcugcugaucgccgugggccuguuccuguacugcaaggccagaagcacccccgugacccugagcaaggaccagcugagcggcaucaacaacaucgccuucagcaacugaggacuaguaauaaggaaacuguaugaaugucugugggcaggaagugaagagauccuucuguaaagguuuuuggaauuaugucugcugaauaauaaacuuuuuugaaauaauaaaucugguagaaaaaugagaucuaaaaaaaaaaaaaaaaaaaaaaaaaaaaaaaaaaaaaaaaaaaaaaaaaaaaaaaaaaaaaaaaugcaucccccccccccccccccccccccccccccccaaaggcucuuuucagagccaccagaauu

SEQ ID NO: 14226 - RNA, 1994 nt, Artificial Sequence
  mRNA product Design g-4 comprising derived and/or modified sequence from HRSV(Memphis-37)__AIY60640.1__F_DSCav1_mut1 (opt5)
gggagacuccugucgggcggaaguaggaggaguagaguuuaaaaacaguacucuuuuuccgguucgggacguaguugaagcaacgacaagccggauaaccgcucuugagacaggaagcuuaccauggagcugcccauccucaagaccaacgccauuacaacgauccuggcugccgugacccuuugcuucgcgagcucccagaauauuacagaagaguuuuaccaaucuaccuguagcgcugucuccaaaggcuaucugggggcccucagaacaggaugguacaccucuguuaucacaauugaacugagcaacaucaaggagaauaaaugcaacggcaccgacgccaaggugaaacuuaucaagcaggaacuggauaaguauaaaaaugcugugacggagcuccagcugcugaugcaguccaccccugccgcugggucuggaagcgccauuuguuccggcaucgcggucugcaaggugcuccaccuggagggggaaguuaacaaaauuaagaaugcccuucugagcacaaacaaagcuguggucucucucuccaauggagugagcguucugaccuucaaggugcuugaccugaagaacuacaucgauaaacaacuccugccgauucugaauaagcagucuuguuccauccccaacauugagacagucaucgaauuucagcagaaaaauaaccggcuccuggagaucacccgcgaguucagcgugaaugccggcgugacgacaccugucucuaccuauaugcuuacaaacuccgaacugcucagccugauuaacgacaugcccaucaccaaugaucaaaagaaacuuauguccaacaauguucagauugugagacagcagucuuacagcaucaugugcauuaucaaggaggaagugcuggcuuaugucgugcaacucccucuguacggcguuaucgacacccccuguuggaaacugcauacauccccucucugcacgaccaacacaaaggaggggagcaauauuugucugacccggacagaucgcggaugguacugcgacaacgccggcucuguguccuuuuucccgcaggcggaaaccuguaagguccagagcaauagaguguuuugcgauacgaugaacucucuuacacugcccagcgagguuaaucucugcaacaucgacauuuucaauccuaaauaugauuguaagaucaugaccuccaaaaccgacgugucuagcuccgucauuacaagccugggggccaucgugucuugcuacggaaagaccaaauguacagcuuccaacaagaaucggggcaucauuaagacguuuagcaacgggugcgauuaugucucuaauaaaggaguggacaccguuuccgugggcaacacacuuuacugugucaacaagcaagagggccagagccuguaugugaaaggggaacccaucauuaauuucuacgacccucucguuuuucccuccgaugaguucgacgccucuaucagccaggugaacgaaaagauuaaucagucccuggcuuuuauccgcaaaucugaugagcugcuccacaacgucaaugugggaaagagcaccacaaacauuaugaucaccacgaucauuaucgugauuaucguuauucugcuucugcucaucgccgucggccuguuccuguauugcaaggccagauccaccccggugacacuuagcaaagaccaacucucugggaucaauaacauugcuuucuccaauugaggacuaguaauaaggaaacuguaugaaugucugugggcaggaagugaagagauccuucuguaaagguuuuuggaauuaugucugcugaauaauaaacuuuuuugaaauaauaaaucugguagaaaaaugagaucuaaaaaaaaaaaaaaaaaaaaaaaaaaaaaaaaaaaaaaaaaaaaaaaaaaaaaaaaaaaaaaaaugcaucccccccccccccccccccccccccccccccaaaggcucuuuucagagccaccagaauu

SEQ ID NO: 14227 - RNA, 1994 nt, Artificial Sequence
  mRNA product Design g-4 comprising derived and/or modified sequence from HRSV(Memphis-37)__AIY60640.1__F_DSCav1_mut1 (opt6)
gggagacuccugucgggcggaaguaggaggaguagaguuuaaaaacaguacucuuuuuccgguucgggacguaguugaagcaacgacaagccggauaaccgcucuugagacaggaagcuuaccauggaacuuccaauucuaaaaaccaaugcuauaacaacaauauuagcagcaguuacauuaugcuucgccucaucacaaaauaucacagaagaauuuuaccaauccacaugcucagcaguaucuaaaggguaccuaggagcccuacgaacaggaugguacacaucaguaauaacaauagaacucucaaacaucaaagaaaacaaaugcaauggaacagacgcuaaaguaaaauuaauaaaacaagaacuagacaaauacaaaaacgccgucaccgaacuucaguuacucaugcaaagcacaccugcagcaggaucagguucagcaauaugcucaggaauagcaguuugcaaaguauuacaccuagaaggugaagucaacaaaauaaaaaacgcacuucuaaguacuaacaaagcuguaguaucauuaucaaacggaguauccguacuaaccuuuaaaguccuagaccuaaaaaacuacauagacaaacaacuacucccaauacucaauaaacaauccugcucaauucccaacaucgaaacaguaauagaauuucaacaaaaaaacaaucgccuucuagaaauaacaagagaauuuucagucaacgccggaguaacaacaccaguaucaacauauaugcuaacaaacagugaacuauuauccuuaauaaacgacaugccaauaacaaaugaccaaaaaaaacuaauguccaauaauguccaaauaguaagacaacaaagcuauucaauuauguguauaauaaaagaagaaguauuagcauacguaguucaacuaccacuauauggcguuauagacacaccaugcuggaaauuacacacaagcccacuaugcacaacaaauacaaaagaaggauccaacauuugcuuaacuagaacugacagaggaugguacugcgacaacgcuggaucagucucuuucuucccacaagcagaaaccuguaaaguacaaucaaauagagucuucugcgacacaaugaacucacuaacucucccaucugaaguaaacuuaugcaacaucgauauauuuaacccaaaauacgauuguaaaauaaugacauccaaaacagacguuucaucaagcguaaucaccucccucggagcaaucguaagcugcuacgguaaaacaaaaugcacagcauccaacaaaaacagaggcaucauaaaaacauucucaaacggaugugacuauguaucaaacaaaggaguagacacaguuucaguaggcaauaccuuauacugugucaauaaacaagaaggacaaucacuauauguaaaaggagaaccuauaauaaacuucuacgacccccucgucuucccuagcgaugaauuugacgcaucaauaucgcaaguaaacgaaaaaauaaaccaaucauuagccuuuauaagaaaaucagacgaauuauuacacaacguaaacguggggaaaagcacaacuaacaucaugauaacaacuaucauaauuguaaucaucgucauccuauuacuccuaaucgcaguaggacuauuccuauacugcaaagcuagaucaacaccagucacccuaucgaaagaucaauugucaggaauaaacaauauagccuuuucaaauuaaggacuaguaauaaggaaacuguaugaaugucugugggcaggaagugaagagauccuucuguaaagguuuuuggaauuaugucugcugaauaauaaacuuuuuugaaauaauaaaucugguagaaaaaugagaucuaaaaaaaaaaaaaaaaaaaaaaaaaaaaaaaaaaaaaaaaaaaaaaaaaaaaaaaaaaaaaaaaugcaucccccccccccccccccccccccccccccccaaaggcucuuuucagagccaccagaauu

SEQ ID NO: 14228 - RNA, 1994 nt, Artificial Sequence
  mRNA product Design g-4 comprising derived and/or modified sequence from HRSV(Memphis-37)__AIY60640.1__F_DSCav1_mut1 (opt11)
gggagacuccugucgggcggaaguaggaggaguagaguuuaaaaacaguacucuuuuuccgguucgggacguaguugaagcaacgacaagccggauaaccgcucuugagacaggaagcuuaccauggaacuccccauccucaaaacgaacgccaucacaaccauccucgccgccgucacccucugcuucgcgucaucccaaaacauaacugaagaguucuaucaaucaaccugcuccgcagucucaaaaggcuaccucggcgcccuacggaccggcugguacacaagcgucaucacaauagaacuuuccaacaucaaagaaaacaaauguaacggcaccgacgcaaaagucaaacucauaaaacaagaacuagacaaauauaaaaacgccguaacugaacuacaacuccucaugcaaucaacuccugcagccgguagcggcuccgcaaucugcucaggcaucgcagucugcaaagucuuacaccuagaaggcgaagucaacaaaaucaagaacgcccuacuauccacaaacaaagcaguagucucucuauccaacggagucuccguccucacauucaaaguacucgaccuaaagaacuacaucgacaaacaacuacuaccaaucuuaaacaaacaauccugcucaaucccuaacauugaaaccgucauagaguuccaacagaaaaacaaccgccuccucgaaauaaccagagaguucucagucaacgccggcgucaccaccccggucucaaccuacaugcuaaccaacucugaacuucucagccuaaucaacgacaugcccauuaccaacgaccaaaagaaacucauguccaauaacguccaaaucguucgacaacaauccuacucaaucaugugcaucauaaaagaagaaguccuagcauacgucguccaacucccacuauacggcguaaucgacacccccugcuggaaacuccacaccuccccucucuguaccaccaacaccaaagaaggguccaacaucugccucacgcgcaccgaccgaggcugguauugcgacaaugcaggcucugucuccuucuucccccaagccgaaaccugcaaaguccaaucuaaccgcgucuucugcgacaccaugaacagucuuacccucccgucagaagucaaccucugcaacauagauaucuucaacccaaaauacgacugcaaaaucaugaccucaaaaaccgacguuuccucauccguuaucaccucccucggcgcaaucgucagcugcuacggcaagacaaagugcacggcuucaaacaaaaaccgcggaaucaucaagacauucagcaacggcugcgacuacguauccaacaaaggaguggacacagucuccguuggaaacacccucuacugcguaaacaaacaagaaggccaaucacucuacgucaaaggcgaacccaucaucaacuucuacgacccacucgucuuccccuccgacgaguucgacgccucaaucagccaagucaacgagaaaauuaaccagucacucgccuucauacgcaaauccgacgaacuucuacacaacguaaacgucggaaaaucaaccacaaacaucaugauuaccacaauuaucauagucaucauaguaauccuccugcuacucauagcagucggacucuuccuauacugcaaagcccgcuccaccccugucacccuauccaaagaccaacuuuccggcaucaacaacauagccuuuuccaacuaaggacuaguaauaaggaaacuguaugaaugucugugggcaggaagugaagagauccuucuguaaagguuuuuggaauuaugucugcugaauaauaaacuuuuuugaaauaauaaaucugguagaaaaaugagaucuaaaaaaaaaaaaaaaaaaaaaaaaaaaaaaaaaaaaaaaaaaaaaaaaaaaaaaaaaaaaaaaaugcaucccccccccccccccccccccccccccccccaaaggcucuuuucagagccaccagaauu

SEQ ID NO: 14229 - RNA, 1970 nt, Artificial Sequence
  mRNA product Design g-5 comprising derived and/or modified sequence from HRSV(Memphis-37)__AIY60640.1__F_DSCav1_mut1 (opt1)
gggagacccgugacccggaaguuguacggcuacgcgacuuucccucccacaaacccucgcgcccuuccuuuccuacuugggcccggcagaaagcuuaccauggagcugcccauccucaagaccaacgccaucaccacgauccuggccgcggugacccugugcuucgccagcucccagaacaucaccgaggaguucuaccagagcacgugcuccgccgucagcaagggcuaccucggcgcccugcgcaccgggugguacaccagcgugaucaccaucgagcuguccaacaucaaggagaacaagugcaacggcaccgacgccaaggugaagcucaucaagcaggagcuggacaaguacaagaacgcggucacggagcugcagcuccugaugcagagcaccccggccgccggcuccgggagcgcgaucugcuccggcaucgccgucugcaaggugcugcaccucgagggcgaggugaacaagaucaagaacgcccugcuguccaccaacaaggccgucgugagccucuccaacggggugagcguccugaccuucaaggugcuggaccucaagaacuacaucgacaagcagcugcugcccauccugaacaagcagagcugcuccauccccaacaucgagaccgucaucgaguuccagcagaagaacaaccgccuccuggagaucacgcgggaguucagcgugaacgcgggcgugaccacccccgucuccaccuacaugcugacgaacagcgagcuccugucccugaucaacgacaugccgaucaccaacgaccagaagaagcucaugagcaacaacgugcagaucgugcgccagcaguccuacagcaucaugugcaucaucaaggaggagguccuggccuacguggugcagcugccccucuacggggucaucgacacccccugcuggaagcugcacaccagcccccugugcacgaccaacaccaaggagggcuccaacaucugccucacccggacggaccgcgggugguacugcgacaacgccggcagcguguccuucuucccgcaggccgagaccugcaagguccagagcaaccggguguucugcgacaccaugaacucccugacccugcccagcgaggugaaccucugcaacaucgacaucuucaaccccaaguacgacugcaagaucaugacguccaagaccgacgucagcuccagcgugaucaccucccugggcgccaucgugagcugcuacgggaagaccaagugcacggcgagcaacaagaaccgcggcaucaucaagaccuucuccaacgggugcgacuacgucagcaacaagggcguggacaccguguccgucggcaacacccuguacugcgugaacaagcaggagggccagagccucuacgugaagggggagcccaucaucaacuucuacgacccgcuggucuuccccuccgacgaguucgacgccagcaucucccaggugaacgagaagaucaaccagagccuggccuucauccggaaguccgacgagcuccugcacaacgugaacgucggcaagagcaccacgaacaucaugaucaccaccaucaucaucgugaucaucgugauccugcugcuccugaucgccgucgggcuguuccucuacugcaaggcccgcuccacccccgugacgcugagcaaggaccagcuguccgggaucaacaacaucgcguucagcaacugaggacuaguaauaaggaaacuguaugaaugucugugggcaggaagugaagagauccuucuguaaagguuuuuggaauuaugucugcugaauaauaaacuuuuuugaaauaauaaaucugguagaaaaaugagaucuaaaaaaaaaaaaaaaaaaaaaaaaaaaaaaaaaaaaaaaaaaaaaaaaaaaaaaaaaaaaaaaaugcaucccccccccccccccccccccccccccccccaaaggcucuuuucagagccaccagaauu

SEQ ID NO: 14230 - RNA, 1970 nt, Artificial Sequence
  mRNA product Design g-5 comprising derived and/or modified sequence from HRSV(Memphis-37)__AIY60640.1__F_DSCav1_mut1 (opt1)
gggagacccgugacccggaaguuguacggcuacgcgacuuucccucccacaaacccucgcgcccuuccuuuccuacuugggcccggcagaaagcuuaccauggagcugcccauccucaagaccaacgccaucaccacgauccuggccgcggugacccugugcuucgccagcucccagaacaucaccgaggaguucuaccagagcacgugcuccgccgucagcaagggcuaccucggggcccugcgcaccggcugguacaccuccgugaucaccaucgagcugagcaacaucaaggagaacaagugcaacgggaccgacgccaaggugaagcucaucaagcaggagcuggacaaguacaagaacgcggucacggagcugcagcuccugaugcaguccaccccggccgccggcagcggguccgccaucugcagcggcaucgcggugugcaaggugcugcaccucgagggcgaggucaacaagaucaagaacgcccugcuguccaccaacaaggccguggugagccucuccaacggggucagcgugcugaccuucaaggugcuggaccucaagaacuacaucgacaagcagcugcugcccauccucaacaagcaguccugcagcauccccaacaucgagacggucaucgaguuccagcagaagaacaaccggcugcuggagaucacccgcgaguucuccgugaacgccggcgugaccacccccgucagcacguacaugcucaccaacuccgagcugcugagccucaucaacgacaugccgaucaccaacgaccagaagaagcugaugagcaacaacgugcagaucgugcggcagcaguccuacagcaucaugugcaucaucaaggaggagguccuggccuacguggugcagcucccccuguacggggucaucgacacccccugcuggaagcugcacacgagcccccucugcaccaccaacaccaaggagggcuccaacaucugccugacgcgcaccgaccgggggugguacugcgacaacgcgggcuccgugagcuucuucccgcaggccgagaccugcaaggugcaguccaaccgcgucuucugcgacaccaugaacagccugacgcuccccuccgaggugaaccugugcaacaucgacaucuucaaccccaaguacgacugcaagaucaugaccagcaagaccgacgucuccagcuccgugaucaccagccugggcgccaucguguccugcuacgggaagacgaagugcaccgccagcaacaagaaccggggcaucaucaagaccuucuccaacgggugcgacuacgucagcaacaagggcguggacaccguguccgucggcaacacgcucuacugcgugaacaagcaggaggggcagagccuguacgugaagggcgagcccaucaucaacuucuacgacccgcuggucuuccccagcgacgaguucgacgccuccaucagccaggugaacgagaagaucaaccagucccucgcguucauccgcaagagcgacgagcugcugcacaacgugaacgucgggaaguccaccaccaacaucaugaucaccaccaucaucaucgugaucaucgugauccuccugcugcucaucgccgucggccuguuccuguacugcaaggcccggagcacgcccgugacccuguccaaggaccagcucagcgggaucaacaacaucgccuucuccaacugaggacuaguaauaaggaaacuguaugaaugucugugggcaggaagugaagagauccuucuguaaagguuuuuggaauuaugucugcugaauaauaaacuuuuuugaaauaauaaaucugguagaaaaaugagaucuaaaaaaaaaaaaaaaaaaaaaaaaaaaaaaaaaaaaaaaaaaaaaaaaaaaaaaaaaaaaaaaaugcaucccccccccccccccccccccccccccccccaaaggcucuuuucagagccaccagaauu

SEQ ID NO: 14231 - RNA, 1970 nt, Artificial Sequence
  mRNA product Design g-5 comprising derived and/or modified sequence from HRSV(Memphis-37)__AIY60640.1__F_DSCav1_mut1 (opt2)
gggagacccgugacccggaaguuguacggcuacgcgacuuucccucccacaaacccucgcgcccuuccuuuccuacuugggcccggcagaaagcuuaccauggagcuccccauccucaagaccaacgccaucaccaccauccucgccgccgucacccucugcuucgccuccucccagaacaucaccgaggaguucuaccaguccaccugcuccgccgucuccaagggcuaccucggcgcccuccgcaccggcugguacaccuccgucaucaccaucgagcucuccaacaucaaggagaacaagugcaacggcaccgacgccaaggucaagcucaucaagcaggagcucgacaaguacaagaacgccgucaccgagcuccagcuccucaugcaguccacccccgccgccggcuccggcuccgccaucugcuccggcaucgccgucugcaagguccuccaccucgagggcgaggucaacaagaucaagaacgcccuccucuccaccaacaaggccgucgucucccucuccaacggcgucuccguccucaccuucaagguccucgaccucaagaacuacaucgacaagcagcuccuccccauccucaacaagcaguccugcuccauccccaacaucgagaccgucaucgaguuccagcagaagaacaaccgccuccucgagaucacccgcgaguucuccgucaacgccggcgucaccacccccgucuccaccuacaugcucaccaacuccgagcuccucucccucaucaacgacaugcccaucaccaacgaccagaagaagcucauguccaacaacguccagaucguccgccagcaguccuacuccaucaugugcaucaucaaggaggagguccucgccuacgucguccagcucccccucuacggcgucaucgacacccccugcuggaagcuccacaccuccccccucugcaccaccaacaccaaggagggcuccaacaucugccucacccgcaccgaccgcggcugguacugcgacaacgccggcuccgucuccuucuucccccaggccgagaccugcaagguccaguccaaccgcgucuucugcgacaccaugaacucccucacccuccccuccgaggucaaccucugcaacaucgacaucuucaaccccaaguacgacugcaagaucaugaccuccaagaccgacgucuccuccuccgucaucaccucccucggcgccaucgucuccugcuacggcaagaccaagugcaccgccuccaacaagaaccgcggcaucaucaagaccuucuccaacggcugcgacuacgucuccaacaagggcgucgacaccgucuccgucggcaacacccucuacugcgucaacaagcaggagggccagucccucuacgucaagggcgagcccaucaucaacuucuacgacccccucgucuuccccuccgacgaguucgacgccuccaucucccaggucaacgagaagaucaaccagucccucgccuucauccgcaaguccgacgagcuccuccacaacgucaacgucggcaaguccaccaccaacaucaugaucaccaccaucaucaucgucaucaucgucauccuccuccuccucaucgccgucggccucuuccucuacugcaaggcccgcuccacccccgucacccucuccaaggaccagcucuccggcaucaacaacaucgccuucuccaacugaggacuaguaauaaggaaacuguaugaaugucugugggcaggaagugaagagauccuucuguaaagguuuuuggaauuaugucugcugaauaauaaacuuuuuugaaauaauaaaucugguagaaaaaugagaucuaaaaaaaaaaaaaaaaaaaaaaaaaaaaaaaaaaaaaaaaaaaaaaaaaaaaaaaaaaaaaaaaugcaucccccccccccccccccccccccccccccccaaaggcucuuuucagagccaccagaauu

SEQ ID NO: 14232 - RNA, 1970 nt, Artificial Sequence
  mRNA product Design g-5 comprising derived and/or modified sequence from HRSV(Memphis-37)__AIY60640.1__F_DSCav1_mut1 (opt3)
gggagacccgugacccggaaguuguacggcuacgcgacuuucccucccacaaacccucgcgcccuuccuuuccuacuugggcccggcagaaagcuuaccauggagcugcccauccucaagaccaacgccauuacaacuauacuugcugcagugacgcugugcuucgccagcucccagaauaucaccgaagaguuuuaccaaucuacauguucagcggucaguaaaggcuauuugggggcuuuaagaacuggaugguacaccagcguuauuacaaucgaacuguccaacauuaaggagaauaaaugcaacgguaccgacgccaaggugaaacuaaucaagcaggaacucgauaaguauaaaaaugcaguaacugagcugcagcuucugaugcagucuacuccugccgcuggcucggggucagcaauauguagcggaaucgccgugugcaaggucuugcaccucgagggcgaagugaacaaaauuaagaaugcucugcugaguaccaacaaagccguugugucccucucuaauggugucagcguguuaacguucaagguacuggaccuuaagaacuacaucgauaaacaauugcugccaauucuaaauaagcaguccuguucaaucccgaacauagagacuguuauugaauuucagcagaaaaauaacaggcuccuggagaucacccgggaguucagugugaaugcgggggucacaacucccgugagcaccuauaugcuuacaaacucugaacuguugucccucauuaacgacaugccuaucaccaaugaucaaaagaaacugaugucaaacaaugugcagaucguccgccagcagagcuacaguauuaugugcauaaucaaggaggaaguuuuagcauaugugguacaacugccacucuacggagugauugacacgcccuguuggaaacuucauacuucuccucugugcacaaccaacacuaaggagggcuccaauaucuguuugacacgaaccgaucguggcugguacugcgacaacgccgggagcgucucguuuuucccacaggcugaaacguguaaggugcagucuaauagaguguuuugcgauaccaugaacucccuaacacugcccucagagguuaaucucugcaacauagacauuuucaauccuaaauaugauuguaagaucaugacaaguaaaaccgacgucagcuccucugugaucacaagccugggagccauuguaucaugcuacgguaagacuaaauguaccgcaaguaacaagaauaggggcaucauuaagacauuuuccaacgggugcgauuauguuagcaauaaaggaguggacaccgucucugugggcaacacucuuuacugugucaacaagcaagagggucagucacuguaugugaaaggggaaccaauaaucaauuucuacgacccguugguuuuucccagugaugaguucgacgcuagcauuucccaggugaacgaaaagaucaaucagucucucgccuuuauccggaaaucggaugagcuguuacacaacguaaaugucggaaagagcacgacaaacauuaugauaaccacuaucauuaucgugauuaucguuauacugcuacuccugaucgcggugggccuuuucuuguauugcaaggcccgcuccaccccugucacacugucaaaagaccaacucaguggcauuaauaacaucgcauucucuaauugaggacuaguaauaaggaaacuguaugaaugucugugggcaggaagugaagagauccuucuguaaagguuuuuggaauuaugucugcugaauaauaaacuuuuuugaaauaauaaaucugguagaaaaaugagaucuaaaaaaaaaaaaaaaaaaaaaaaaaaaaaaaaaaaaaaaaaaaaaaaaaaaaaaaaaaaaaaaaugcaucccccccccccccccccccccccccccccccaaaggcucuuuucagagccaccagaauu

SEQ ID NO: 14233 - RNA, 1970 nt, Artificial Sequence
  mRNA product Design g-5 comprising derived and/or modified sequence from HRSV(Memphis-37)__AIY60640.1__F_DSCav1_mut1 (opt4)
gggagacccgugacccggaaguuguacggcuacgcgacuuucccucccacaaacccucgcgcccuuccuuuccuacuugggcccggcagaaagcuuaccauggagcugcccauccugaagaccaacgccaucaccaccauccuggccgccgugacccugugcuucgccagcagccagaacaucaccgaggaguucuaccagagcaccugcagcgccgugagcaagggcuaccugggcgcccugagaaccggcugguacaccagcgugaucaccaucgagcugagcaacaucaaggagaacaagugcaacggcaccgacgccaaggugaagcugaucaagcaggagcuggacaaguacaagaacgccgugaccgagcugcagcugcugaugcagagcacccccgccgccggcagcggcagcgccaucugcagcggcaucgccgugugcaaggugcugcaccuggagggcgaggugaacaagaucaagaacgcccugcugagcaccaacaaggccguggugagccugagcaacggcgugagcgugcugaccuucaaggugcuggaccugaagaacuacaucgacaagcagcugcugcccauccugaacaagcagagcugcagcauccccaacaucgagaccgugaucgaguuccagcagaagaacaacagacugcuggagaucaccagagaguucagcgugaacgccggcgugaccacccccgugagcaccuacaugcugaccaacagcgagcugcugagccugaucaacgacaugcccaucaccaacgaccagaagaagcugaugagcaacaacgugcagaucgugagacagcagagcuacagcaucaugugcaucaucaaggaggaggugcuggccuacguggugcagcugccccuguacggcgugaucgacacccccugcuggaagcugcacaccagcccccugugcaccaccaacaccaaggagggcagcaacaucugccugaccagaaccgacagaggcugguacugcgacaacgccggcagcgugagcuucuucccccaggccgagaccugcaaggugcagagcaacagaguguucugcgacaccaugaacagccugacccugcccagcgaggugaaccugugcaacaucgacaucuucaaccccaaguacgacugcaagaucaugaccagcaagaccgacgugagcagcagcgugaucaccagccugggcgccaucgugagcugcuacggcaagaccaagugcaccgccagcaacaagaacagaggcaucaucaagaccuucagcaacggcugcgacuacgugagcaacaagggcguggacaccgugagcgugggcaacacccuguacugcgugaacaagcaggagggccagagccuguacgugaagggcgagcccaucaucaacuucuacgacccccugguguuccccagcgacgaguucgacgccagcaucagccaggugaacgagaagaucaaccagagccuggccuucaucagaaagagcgacgagcugcugcacaacgugaacgugggcaagagcaccaccaacaucaugaucaccaccaucaucaucgugaucaucgugauccugcugcugcugaucgccgugggccuguuccuguacugcaaggccagaagcacccccgugacccugagcaaggaccagcugagcggcaucaacaacaucgccuucagcaacugaggacuaguaauaaggaaacuguaugaaugucugugggcaggaagugaagagauccuucuguaaagguuuuuggaauuaugucugcugaauaauaaacuuuuuugaaauaauaaaucugguagaaaaaugagaucuaaaaaaaaaaaaaaaaaaaaaaaaaaaaaaaaaaaaaaaaaaaaaaaaaaaaaaaaaaaaaaaaugcaucccccccccccccccccccccccccccccccaaaggcucuuuucagagccaccagaauu

SEQ ID NO: 14234 - RNA, 1970 nt, Artificial Sequence
  mRNA product Design g-5 comprising derived and/or modified sequence from HRSV(Memphis-37)__AIY60640.1__F_DSCav1_mut1 (opt5)
gggagacccgugacccggaaguuguacggcuacgcgacuuucccucccacaaacccucgcgcccuuccuuuccuacuugggcccggcagaaagcuuaccauggagcugcccauccucaagaccaacgccauuacaacgauccuggcugccgugacccuuugcuucgcgagcucccagaauauuacagaagaguuuuaccaaucuaccuguagcgcugucuccaaaggcuaucugggggcccucagaacaggaugguacaccucuguuaucacaauugaacugagcaacaucaaggagaauaaaugcaacggcaccgacgccaaggugaaacuuaucaagcaggaacuggauaaguauaaaaaugcugugacggagcuccagcugcugaugcaguccaccccugccgcugggucuggaagcgccauuuguuccggcaucgcggucugcaaggugcuccaccuggagggggaaguuaacaaaauuaagaaugcccuucugagcacaaacaaagcuguggucucucucuccaauggagugagcguucugaccuucaaggugcuugaccugaagaacuacaucgauaaacaacuccugccgauucugaauaagcagucuuguuccauccccaacauugagacagucaucgaauuucagcagaaaaauaaccggcuccuggagaucacccgcgaguucagcgugaaugccggcgugacgacaccugucucuaccuauaugcuuacaaacuccgaacugcucagccugauuaacgacaugcccaucaccaaugaucaaaagaaacuuauguccaacaauguucagauugugagacagcagucuuacagcaucaugugcauuaucaaggaggaagugcuggcuuaugucgugcaacucccucuguacggcguuaucgacacccccuguuggaaacugcauacauccccucucugcacgaccaacacaaaggaggggagcaauauuugucugacccggacagaucgcggaugguacugcgacaacgccggcucuguguccuuuuucccgcaggcggaaaccuguaagguccagagcaauagaguguuuugcgauacgaugaacucucuuacacugcccagcgagguuaaucucugcaacaucgacauuuucaauccuaaauaugauuguaagaucaugaccuccaaaaccgacgugucuagcuccgucauuacaagccugggggccaucgugucuugcuacggaaagaccaaauguacagcuuccaacaagaaucggggcaucauuaagacguuuagcaacgggugcgauuaugucucuaauaaaggaguggacaccguuuccgugggcaacacacuuuacugugucaacaagcaagagggccagagccuguaugugaaaggggaacccaucauuaauuucuacgacccucucguuuuucccuccgaugaguucgacgccucuaucagccaggugaacgaaaagauuaaucagucccuggcuuuuauccgcaaaucugaugagcugcuccacaacgucaaugugggaaagagcaccacaaacauuaugaucaccacgaucauuaucgugauuaucguuauucugcuucugcucaucgccgucggccuguuccuguauugcaaggccagauccaccccggugacacuuagcaaagaccaacucucugggaucaauaacauugcuuucuccaauugaggacuaguaauaaggaaacuguaugaaugucugugggcaggaagugaagagauccuucuguaaagguuuuuggaauuaugucugcugaauaauaaacuuuuuugaaauaauaaaucugguagaaaaaugagaucuaaaaaaaaaaaaaaaaaaaaaaaaaaaaaaaaaaaaaaaaaaaaaaaaaaaaaaaaaaaaaaaaugcaucccccccccccccccccccccccccccccccaaaggcucuuuucagagccaccagaauu

SEQ ID NO: 14235 - RNA, 1970 nt, Artificial Sequence
  mRNA product Design g-5 comprising derived and/or modified sequence from HRSV(Memphis-37)__AIY60640.1__F_DSCav1_mut1 (opt6)
gggagacccgugacccggaaguuguacggcuacgcgacuuucccucccacaaacccucgcgcccuuccuuuccuacuugggcccggcagaaagcuuaccauggaacuuccaauucuaaaaaccaaugcuauaacaacaauauuagcagcaguuacauuaugcuucgccucaucacaaaauaucacagaagaauuuuaccaauccacaugcucagcaguaucuaaaggguaccuaggagcccuacgaacaggaugguacacaucaguaauaacaauagaacucucaaacaucaaagaaaacaaaugcaauggaacagacgcuaaaguaaaauuaauaaaacaagaacuagacaaauacaaaaacgccgucaccgaacuucaguuacucaugcaaagcacaccugcagcaggaucagguucagcaauaugcucaggaauagcaguuugcaaaguauuacaccuagaaggugaagucaacaaaauaaaaaacgcacuucuaaguacuaacaaagcuguaguaucauuaucaaacggaguauccguacuaaccuuuaaaguccuagaccuaaaaaacuacauagacaaacaacuacucccaauacucaauaaacaauccugcucaauucccaacaucgaaacaguaauagaauuucaacaaaaaaacaaucgccuucuagaaauaacaagagaauuuucagucaacgccggaguaacaacaccaguaucaacauauaugcuaacaaacagugaacuauuauccuuaauaaacgacaugccaauaacaaaugaccaaaaaaaacuaauguccaauaauguccaaauaguaagacaacaaagcuauucaauuauguguauaauaaaagaagaaguauuagcauacguaguucaacuaccacuauauggcguuauagacacaccaugcuggaaauuacacacaagcccacuaugcacaacaaauacaaaagaaggauccaacauuugcuuaacuagaacugacagaggaugguacugcgacaacgcuggaucagucucuuucuucccacaagcagaaaccuguaaaguacaaucaaauagagucuucugcgacacaaugaacucacuaacucucccaucugaaguaaacuuaugcaacaucgauauauuuaacccaaaauacgauuguaaaauaaugacauccaaaacagacguuucaucaagcguaaucaccucccucggagcaaucguaagcugcuacgguaaaacaaaaugcacagcauccaacaaaaacagaggcaucauaaaaacauucucaaacggaugugacuauguaucaaacaaaggaguagacacaguuucaguaggcaauaccuuauacugugucaauaaacaagaaggacaaucacuauauguaaaaggagaaccuauaauaaacuucuacgacccccucgucuucccuagcgaugaauuugacgcaucaauaucgcaaguaaacgaaaaaauaaaccaaucauuagccuuuauaagaaaaucagacgaauuauuacacaacguaaacguggggaaaagcacaacuaacaucaugauaacaacuaucauaauuguaaucaucgucauccuauuacuccuaaucgcaguaggacuauuccuauacugcaaagcuagaucaacaccagucacccuaucgaaagaucaauugucaggaauaaacaauauagccuuuucaaauuaaggacuaguaauaaggaaacuguaugaaugucugugggcaggaagugaagagauccuucuguaaagguuuuuggaauuaugucugcugaauaauaaacuuuuuugaaauaauaaaucugguagaaaaaugagaucuaaaaaaaaaaaaaaaaaaaaaaaaaaaaaaaaaaaaaaaaaaaaaaaaaaaaaaaaaaaaaaaaugcaucccccccccccccccccccccccccccccccaaaggcucuuuucagagccaccagaauu

SEQ ID NO: 14236 - RNA, 1970 nt, Artificial Sequence
  mRNA product Design g-5 comprising derived and/or modified sequence from HRSV(Memphis-37)__AIY60640.1__F_DSCav1_mut1 (opt11)
gggagacccgugacccggaaguuguacggcuacgcgacuuucccucccacaaacccucgcgcccuuccuuuccuacuugggcccggcagaaagcuuaccauggaacuccccauccucaaaacgaacgccaucacaaccauccucgccgccgucacccucugcuucgcgucaucccaaaacauaacugaagaguucuaucaaucaaccugcuccgcagucucaaaaggcuaccucggcgcccuacggaccggcugguacacaagcgucaucacaauagaacuuuccaacaucaaagaaaacaaauguaacggcaccgacgcaaaagucaaacucauaaaacaagaacuagacaaauauaaaaacgccguaacugaacuacaacuccucaugcaaucaacuccugcagccgguagcggcuccgcaaucugcucaggcaucgcagucugcaaagucuuacaccuagaaggcgaagucaacaaaaucaagaacgcccuacuauccacaaacaaagcaguagucucucuauccaacggagucuccguccucacauucaaaguacucgaccuaaagaacuacaucgacaaacaacuacuaccaaucuuaaacaaacaauccugcucaaucccuaacauugaaaccgucauagaguuccaacagaaaaacaaccgccuccucgaaauaaccagagaguucucagucaacgccggcgucaccaccccggucucaaccuacaugcuaaccaacucugaacuucucagccuaaucaacgacaugcccauuaccaacgaccaaaagaaacucauguccaauaacguccaaaucguucgacaacaauccuacucaaucaugugcaucauaaaagaagaaguccuagcauacgucguccaacucccacuauacggcguaaucgacacccccugcuggaaacuccacaccuccccucucuguaccaccaacaccaaagaaggguccaacaucugccucacgcgcaccgaccgaggcugguauugcgacaaugcaggcucugucuccuucuucccccaagccgaaaccugcaaaguccaaucuaaccgcgucuucugcgacaccaugaacagucuuacccucccgucagaagucaaccucugcaacauagauaucuucaacccaaaauacgacugcaaaaucaugaccucaaaaaccgacguuuccucauccguuaucaccucccucggcgcaaucgucagcugcuacggcaagacaaagugcacggcuucaaacaaaaaccgcggaaucaucaagacauucagcaacggcugcgacuacguauccaacaaaggaguggacacagucuccguuggaaacacccucuacugcguaaacaaacaagaaggccaaucacucuacgucaaaggcgaacccaucaucaacuucuacgacccacucgucuuccccuccgacgaguucgacgccucaaucagccaagucaacgagaaaauuaaccagucacucgccuucauacgcaaauccgacgaacuucuacacaacguaaacgucggaaaaucaaccacaaacaucaugauuaccacaauuaucauagucaucauaguaauccuccugcuacucauagcagucggacucuuccuauacugcaaagcccgcuccaccccugucacccuauccaaagaccaacuuuccggcaucaacaacauagccuuuuccaacuaaggacuaguaauaaggaaacuguaugaaugucugugggcaggaagugaagagauccuucuguaaagguuuuuggaauuaugucugcugaauaauaaacuuuuuugaaauaauaaaucugguagaaaaaugagaucuaaaaaaaaaaaaaaaaaaaaaaaaaaaaaaaaaaaaaaaaaaaaaaaaaaaaaaaaaaaaaaaaugcaucccccccccccccccccccccccccccccccaaaggcucuuuucagagccaccagaauu

SEQ ID NO: 14237 - RNA, 1986 nt, Artificial Sequence
  mRNA product Design h-1 comprising derived and/or modified sequence from HRSV(Memphis-37)__AIY60640.1__F_DSCav1_mut1 (opt1)
gggagacccgugacccggaaguuguacggcuacgcgacuuucccucccacaaacccucgcgcccuuccuuuccuacuugggcccggcagaaagcuuaccauggagcugcccauccucaagaccaacgccaucaccacgauccuggccgcggugacccugugcuucgccagcucccagaacaucaccgaggaguucuaccagagcacgugcuccgccgucagcaagggcuaccucggcgcccugcgcaccgggugguacaccagcgugaucaccaucgagcuguccaacaucaaggagaacaagugcaacggcaccgacgccaaggugaagcucaucaagcaggagcuggacaaguacaagaacgcggucacggagcugcagcuccugaugcagagcaccccggccgccggcuccgggagcgcgaucugcuccggcaucgccgucugcaaggugcugcaccucgagggcgaggugaacaagaucaagaacgcccugcuguccaccaacaaggccgucgugagccucuccaacggggugagcguccugaccuucaaggugcuggaccucaagaacuacaucgacaagcagcugcugcccauccugaacaagcagagcugcuccauccccaacaucgagaccgucaucgaguuccagcagaagaacaaccgccuccuggagaucacgcgggaguucagcgugaacgcgggcgugaccacccccgucuccaccuacaugcugacgaacagcgagcuccugucccugaucaacgacaugccgaucaccaacgaccagaagaagcucaugagcaacaacgugcagaucgugcgccagcaguccuacagcaucaugugcaucaucaaggaggagguccuggccuacguggugcagcugccccucuacggggucaucgacacccccugcuggaagcugcacaccagcccccugugcacgaccaacaccaaggagggcuccaacaucugccucacccggacggaccgcgggugguacugcgacaacgccggcagcguguccuucuucccgcaggccgagaccugcaagguccagagcaaccggguguucugcgacaccaugaacucccugacccugcccagcgaggugaaccucugcaacaucgacaucuucaaccccaaguacgacugcaagaucaugacguccaagaccgacgucagcuccagcgugaucaccucccugggcgccaucgugagcugcuacgggaagaccaagugcacggcgagcaacaagaaccgcggcaucaucaagaccuucuccaacgggugcgacuacgucagcaacaagggcguggacaccguguccgucggcaacacccuguacugcgugaacaagcaggagggccagagccucuacgugaagggggagcccaucaucaacuucuacgacccgcuggucuuccccuccgacgaguucgacgccagcaucucccaggugaacgagaagaucaaccagagccuggccuucauccggaaguccgacgagcuccugcacaacgugaacgucggcaagagcaccacgaacaucaugaucaccaccaucaucaucgugaucaucgugauccugcugcuccugaucgccgucgggcuguuccucuacugcaaggcccgcuccacccccgugacgcugagcaaggaccagcuguccgggaucaacaacaucgcguucagcaacugaggacuaguacuggcugcaucucccuuuccucuguccuccauccuucucccaggauggugaagggggaccugguacccagugauccccaccccaggauccuaaaucaugacuuaccugcuaauaaaaacucauuggaaaagugagaagaucuaaaaaaaaaaaaaaaaaaaaaaaaaaaaaaaaaaaaaaaaaaaaaaaaaaaaaaaaaaaaaaaaugcaucccccccccccccccccccccccccccccccaaaggcucuuuucagagccaccagaauu

SEQ ID NO: 14238 - RNA, 1986 nt, Artificial Sequence
  mRNA product Design h-1 comprising derived and/or modified sequence from HRSV(Memphis-37)__AIY60640.1__F_DSCav1_mut1 (opt1)
gggagacccgugacccggaaguuguacggcuacgcgacuuucccucccacaaacccucgcgcccuuccuuuccuacuugggcccggcagaaagcuuaccauggagcugcccauccucaagaccaacgccaucaccacgauccuggccgcggugacccugugcuucgccagcucccagaacaucaccgaggaguucuaccagagcacgugcuccgccgucagcaagggcuaccucggggcccugcgcaccggcugguacaccuccgugaucaccaucgagcugagcaacaucaaggagaacaagugcaacgggaccgacgccaaggugaagcucaucaagcaggagcuggacaaguacaagaacgcggucacggagcugcagcuccugaugcaguccaccccggccgccggcagcggguccgccaucugcagcggcaucgcggugugcaaggugcugcaccucgagggcgaggucaacaagaucaagaacgcccugcuguccaccaacaaggccguggugagccucuccaacggggucagcgugcugaccuucaaggugcuggaccucaagaacuacaucgacaagcagcugcugcccauccucaacaagcaguccugcagcauccccaacaucgagacggucaucgaguuccagcagaagaacaaccggcugcuggagaucacccgcgaguucuccgugaacgccggcgugaccacccccgucagcacguacaugcucaccaacuccgagcugcugagccucaucaacgacaugccgaucaccaacgaccagaagaagcugaugagcaacaacgugcagaucgugcggcagcaguccuacagcaucaugugcaucaucaaggaggagguccuggccuacguggugcagcucccccuguacggggucaucgacacccccugcuggaagcugcacacgagcccccucugcaccaccaacaccaaggagggcuccaacaucugccugacgcgcaccgaccgggggugguacugcgacaacgcgggcuccgugagcuucuucccgcaggccgagaccugcaaggugcaguccaaccgcgucuucugcgacaccaugaacagccugacgcuccccuccgaggugaaccugugcaacaucgacaucuucaaccccaaguacgacugcaagaucaugaccagcaagaccgacgucuccagcuccgugaucaccagccugggcgccaucguguccugcuacgggaagacgaagugcaccgccagcaacaagaaccggggcaucaucaagaccuucuccaacgggugcgacuacgucagcaacaagggcguggacaccguguccgucggcaacacgcucuacugcgugaacaagcaggaggggcagagccuguacgugaagggcgagcccaucaucaacuucuacgacccgcuggucuuccccagcgacgaguucgacgccuccaucagccaggugaacgagaagaucaaccagucccucgcguucauccgcaagagcgacgagcugcugcacaacgugaacgucgggaaguccaccaccaacaucaugaucaccaccaucaucaucgugaucaucgugauccuccugcugcucaucgccgucggccuguuccuguacugcaaggcccggagcacgcccgugacccuguccaaggaccagcucagcgggaucaacaacaucgccuucuccaacugaggacuaguacuggcugcaucucccuuuccucuguccuccauccuucucccaggauggugaagggggaccugguacccagugauccccaccccaggauccuaaaucaugacuuaccugcuaauaaaaacucauuggaaaagugagaagaucuaaaaaaaaaaaaaaaaaaaaaaaaaaaaaaaaaaaaaaaaaaaaaaaaaaaaaaaaaaaaaaaaugcaucccccccccccccccccccccccccccccccaaaggcucuuuucagagccaccagaauu

SEQ ID NO: 14239 - RNA, 1986 nt, Artificial Sequence
  mRNA product Design h-1 comprising derived and/or modified sequence from HRSV(Memphis-37)__AIY60640.1__F_DSCav1_mut1 (opt2)
gggagacccgugacccggaaguuguacggcuacgcgacuuucccucccacaaacccucgcgcccuuccuuuccuacuugggcccggcagaaagcuuaccauggagcuccccauccucaagaccaacgccaucaccaccauccucgccgccgucacccucugcuucgccuccucccagaacaucaccgaggaguucuaccaguccaccugcuccgccgucuccaagggcuaccucggcgcccuccgcaccggcugguacaccuccgucaucaccaucgagcucuccaacaucaaggagaacaagugcaacggcaccgacgccaaggucaagcucaucaagcaggagcucgacaaguacaagaacgccgucaccgagcuccagcuccucaugcaguccacccccgccgccggcuccggcuccgccaucugcuccggcaucgccgucugcaagguccuccaccucgagggcgaggucaacaagaucaagaacgcccuccucuccaccaacaaggccgucgucucccucuccaacggcgucuccguccucaccuucaagguccucgaccucaagaacuacaucgacaagcagcuccuccccauccucaacaagcaguccugcuccauccccaacaucgagaccgucaucgaguuccagcagaagaacaaccgccuccucgagaucacccgcgaguucuccgucaacgccggcgucaccacccccgucuccaccuacaugcucaccaacuccgagcuccucucccucaucaacgacaugcccaucaccaacgaccagaagaagcucauguccaacaacguccagaucguccgccagcaguccuacuccaucaugugcaucaucaaggaggagguccucgccuacgucguccagcucccccucuacggcgucaucgacacccccugcuggaagcuccacaccuccccccucugcaccaccaacaccaaggagggcuccaacaucugccucacccgcaccgaccgcggcugguacugcgacaacgccggcuccgucuccuucuucccccaggccgagaccugcaagguccaguccaaccgcgucuucugcgacaccaugaacucccucacccuccccuccgaggucaaccucugcaacaucgacaucuucaaccccaaguacgacugcaagaucaugaccuccaagaccgacgucuccuccuccgucaucaccucccucggcgccaucgucuccugcuacggcaagaccaagugcaccgccuccaacaagaaccgcggcaucaucaagaccuucuccaacggcugcgacuacgucuccaacaagggcgucgacaccgucuccgucggcaacacccucuacugcgucaacaagcaggagggccagucccucuacgucaagggcgagcccaucaucaacuucuacgacccccucgucuuccccuccgacgaguucgacgccuccaucucccaggucaacgagaagaucaaccagucccucgccuucauccgcaaguccgacgagcuccuccacaacgucaacgucggcaaguccaccaccaacaucaugaucaccaccaucaucaucgucaucaucgucauccuccuccuccucaucgccgucggccucuuccucuacugcaaggcccgcuccacccccgucacccucuccaaggaccagcucuccggcaucaacaacaucgccuucuccaacugaggacuaguacuggcugcaucucccuuuccucuguccuccauccuucucccaggauggugaagggggaccugguacccagugauccccaccccaggauccuaaaucaugacuuaccugcuaauaaaaacucauuggaaaagugagaagaucuaaaaaaaaaaaaaaaaaaaaaaaaaaaaaaaaaaaaaaaaaaaaaaaaaaaaaaaaaaaaaaaaugcaucccccccccccccccccccccccccccccccaaaggcucuuuucagagccaccagaauu

SEQ ID NO: 14240 - RNA, 1986 nt, Artificial Sequence
  mRNA product Design h-1 comprising derived and/or modified sequence from HRSV(Memphis-37)__AIY60640.1__F_DSCav1_mut1 (opt3)
gggagacccgugacccggaaguuguacggcuacgcgacuuucccucccacaaacccucgcgcccuuccuuuccuacuugggcccggcagaaagcuuaccauggagcugcccauccucaagaccaacgccauuacaacuauacuugcugcagugacgcugugcuucgccagcucccagaauaucaccgaagaguuuuaccaaucuacauguucagcggucaguaaaggcuauuugggggcuuuaagaacuggaugguacaccagcguuauuacaaucgaacuguccaacauuaaggagaauaaaugcaacgguaccgacgccaaggugaaacuaaucaagcaggaacucgauaaguauaaaaaugcaguaacugagcugcagcuucugaugcagucuacuccugccgcuggcucggggucagcaauauguagcggaaucgccgugugcaaggucuugcaccucgagggcgaagugaacaaaauuaagaaugcucugcugaguaccaacaaagccguugugucccucucuaauggugucagcguguuaacguucaagguacuggaccuuaagaacuacaucgauaaacaauugcugccaauucuaaauaagcaguccuguucaaucccgaacauagagacuguuauugaauuucagcagaaaaauaacaggcuccuggagaucacccgggaguucagugugaaugcgggggucacaacucccgugagcaccuauaugcuuacaaacucugaacuguugucccucauuaacgacaugccuaucaccaaugaucaaaagaaacugaugucaaacaaugugcagaucguccgccagcagagcuacaguauuaugugcauaaucaaggaggaaguuuuagcauaugugguacaacugccacucuacggagugauugacacgcccuguuggaaacuucauacuucuccucugugcacaaccaacacuaaggagggcuccaauaucuguuugacacgaaccgaucguggcugguacugcgacaacgccgggagcgucucguuuuucccacaggcugaaacguguaaggugcagucuaauagaguguuuugcgauaccaugaacucccuaacacugcccucagagguuaaucucugcaacauagacauuuucaauccuaaauaugauuguaagaucaugacaaguaaaaccgacgucagcuccucugugaucacaagccugggagccauuguaucaugcuacgguaagacuaaauguaccgcaaguaacaagaauaggggcaucauuaagacauuuuccaacgggugcgauuauguuagcaauaaaggaguggacaccgucucugugggcaacacucuuuacugugucaacaagcaagagggucagucacuguaugugaaaggggaaccaauaaucaauuucuacgacccguugguuuuucccagugaugaguucgacgcuagcauuucccaggugaacgaaaagaucaaucagucucucgccuuuauccggaaaucggaugagcuguuacacaacguaaaugucggaaagagcacgacaaacauuaugauaaccacuaucauuaucgugauuaucguuauacugcuacuccugaucgcggugggccuuuucuuguauugcaaggcccgcuccaccccugucacacugucaaaagaccaacucaguggcauuaauaacaucgcauucucuaauugaggacuaguacuggcugcaucucccuuuccucuguccuccauccuucucccaggauggugaagggggaccugguacccagugauccccaccccaggauccuaaaucaugacuuaccugcuaauaaaaacucauuggaaaagugagaagaucuaaaaaaaaaaaaaaaaaaaaaaaaaaaaaaaaaaaaaaaaaaaaaaaaaaaaaaaaaaaaaaaaugcaucccccccccccccccccccccccccccccccaaaggcucuuuucagagccaccagaauu

SEQ ID NO: 14241 - RNA, 1986 nt, Artificial Sequence
  mRNA product Design h-1 comprising derived and/or modified sequence from HRSV(Memphis-37)__AIY60640.1__F_DSCav1_mut1 (opt4)
gggagacccgugacccggaaguuguacggcuacgcgacuuucccucccacaaacccucgcgcccuuccuuuccuacuugggcccggcagaaagcuuaccauggagcugcccauccugaagaccaacgccaucaccaccauccuggccgccgugacccugugcuucgccagcagccagaacaucaccgaggaguucuaccagagcaccugcagcgccgugagcaagggcuaccugggcgcccugagaaccggcugguacaccagcgugaucaccaucgagcugagcaacaucaaggagaacaagugcaacggcaccgacgccaaggugaagcugaucaagcaggagcuggacaaguacaagaacgccgugaccgagcugcagcugcugaugcagagcacccccgccgccggcagcggcagcgccaucugcagcggcaucgccgugugcaaggugcugcaccuggagggcgaggugaacaagaucaagaacgcccugcugagcaccaacaaggccguggugagccugagcaacggcgugagcgugcugaccuucaaggugcuggaccugaagaacuacaucgacaagcagcugcugcccauccugaacaagcagagcugcagcauccccaacaucgagaccgugaucgaguuccagcagaagaacaacagacugcuggagaucaccagagaguucagcgugaacgccggcgugaccacccccgugagcaccuacaugcugaccaacagcgagcugcugagccugaucaacgacaugcccaucaccaacgaccagaagaagcugaugagcaacaacgugcagaucgugagacagcagagcuacagcaucaugugcaucaucaaggaggaggugcuggccuacguggugcagcugccccuguacggcgugaucgacacccccugcuggaagcugcacaccagcccccugugcaccaccaacaccaaggagggcagcaacaucugccugaccagaaccgacagaggcugguacugcgacaacgccggcagcgugagcuucuucccccaggccgagaccugcaaggugcagagcaacagaguguucugcgacaccaugaacagccugacccugcccagcgaggugaaccugugcaacaucgacaucuucaaccccaaguacgacugcaagaucaugaccagcaagaccgacgugagcagcagcgugaucaccagccugggcgccaucgugagcugcuacggcaagaccaagugcaccgccagcaacaagaacagaggcaucaucaagaccuucagcaacggcugcgacuacgugagcaacaagggcguggacaccgugagcgugggcaacacccuguacugcgugaacaagcaggagggccagagccuguacgugaagggcgagcccaucaucaacuucuacgacccccugguguuccccagcgacgaguucgacgccagcaucagccaggugaacgagaagaucaaccagagccuggccuucaucagaaagagcgacgagcugcugcacaacgugaacgugggcaagagcaccaccaacaucaugaucaccaccaucaucaucgugaucaucgugauccugcugcugcugaucgccgugggccuguuccuguacugcaaggccagaagcacccccgugacccugagcaaggaccagcugagcggcaucaacaacaucgccuucagcaacugaggacuaguacuggcugcaucucccuuuccucuguccuccauccuucucccaggauggugaagggggaccugguacccagugauccccaccccaggauccuaaaucaugacuuaccugcuaauaaaaacucauuggaaaagugagaagaucuaaaaaaaaaaaaaaaaaaaaaaaaaaaaaaaaaaaaaaaaaaaaaaaaaaaaaaaaaaaaaaaaugcaucccccccccccccccccccccccccccccccaaaggcucuuuucagagccaccagaauu

SEQ ID NO: 14242 - RNA, 1986 nt, Artificial Sequence
  mRNA product Design h-1 comprising derived and/or modified sequence from HRSV(Memphis-37)__AIY60640.1__F_DSCav1_mut1 (opt5)
gggagacccgugacccggaaguuguacggcuacgcgacuuucccucccacaaacccucgcgcccuuccuuuccuacuugggcccggcagaaagcuuaccauggagcugcccauccucaagaccaacgccauuacaacgauccuggcugccgugacccuuugcuucgcgagcucccagaauauuacagaagaguuuuaccaaucuaccuguagcgcugucuccaaaggcuaucugggggcccucagaacaggaugguacaccucuguuaucacaauugaacugagcaacaucaaggagaauaaaugcaacggcaccgacgccaaggugaaacuuaucaagcaggaacuggauaaguauaaaaaugcugugacggagcuccagcugcugaugcaguccaccccugccgcugggucuggaagcgccauuuguuccggcaucgcggucugcaaggugcuccaccuggagggggaaguuaacaaaauuaagaaugcccuucugagcacaaacaaagcuguggucucucucuccaauggagugagcguucugaccuucaaggugcuugaccugaagaacuacaucgauaaacaacuccugccgauucugaauaagcagucuuguuccauccccaacauugagacagucaucgaauuucagcagaaaaauaaccggcuccuggagaucacccgcgaguucagcgugaaugccggcgugacgacaccugucucuaccuauaugcuuacaaacuccgaacugcucagccugauuaacgacaugcccaucaccaaugaucaaaagaaacuuauguccaacaauguucagauugugagacagcagucuuacagcaucaugugcauuaucaaggaggaagugcuggcuuaugucgugcaacucccucuguacggcguuaucgacacccccuguuggaaacugcauacauccccucucugcacgaccaacacaaaggaggggagcaauauuugucugacccggacagaucgcggaugguacugcgacaacgccggcucuguguccuuuuucccgcaggcggaaaccuguaagguccagagcaauagaguguuuugcgauacgaugaacucucuuacacugcccagcgagguuaaucucugcaacaucgacauuuucaauccuaaauaugauuguaagaucaugaccuccaaaaccgacgugucuagcuccgucauuacaagccugggggccaucgugucuugcuacggaaagaccaaauguacagcuuccaacaagaaucggggcaucauuaagacguuuagcaacgggugcgauuaugucucuaauaaaggaguggacaccguuuccgugggcaacacacuuuacugugucaacaagcaagagggccagagccuguaugugaaaggggaacccaucauuaauuucuacgacccucucguuuuucccuccgaugaguucgacgccucuaucagccaggugaacgaaaagauuaaucagucccuggcuuuuauccgcaaaucugaugagcugcuccacaacgucaaugugggaaagagcaccacaaacauuaugaucaccacgaucauuaucgugauuaucguuauucugcuucugcucaucgccgucggccuguuccuguauugcaaggccagauccaccccggugacacuuagcaaagaccaacucucugggaucaauaacauugcuuucuccaauugaggacuaguacuggcugcaucucccuuuccucuguccuccauccuucucccaggauggugaagggggaccugguacccagugauccccaccccaggauccuaaaucaugacuuaccugcuaauaaaaacucauuggaaaagugagaagaucuaaaaaaaaaaaaaaaaaaaaaaaaaaaaaaaaaaaaaaaaaaaaaaaaaaaaaaaaaaaaaaaaugcaucccccccccccccccccccccccccccccccaaaggcucuuuucagagccaccagaauu

SEQ ID NO: 14243 - RNA, 1986 nt, Artificial Sequence
  mRNA product Design h-1 comprising derived and/or modified sequence from HRSV(Memphis-37)__AIY60640.1__F_DSCav1_mut1 (opt6)
gggagacccgugacccggaaguuguacggcuacgcgacuuucccucccacaaacccucgcgcccuuccuuuccuacuugggcccggcagaaagcuuaccauggaacuuccaauucuaaaaaccaaugcuauaacaacaauauuagcagcaguuacauuaugcuucgccucaucacaaaauaucacagaagaauuuuaccaauccacaugcucagcaguaucuaaaggguaccuaggagcccuacgaacaggaugguacacaucaguaauaacaauagaacucucaaacaucaaagaaaacaaaugcaauggaacagacgcuaaaguaaaauuaauaaaacaagaacuagacaaauacaaaaacgccgucaccgaacuucaguuacucaugcaaagcacaccugcagcaggaucagguucagcaauaugcucaggaauagcaguuugcaaaguauuacaccuagaaggugaagucaacaaaauaaaaaacgcacuucuaaguacuaacaaagcuguaguaucauuaucaaacggaguauccguacuaaccuuuaaaguccuagaccuaaaaaacuacauagacaaacaacuacucccaauacucaauaaacaauccugcucaauucccaacaucgaaacaguaauagaauuucaacaaaaaaacaaucgccuucuagaaauaacaagagaauuuucagucaacgccggaguaacaacaccaguaucaacauauaugcuaacaaacagugaacuauuauccuuaauaaacgacaugccaauaacaaaugaccaaaaaaaacuaauguccaauaauguccaaauaguaagacaacaaagcuauucaauuauguguauaauaaaagaagaaguauuagcauacguaguucaacuaccacuauauggcguuauagacacaccaugcuggaaauuacacacaagcccacuaugcacaacaaauacaaaagaaggauccaacauuugcuuaacuagaacugacagaggaugguacugcgacaacgcuggaucagucucuuucuucccacaagcagaaaccuguaaaguacaaucaaauagagucuucugcgacacaaugaacucacuaacucucccaucugaaguaaacuuaugcaacaucgauauauuuaacccaaaauacgauuguaaaauaaugacauccaaaacagacguuucaucaagcguaaucaccucccucggagcaaucguaagcugcuacgguaaaacaaaaugcacagcauccaacaaaaacagaggcaucauaaaaacauucucaaacggaugugacuauguaucaaacaaaggaguagacacaguuucaguaggcaauaccuuauacugugucaauaaacaagaaggacaaucacuauauguaaaaggagaaccuauaauaaacuucuacgacccccucgucuucccuagcgaugaauuugacgcaucaauaucgcaaguaaacgaaaaaauaaaccaaucauuagccuuuauaagaaaaucagacgaauuauuacacaacguaaacguggggaaaagcacaacuaacaucaugauaacaacuaucauaauuguaaucaucgucauccuauuacuccuaaucgcaguaggacuauuccuauacugcaaagcuagaucaacaccagucacccuaucgaaagaucaauugucaggaauaaacaauauagccuuuucaaauuaaggacuaguacuggcugcaucucccuuuccucuguccuccauccuucucccaggauggugaagggggaccugguacccagugauccccaccccaggauccuaaaucaugacuuaccugcuaauaaaaacucauuggaaaagugagaagaucuaaaaaaaaaaaaaaaaaaaaaaaaaaaaaaaaaaaaaaaaaaaaaaaaaaaaaaaaaaaaaaaaugcaucccccccccccccccccccccccccccccccaaaggcucuuuucagagccaccagaauu

SEQ ID NO: 14244 - RNA, 1986 nt, Artificial Sequence
  mRNA product Design h-1 comprising derived and/or modified sequence from HRSV(Memphis-37)__AIY60640.1__F_DSCav1_mut1 (opt11)
gggagacccgugacccggaaguuguacggcuacgcgacuuucccucccacaaacccucgcgcccuuccuuuccuacuugggcccggcagaaagcuuaccauggaacuccccauccucaaaacgaacgccaucacaaccauccucgccgccgucacccucugcuucgcgucaucccaaaacauaacugaagaguucuaucaaucaaccugcuccgcagucucaaaaggcuaccucggcgcccuacggaccggcugguacacaagcgucaucacaauagaacuuuccaacaucaaagaaaacaaauguaacggcaccgacgcaaaagucaaacucauaaaacaagaacuagacaaauauaaaaacgccguaacugaacuacaacuccucaugcaaucaacuccugcagccgguagcggcuccgcaaucugcucaggcaucgcagucugcaaagucuuacaccuagaaggcgaagucaacaaaaucaagaacgcccuacuauccacaaacaaagcaguagucucucuauccaacggagucuccguccucacauucaaaguacucgaccuaaagaacuacaucgacaaacaacuacuaccaaucuuaaacaaacaauccugcucaaucccuaacauugaaaccgucauagaguuccaacagaaaaacaaccgccuccucgaaauaaccagagaguucucagucaacgccggcgucaccaccccggucucaaccuacaugcuaaccaacucugaacuucucagccuaaucaacgacaugcccauuaccaacgaccaaaagaaacucauguccaauaacguccaaaucguucgacaacaauccuacucaaucaugugcaucauaaaagaagaaguccuagcauacgucguccaacucccacuauacggcguaaucgacacccccugcuggaaacuccacaccuccccucucuguaccaccaacaccaaagaaggguccaacaucugccucacgcgcaccgaccgaggcugguauugcgacaaugcaggcucugucuccuucuucccccaagccgaaaccugcaaaguccaaucuaaccgcgucuucugcgacaccaugaacagucuuacccucccgucagaagucaaccucugcaacauagauaucuucaacccaaaauacgacugcaaaaucaugaccucaaaaaccgacguuuccucauccguuaucaccucccucggcgcaaucgucagcugcuacggcaagacaaagugcacggcuucaaacaaaaaccgcggaaucaucaagacauucagcaacggcugcgacuacguauccaacaaaggaguggacacagucuccguuggaaacacccucuacugcguaaacaaacaagaaggccaaucacucuacgucaaaggcgaacccaucaucaacuucuacgacccacucgucuuccccuccgacgaguucgacgccucaaucagccaagucaacgagaaaauuaaccagucacucgccuucauacgcaaauccgacgaacuucuacacaacguaaacgucggaaaaucaaccacaaacaucaugauuaccacaauuaucauagucaucauaguaauccuccugcuacucauagcagucggacucuuccuauacugcaaagcccgcuccaccccugucacccuauccaaagaccaacuuuccggcaucaacaacauagccuuuuccaacuaaggacuaguacuggcugcaucucccuuuccucuguccuccauccuucucccaggauggugaagggggaccugguacccagugauccccaccccaggauccuaaaucaugacuuaccugcuaauaaaaacucauuggaaaagugagaagaucuaaaaaaaaaaaaaaaaaaaaaaaaaaaaaaaaaaaaaaaaaaaaaaaaaaaaaaaaaaaaaaaaugcaucccccccccccccccccccccccccccccccaaaggcucuuuucagagccaccagaauu

SEQ ID NO: 14245 - RNA, 2202 nt, Artificial Sequence
  mRNA product Design h-2 comprising derived and/or modified sequence from HRSV(Memphis-37)__AIY60640.1__F_DSCav1_mut1 (opt1)
gggagacccgugacccggaaguuguacggcuacgcgacuuucccucccacaaacccucgcgcccuuccuuuccuacuugggcccggcagaaagcuuaccauggagcugcccauccucaagaccaacgccaucaccacgauccuggccgcggugacccugugcuucgccagcucccagaacaucaccgaggaguucuaccagagcacgugcuccgccgucagcaagggcuaccucggcgcccugcgcaccgggugguacaccagcgugaucaccaucgagcuguccaacaucaaggagaacaagugcaacggcaccgacgccaaggugaagcucaucaagcaggagcuggacaaguacaagaacgcggucacggagcugcagcuccugaugcagagcaccccggccgccggcuccgggagcgcgaucugcuccggcaucgccgucugcaaggugcugcaccucgagggcgaggugaacaagaucaagaacgcccugcuguccaccaacaaggccgucgugagccucuccaacggggugagcguccugaccuucaaggugcuggaccucaagaacuacaucgacaagcagcugcugcccauccugaacaagcagagcugcuccauccccaacaucgagaccgucaucgaguuccagcagaagaacaaccgccuccuggagaucacgcgggaguucagcgugaacgcgggcgugaccacccccgucuccaccuacaugcugacgaacagcgagcuccugucccugaucaacgacaugccgaucaccaacgaccagaagaagcucaugagcaacaacgugcagaucgugcgccagcaguccuacagcaucaugugcaucaucaaggaggagguccuggccuacguggugcagcugccccucuacggggucaucgacacccccugcuggaagcugcacaccagcccccugugcacgaccaacaccaaggagggcuccaacaucugccucacccggacggaccgcgggugguacugcgacaacgccggcagcguguccuucuucccgcaggccgagaccugcaagguccagagcaaccggguguucugcgacaccaugaacucccugacccugcccagcgaggugaaccucugcaacaucgacaucuucaaccccaaguacgacugcaagaucaugacguccaagaccgacgucagcuccagcgugaucaccucccugggcgccaucgugagcugcuacgggaagaccaagugcacggcgagcaacaagaaccgcggcaucaucaagaccuucuccaacgggugcgacuacgucagcaacaagggcguggacaccguguccgucggcaacacccuguacugcgugaacaagcaggagggccagagccucuacgugaagggggagcccaucaucaacuucuacgacccgcuggucuuccccuccgacgaguucgacgccagcaucucccaggugaacgagaagaucaaccagagccuggccuucauccggaaguccgacgagcuccugcacaacgugaacgucggcaagagcaccacgaacaucaugaucaccaccaucaucaucgugaucaucgugauccugcugcuccugaucgccgucgggcuguuccucuacugcaaggcccgcuccacccccgugacgcugagcaaggaccagcuguccgggaucaacaacaucgcguucagcaacugaggacuagugaagggaacacccaaauuuaauucagccuuaagcacaauuaauuaagagugaaacguaauuguacaagcaguuggucacccaccauagggcaugaucaacaccgcaaccuuuccuuuuucccccagugauucugaaaaaccccucuucccuucagcuugcuuagauguuccaaauuuaguaagcuuaaggcggccuacagaagaaaaagaaaaaaaaggccacaaaaguucccucucacuuucaguaaauaaaauaaaagcagcaacagaaauaaagaaauaaaugaaauucaaaaugaaauaaauauuguguugugcagcauuaaaaaaucaauaaaaauuaaaaaugagcaagaucuaaaaaaaaaaaaaaaaaaaaaaaaaaaaaaaaaaaaaaaaaaaaaaaaaaaaaaaaaaaaaaaaugcaucccccccccccccccccccccccccccccccaaaggcucuuuucagagccaccagaauu

SEQ ID NO: 14246 - RNA, 2202 nt, Artificial Sequence
  mRNA product Design h-2 comprising derived and/or modified sequence from HRSV(Memphis-37)__AIY60640.1__F_DSCav1_mut1 (opt1)
gggagacccgugacccggaaguuguacggcuacgcgacuuucccucccacaaacccucgcgcccuuccuuuccuacuugggcccggcagaaagcuuaccauggagcugcccauccucaagaccaacgccaucaccacgauccuggccgcggugacccugugcuucgccagcucccagaacaucaccgaggaguucuaccagagcacgugcuccgccgucagcaagggcuaccucggggcccugcgcaccggcugguacaccuccgugaucaccaucgagcugagcaacaucaaggagaacaagugcaacgggaccgacgccaaggugaagcucaucaagcaggagcuggacaaguacaagaacgcggucacggagcugcagcuccugaugcaguccaccccggccgccggcagcggguccgccaucugcagcggcaucgcggugugcaaggugcugcaccucgagggcgaggucaacaagaucaagaacgcccugcuguccaccaacaaggccguggugagccucuccaacggggucagcgugcugaccuucaaggugcuggaccucaagaacuacaucgacaagcagcugcugcccauccucaacaagcaguccugcagcauccccaacaucgagacggucaucgaguuccagcagaagaacaaccggcugcuggagaucacccgcgaguucuccgugaacgccggcgugaccacccccgucagcacguacaugcucaccaacuccgagcugcugagccucaucaacgacaugccgaucaccaacgaccagaagaagcugaugagcaacaacgugcagaucgugcggcagcaguccuacagcaucaugugcaucaucaaggaggagguccuggccuacguggugcagcucccccuguacggggucaucgacacccccugcuggaagcugcacacgagcccccucugcaccaccaacaccaaggagggcuccaacaucugccugacgcgcaccgaccgggggugguacugcgacaacgcgggcuccgugagcuucuucccgcaggccgagaccugcaaggugcaguccaaccgcgucuucugcgacaccaugaacagccugacgcuccccuccgaggugaaccugugcaacaucgacaucuucaaccccaaguacgacugcaagaucaugaccagcaagaccgacgucuccagcuccgugaucaccagccugggcgccaucguguccugcuacgggaagacgaagugcaccgccagcaacaagaaccggggcaucaucaagaccuucuccaacgggugcgacuacgucagcaacaagggcguggacaccguguccgucggcaacacgcucuacugcgugaacaagcaggaggggcagagccuguacgugaagggcgagcccaucaucaacuucuacgacccgcuggucuuccccagcgacgaguucgacgccuccaucagccaggugaacgagaagaucaaccagucccucgcguucauccgcaagagcgacgagcugcugcacaacgugaacgucgggaaguccaccaccaacaucaugaucaccaccaucaucaucgugaucaucgugauccuccugcugcucaucgccgucggccuguuccuguacugcaaggcccggagcacgcccgugacccuguccaaggaccagcucagcgggaucaacaacaucgccuucuccaacugaggacuagugaagggaacacccaaauuuaauucagccuuaagcacaauuaauuaagagugaaacguaauuguacaagcaguuggucacccaccauagggcaugaucaacaccgcaaccuuuccuuuuucccccagugauucugaaaaaccccucuucccuucagcuugcuuagauguuccaaauuuaguaagcuuaaggcggccuacagaagaaaaagaaaaaaaaggccacaaaaguucccucucacuuucaguaaauaaaauaaaagcagcaacagaaauaaagaaauaaaugaaauucaaaaugaaauaaauauuguguugugcagcauuaaaaaaucaauaaaaauuaaaaaugagcaagaucuaaaaaaaaaaaaaaaaaaaaaaaaaaaaaaaaaaaaaaaaaaaaaaaaaaaaaaaaaaaaaaaaugcaucccccccccccccccccccccccccccccccaaaggcucuuuucagagccaccagaauu

SEQ ID NO: 14247 - RNA, 2202 nt, Artificial Sequence
  mRNA product Design h-2 comprising derived and/or modified sequence from HRSV(Memphis-37)__AIY60640.1__F_DSCav1_mut1 (opt2)
gggagacccgugacccggaaguuguacggcuacgcgacuuucccucccacaaacccucgcgcccuuccuuuccuacuugggcccggcagaaagcuuaccauggagcuccccauccucaagaccaacgccaucaccaccauccucgccgccgucacccucugcuucgccuccucccagaacaucaccgaggaguucuaccaguccaccugcuccgccgucuccaagggcuaccucggcgcccuccgcaccggcugguacaccuccgucaucaccaucgagcucuccaacaucaaggagaacaagugcaacggcaccgacgccaaggucaagcucaucaagcaggagcucgacaaguacaagaacgccgucaccgagcuccagcuccucaugcaguccacccccgccgccggcuccggcuccgccaucugcuccggcaucgccgucugcaagguccuccaccucgagggcgaggucaacaagaucaagaacgcccuccucuccaccaacaaggccgucgucucccucuccaacggcgucuccguccucaccuucaagguccucgaccucaagaacuacaucgacaagcagcuccuccccauccucaacaagcaguccugcuccauccccaacaucgagaccgucaucgaguuccagcagaagaacaaccgccuccucgagaucacccgcgaguucuccgucaacgccggcgucaccacccccgucuccaccuacaugcucaccaacuccgagcuccucucccucaucaacgacaugcccaucaccaacgaccagaagaagcucauguccaacaacguccagaucguccgccagcaguccuacuccaucaugugcaucaucaaggaggagguccucgccuacgucguccagcucccccucuacggcgucaucgacacccccugcuggaagcuccacaccuccccccucugcaccaccaacaccaaggagggcuccaacaucugccucacccgcaccgaccgcggcugguacugcgacaacgccggcuccgucuccuucuucccccaggccgagaccugcaagguccaguccaaccgcgucuucugcgacaccaugaacucccucacccuccccuccgaggucaaccucugcaacaucgacaucuucaaccccaaguacgacugcaagaucaugaccuccaagaccgacgucuccuccuccgucaucaccucccucggcgccaucgucuccugcuacggcaagaccaagugcaccgccuccaacaagaaccgcggcaucaucaagaccuucuccaacggcugcgacuacgucuccaacaagggcgucgacaccgucuccgucggcaacacccucuacugcgucaacaagcaggagggccagucccucuacgucaagggcgagcccaucaucaacuucuacgacccccucgucuuccccuccgacgaguucgacgccuccaucucccaggucaacgagaagaucaaccagucccucgccuucauccgcaaguccgacgagcuccuccacaacgucaacgucggcaaguccaccaccaacaucaugaucaccaccaucaucaucgucaucaucgucauccuccuccuccucaucgccgucggccucuuccucuacugcaaggcccgcuccacccccgucacccucuccaaggaccagcucuccggcaucaacaacaucgccuucuccaacugaggacuagugaagggaacacccaaauuuaauucagccuuaagcacaauuaauuaagagugaaacguaauuguacaagcaguuggucacccaccauagggcaugaucaacaccgcaaccuuuccuuuuucccccagugauucugaaaaaccccucuucccuucagcuugcuuagauguuccaaauuuaguaagcuuaaggcggccuacagaagaaaaagaaaaaaaaggccacaaaaguucccucucacuuucaguaaauaaaauaaaagcagcaacagaaauaaagaaauaaaugaaauucaaaaugaaauaaauauuguguugugcagcauuaaaaaaucaauaaaaauuaaaaaugagcaagaucuaaaaaaaaaaaaaaaaaaaaaaaaaaaaaaaaaaaaaaaaaaaaaaaaaaaaaaaaaaaaaaaaugcaucccccccccccccccccccccccccccccccaaaggcucuuuucagagccaccagaauu

SEQ ID NO: 14248 - RNA, 2202 nt, Artificial Sequence
  mRNA product Design h-2 comprising derived and/or modified sequence from HRSV(Memphis-37)__AIY60640.1__F_DSCav1_mut1 (opt3)
gggagacccgugacccggaaguuguacggcuacgcgacuuucccucccacaaacccucgcgcccuuccuuuccuacuugggcccggcagaaagcuuaccauggagcugcccauccucaagaccaacgccauuacaacuauacuugcugcagugacgcugugcuucgccagcucccagaauaucaccgaagaguuuuaccaaucuacauguucagcggucaguaaaggcuauuugggggcuuuaagaacuggaugguacaccagcguuauuacaaucgaacuguccaacauuaaggagaauaaaugcaacgguaccgacgccaaggugaaacuaaucaagcaggaacucgauaaguauaaaaaugcaguaacugagcugcagcuucugaugcagucuacuccugccgcuggcucggggucagcaauauguagcggaaucgccgugugcaaggucuugcaccucgagggcgaagugaacaaaauuaagaaugcucugcugaguaccaacaaagccguugugucccucucuaauggugucagcguguuaacguucaagguacuggaccuuaagaacuacaucgauaaacaauugcugccaauucuaaauaagcaguccuguucaaucccgaacauagagacuguuauugaauuucagcagaaaaauaacaggcuccuggagaucacccgggaguucagugugaaugcgggggucacaacucccgugagcaccuauaugcuuacaaacucugaacuguugucccucauuaacgacaugccuaucaccaaugaucaaaagaaacugaugucaaacaaugugcagaucguccgccagcagagcuacaguauuaugugcauaaucaaggaggaaguuuuagcauaugugguacaacugccacucuacggagugauugacacgcccuguuggaaacuucauacuucuccucugugcacaaccaacacuaaggagggcuccaauaucuguuugacacgaaccgaucguggcugguacugcgacaacgccgggagcgucucguuuuucccacaggcugaaacguguaaggugcagucuaauagaguguuuugcgauaccaugaacucccuaacacugcccucagagguuaaucucugcaacauagacauuuucaauccuaaauaugauuguaagaucaugacaaguaaaaccgacgucagcuccucugugaucacaagccugggagccauuguaucaugcuacgguaagacuaaauguaccgcaaguaacaagaauaggggcaucauuaagacauuuuccaacgggugcgauuauguuagcaauaaaggaguggacaccgucucugugggcaacacucuuuacugugucaacaagcaagagggucagucacuguaugugaaaggggaaccaauaaucaauuucuacgacccguugguuuuucccagugaugaguucgacgcuagcauuucccaggugaacgaaaagaucaaucagucucucgccuuuauccggaaaucggaugagcuguuacacaacguaaaugucggaaagagcacgacaaacauuaugauaaccacuaucauuaucgugauuaucguuauacugcuacuccugaucgcggugggccuuuucuuguauugcaaggcccgcuccaccccugucacacugucaaaagaccaacucaguggcauuaauaacaucgcauucucuaauugaggacuagugaagggaacacccaaauuuaauucagccuuaagcacaauuaauuaagagugaaacguaauuguacaagcaguuggucacccaccauagggcaugaucaacaccgcaaccuuuccuuuuucccccagugauucugaaaaaccccucuucccuucagcuugcuuagauguuccaaauuuaguaagcuuaaggcggccuacagaagaaaaagaaaaaaaaggccacaaaaguucccucucacuuucaguaaauaaaauaaaagcagcaacagaaauaaagaaauaaaugaaauucaaaaugaaauaaauauuguguugugcagcauuaaaaaaucaauaaaaauuaaaaaugagcaagaucuaaaaaaaaaaaaaaaaaaaaaaaaaaaaaaaaaaaaaaaaaaaaaaaaaaaaaaaaaaaaaaaaugcaucccccccccccccccccccccccccccccccaaaggcucuuuucagagccaccagaauu

SEQ ID NO: 14249 - RNA, 2202 nt, Artificial Sequence
  mRNA product Design h-2 comprising derived and/or modified sequence from HRSV(Memphis-37)__AIY60640.1__F_DSCav1_mut1 (opt4)
gggagacccgugacccggaaguuguacggcuacgcgacuuucccucccacaaacccucgcgcccuuccuuuccuacuugggcccggcagaaagcuuaccauggagcugcccauccugaagaccaacgccaucaccaccauccuggccgccgugacccugugcuucgccagcagccagaacaucaccgaggaguucuaccagagcaccugcagcgccgugagcaagggcuaccugggcgcccugagaaccggcugguacaccagcgugaucaccaucgagcugagcaacaucaaggagaacaagugcaacggcaccgacgccaaggugaagcugaucaagcaggagcuggacaaguacaagaacgccgugaccgagcugcagcugcugaugcagagcacccccgccgccggcagcggcagcgccaucugcagcggcaucgccgugugcaaggugcugcaccuggagggcgaggugaacaagaucaagaacgcccugcugagcaccaacaaggccguggugagccugagcaacggcgugagcgugcugaccuucaaggugcuggaccugaagaacuacaucgacaagcagcugcugcccauccugaacaagcagagcugcagcauccccaacaucgagaccgugaucgaguuccagcagaagaacaacagacugcuggagaucaccagagaguucagcgugaacgccggcgugaccacccccgugagcaccuacaugcugaccaacagcgagcugcugagccugaucaacgacaugcccaucaccaacgaccagaagaagcugaugagcaacaacgugcagaucgugagacagcagagcuacagcaucaugugcaucaucaaggaggaggugcuggccuacguggugcagcugccccuguacggcgugaucgacacccccugcuggaagcugcacaccagcccccugugcaccaccaacaccaaggagggcagcaacaucugccugaccagaaccgacagaggcugguacugcgacaacgccggcagcgugagcuucuucccccaggccgagaccugcaaggugcagagcaacagaguguucugcgacaccaugaacagccugacccugcccagcgaggugaaccugugcaacaucgacaucuucaaccccaaguacgacugcaagaucaugaccagcaagaccgacgugagcagcagcgugaucaccagccugggcgccaucgugagcugcuacggcaagaccaagugcaccgccagcaacaagaacagaggcaucaucaagaccuucagcaacggcugcgacuacgugagcaacaagggcguggacaccgugagcgugggcaacacccuguacugcgugaacaagcaggagggccagagccuguacgugaagggcgagcccaucaucaacuucuacgacccccugguguuccccagcgacgaguucgacgccagcaucagccaggugaacgagaagaucaaccagagccuggccuucaucagaaagagcgacgagcugcugcacaacgugaacgugggcaagagcaccaccaacaucaugaucaccaccaucaucaucgugaucaucgugauccugcugcugcugaucgccgugggccuguuccuguacugcaaggccagaagcacccccgugacccugagcaaggaccagcugagcggcaucaacaacaucgccuucagcaacugaggacuagugaagggaacacccaaauuuaauucagccuuaagcacaauuaauuaagagugaaacguaauuguacaagcaguuggucacccaccauagggcaugaucaacaccgcaaccuuuccuuuuucccccagugauucugaaaaaccccucuucccuucagcuugcuuagauguuccaaauuuaguaagcuuaaggcggccuacagaagaaaaagaaaaaaaaggccacaaaaguucccucucacuuucaguaaauaaaauaaaagcagcaacagaaauaaagaaauaaaugaaauucaaaaugaaauaaauauuguguugugcagcauuaaaaaaucaauaaaaauuaaaaaugagcaagaucuaaaaaaaaaaaaaaaaaaaaaaaaaaaaaaaaaaaaaaaaaaaaaaaaaaaaaaaaaaaaaaaaugcaucccccccccccccccccccccccccccccccaaaggcucuuuucagagccaccagaauu

SEQ ID NO: 14250 - RNA, 2202 nt, Artificial Sequence
  mRNA product Design h-2 comprising derived and/or modified sequence from HRSV(Memphis-37)__AIY60640.1__F_DSCav1_mut1 (opt5)
gggagacccgugacccggaaguuguacggcuacgcgacuuucccucccacaaacccucgcgcccuuccuuuccuacuugggcccggcagaaagcuuaccauggagcugcccauccucaagaccaacgccauuacaacgauccuggcugccgugacccuuugcuucgcgagcucccagaauauuacagaagaguuuuaccaaucuaccuguagcgcugucuccaaaggcuaucugggggcccucagaacaggaugguacaccucuguuaucacaauugaacugagcaacaucaaggagaauaaaugcaacggcaccgacgccaaggugaaacuuaucaagcaggaacuggauaaguauaaaaaugcugugacggagcuccagcugcugaugcaguccaccccugccgcugggucuggaagcgccauuuguuccggcaucgcggucugcaaggugcuccaccuggagggggaaguuaacaaaauuaagaaugcccuucugagcacaaacaaagcuguggucucucucuccaauggagugagcguucugaccuucaaggugcuugaccugaagaacuacaucgauaaacaacuccugccgauucugaauaagcagucuuguuccauccccaacauugagacagucaucgaauuucagcagaaaaauaaccggcuccuggagaucacccgcgaguucagcgugaaugccggcgugacgacaccugucucuaccuauaugcuuacaaacuccgaacugcucagccugauuaacgacaugcccaucaccaaugaucaaaagaaacuuauguccaacaauguucagauugugagacagcagucuuacagcaucaugugcauuaucaaggaggaagugcuggcuuaugucgugcaacucccucuguacggcguuaucgacacccccuguuggaaacugcauacauccccucucugcacgaccaacacaaaggaggggagcaauauuugucugacccggacagaucgcggaugguacugcgacaacgccggcucuguguccuuuuucccgcaggcggaaaccuguaagguccagagcaauagaguguuuugcgauacgaugaacucucuuacacugcccagcgagguuaaucucugcaacaucgacauuuucaauccuaaauaugauuguaagaucaugaccuccaaaaccgacgugucuagcuccgucauuacaagccugggggccaucgugucuugcuacggaaagaccaaauguacagcuuccaacaagaaucggggcaucauuaagacguuuagcaacgggugcgauuaugucucuaauaaaggaguggacaccguuuccgugggcaacacacuuuacugugucaacaagcaagagggccagagccuguaugugaaaggggaacccaucauuaauuucuacgacccucucguuuuucccuccgaugaguucgacgccucuaucagccaggugaacgaaaagauuaaucagucccuggcuuuuauccgcaaaucugaugagcugcuccacaacgucaaugugggaaagagcaccacaaacauuaugaucaccacgaucauuaucgugauuaucguuauucugcuucugcucaucgccgucggccuguuccuguauugcaaggccagauccaccccggugacacuuagcaaagaccaacucucugggaucaauaacauugcuuucuccaauugaggacuagugaagggaacacccaaauuuaauucagccuuaagcacaauuaauuaagagugaaacguaauuguacaagcaguuggucacccaccauagggcaugaucaacaccgcaaccuuuccuuuuucccccagugauucugaaaaaccccucuucccuucagcuugcuuagauguuccaaauuuaguaagcuuaaggcggccuacagaagaaaaagaaaaaaaaggccacaaaaguucccucucacuuucaguaaauaaaauaaaagcagcaacagaaauaaagaaauaaaugaaauucaaaaugaaauaaauauuguguugugcagcauuaaaaaaucaauaaaaauuaaaaaugagcaagaucuaaaaaaaaaaaaaaaaaaaaaaaaaaaaaaaaaaaaaaaaaaaaaaaaaaaaaaaaaaaaaaaaugcaucccccccccccccccccccccccccccccccaaaggcucuuuucagagccaccagaauu

SEQ ID NO: 14251 - RNA, 2202 nt, Artificial Sequence
  mRNA product Design h-2 comprising derived and/or modified sequence from HRSV(Memphis-37)__AIY60640.1__F_DSCav1_mut1 (opt6)
gggagacccgugacccggaaguuguacggcuacgcgacuuucccucccacaaacccucgcgcccuuccuuuccuacuugggcccggcagaaagcuuaccauggaacuuccaauucuaaaaaccaaugcuauaacaacaauauuagcagcaguuacauuaugcuucgccucaucacaaaauaucacagaagaauuuuaccaauccacaugcucagcaguaucuaaaggguaccuaggagcccuacgaacaggaugguacacaucaguaauaacaauagaacucucaaacaucaaagaaaacaaaugcaauggaacagacgcuaaaguaaaauuaauaaaacaagaacuagacaaauacaaaaacgccgucaccgaacuucaguuacucaugcaaagcacaccugcagcaggaucagguucagcaauaugcucaggaauagcaguuugcaaaguauuacaccuagaaggugaagucaacaaaauaaaaaacgcacuucuaaguacuaacaaagcuguaguaucauuaucaaacggaguauccguacuaaccuuuaaaguccuagaccuaaaaaacuacauagacaaacaacuacucccaauacucaauaaacaauccugcucaauucccaacaucgaaacaguaauagaauuucaacaaaaaaacaaucgccuucuagaaauaacaagagaauuuucagucaacgccggaguaacaacaccaguaucaacauauaugcuaacaaacagugaacuauuauccuuaauaaacgacaugccaauaacaaaugaccaaaaaaaacuaauguccaauaauguccaaauaguaagacaacaaagcuauucaauuauguguauaauaaaagaagaaguauuagcauacguaguucaacuaccacuauauggcguuauagacacaccaugcuggaaauuacacacaagcccacuaugcacaacaaauacaaaagaaggauccaacauuugcuuaacuagaacugacagaggaugguacugcgacaacgcuggaucagucucuuucuucccacaagcagaaaccuguaaaguacaaucaaauagagucuucugcgacacaaugaacucacuaacucucccaucugaaguaaacuuaugcaacaucgauauauuuaacccaaaauacgauuguaaaauaaugacauccaaaacagacguuucaucaagcguaaucaccucccucggagcaaucguaagcugcuacgguaaaacaaaaugcacagcauccaacaaaaacagaggcaucauaaaaacauucucaaacggaugugacuauguaucaaacaaaggaguagacacaguuucaguaggcaauaccuuauacugugucaauaaacaagaaggacaaucacuauauguaaaaggagaaccuauaauaaacuucuacgacccccucgucuucccuagcgaugaauuugacgcaucaauaucgcaaguaaacgaaaaaauaaaccaaucauuagccuuuauaagaaaaucagacgaauuauuacacaacguaaacguggggaaaagcacaacuaacaucaugauaacaacuaucauaauuguaaucaucgucauccuauuacuccuaaucgcaguaggacuauuccuauacugcaaagcuagaucaacaccagucacccuaucgaaagaucaauugucaggaauaaacaauauagccuuuucaaauuaaggacuagugaagggaacacccaaauuuaauucagccuuaagcacaauuaauuaagagugaaacguaauuguacaagcaguuggucacccaccauagggcaugaucaacaccgcaaccuuuccuuuuucccccagugauucugaaaaaccccucuucccuucagcuugcuuagauguuccaaauuuaguaagcuuaaggcggccuacagaagaaaaagaaaaaaaaggccacaaaaguucccucucacuuucaguaaauaaaauaaaagcagcaacagaaauaaagaaauaaaugaaauucaaaaugaaauaaauauuguguugugcagcauuaaaaaaucaauaaaaauuaaaaaugagcaagaucuaaaaaaaaaaaaaaaaaaaaaaaaaaaaaaaaaaaaaaaaaaaaaaaaaaaaaaaaaaaaaaaaugcaucccccccccccccccccccccccccccccccaaaggcucuuuucagagccaccagaauu

SEQ ID NO: 14252 - RNA, 2202 nt, Artificial Sequence
  mRNA product Design h-2 comprising derived and/or modified sequence from HRSV(Memphis-37)__AIY60640.1__F_DSCav1_mut1 (opt11)
gggagacccgugacccggaaguuguacggcuacgcgacuuucccucccacaaacccucgcgcccuuccuuuccuacuugggcccggcagaaagcuuaccauggaacuccccauccucaaaacgaacgccaucacaaccauccucgccgccgucacccucugcuucgcgucaucccaaaacauaacugaagaguucuaucaaucaaccugcuccgcagucucaaaaggcuaccucggcgcccuacggaccggcugguacacaagcgucaucacaauagaacuuuccaacaucaaagaaaacaaauguaacggcaccgacgcaaaagucaaacucauaaaacaagaacuagacaaauauaaaaacgccguaacugaacuacaacuccucaugcaaucaacuccugcagccgguagcggcuccgcaaucugcucaggcaucgcagucugcaaagucuuacaccuagaaggcgaagucaacaaaaucaagaacgcccuacuauccacaaacaaagcaguagucucucuauccaacggagucuccguccucacauucaaaguacucgaccuaaagaacuacaucgacaaacaacuacuaccaaucuuaaacaaacaauccugcucaaucccuaacauugaaaccgucauagaguuccaacagaaaaacaaccgccuccucgaaauaaccagagaguucucagucaacgccggcgucaccaccccggucucaaccuacaugcuaaccaacucugaacuucucagccuaaucaacgacaugcccauuaccaacgaccaaaagaaacucauguccaauaacguccaaaucguucgacaacaauccuacucaaucaugugcaucauaaaagaagaaguccuagcauacgucguccaacucccacuauacggcguaaucgacacccccugcuggaaacuccacaccuccccucucuguaccaccaacaccaaagaaggguccaacaucugccucacgcgcaccgaccgaggcugguauugcgacaaugcaggcucugucuccuucuucccccaagccgaaaccugcaaaguccaaucuaaccgcgucuucugcgacaccaugaacagucuuacccucccgucagaagucaaccucugcaacauagauaucuucaacccaaaauacgacugcaaaaucaugaccucaaaaaccgacguuuccucauccguuaucaccucccucggcgcaaucgucagcugcuacggcaagacaaagugcacggcuucaaacaaaaaccgcggaaucaucaagacauucagcaacggcugcgacuacguauccaacaaaggaguggacacagucuccguuggaaacacccucuacugcguaaacaaacaagaaggccaaucacucuacgucaaaggcgaacccaucaucaacuucuacgacccacucgucuuccccuccgacgaguucgacgccucaaucagccaagucaacgagaaaauuaaccagucacucgccuucauacgcaaauccgacgaacuucuacacaacguaaacgucggaaaaucaaccacaaacaucaugauuaccacaauuaucauagucaucauaguaauccuccugcuacucauagcagucggacucuuccuauacugcaaagcccgcuccaccccugucacccuauccaaagaccaacuuuccggcaucaacaacauagccuuuuccaacuaaggacuagugaagggaacacccaaauuuaauucagccuuaagcacaauuaauuaagagugaaacguaauuguacaagcaguuggucacccaccauagggcaugaucaacaccgcaaccuuuccuuuuucccccagugauucugaaaaaccccucuucccuucagcuugcuuagauguuccaaauuuaguaagcuuaaggcggccuacagaagaaaaagaaaaaaaaggccacaaaaguucccucucacuuucaguaaauaaaauaaaagcagcaacagaaauaaagaaauaaaugaaauucaaaaugaaauaaauauuguguugugcagcauuaaaaaaucaauaaaaauuaaaaaugagcaagaucuaaaaaaaaaaaaaaaaaaaaaaaaaaaaaaaaaaaaaaaaaaaaaaaaaaaaaaaaaaaaaaaaugcaucccccccccccccccccccccccccccccccaaaggcucuuuucagagccaccagaauu

SEQ ID NO: 14253 - RNA, 1982 nt, Artificial Sequence
  mRNA product Design h-3 comprising derived and/or modified sequence from HRSV(Memphis-37)__AIY60640.1__F_DSCav1_mut1 (opt1)
gggagacccgugacccggaaguuguacggcuacgcgacuuucccucccacaaacccucgcgcccuuccuuuccuacuugggcccggcagaaagcuuaccauggagcugcccauccucaagaccaacgccaucaccacgauccuggccgcggugacccugugcuucgccagcucccagaacaucaccgaggaguucuaccagagcacgugcuccgccgucagcaagggcuaccucggcgcccugcgcaccgggugguacaccagcgugaucaccaucgagcuguccaacaucaaggagaacaagugcaacggcaccgacgccaaggugaagcucaucaagcaggagcuggacaaguacaagaacgcggucacggagcugcagcuccugaugcagagcaccccggccgccggcuccgggagcgcgaucugcuccggcaucgccgucugcaaggugcugcaccucgagggcgaggugaacaagaucaagaacgcccugcuguccaccaacaaggccgucgugagccucuccaacggggugagcguccugaccuucaaggugcuggaccucaagaacuacaucgacaagcagcugcugcccauccugaacaagcagagcugcuccauccccaacaucgagaccgucaucgaguuccagcagaagaacaaccgccuccuggagaucacgcgggaguucagcgugaacgcgggcgugaccacccccgucuccaccuacaugcugacgaacagcgagcuccugucccugaucaacgacaugccgaucaccaacgaccagaagaagcucaugagcaacaacgugcagaucgugcgccagcaguccuacagcaucaugugcaucaucaaggaggagguccuggccuacguggugcagcugccccucuacggggucaucgacacccccugcuggaagcugcacaccagcccccugugcacgaccaacaccaaggagggcuccaacaucugccucacccggacggaccgcgggugguacugcgacaacgccggcagcguguccuucuucccgcaggccgagaccugcaagguccagagcaaccggguguucugcgacaccaugaacucccugacccugcccagcgaggugaaccucugcaacaucgacaucuucaaccccaaguacgacugcaagaucaugacguccaagaccgacgucagcuccagcgugaucaccucccugggcgccaucgugagcugcuacgggaagaccaagugcacggcgagcaacaagaaccgcggcaucaucaagaccuucuccaacgggugcgacuacgucagcaacaagggcguggacaccguguccgucggcaacacccuguacugcgugaacaagcaggagggccagagccucuacgugaagggggagcccaucaucaacuucuacgacccgcuggucuuccccuccgacgaguucgacgccagcaucucccaggugaacgagaagaucaaccagagccuggccuucauccggaaguccgacgagcuccugcacaacgugaacgucggcaagagcaccacgaacaucaugaucaccaccaucaucaucgugaucaucgugauccugcugcuccugaucgccgucgggcuguuccucuacugcaaggcccgcuccacccccgugacgcugagcaaggaccagcuguccgggaucaacaacaucgcguucagcaacugaggacuaguggaagcauuuuccuggcugauuaaaagaaauuacucagcuauggucaucuguuccuguuagaaggcuaugcagcauauuauauacuaugcgcauguuaugaaaugcauaauaaaaaauuuuaaaaaaucuaaaagaucuaaaaaaaaaaaaaaaaaaaaaaaaaaaaaaaaaaaaaaaaaaaaaaaaaaaaaaaaaaaaaaaaugcaucccccccccccccccccccccccccccccccaaaggcucuuuucagagccaccagaauu

SEQ ID NO: 14254 - RNA, 1982 nt, Artificial Sequence
  mRNA product Design h-3 comprising derived and/or modified sequence from HRSV(Memphis-37)__AIY60640.1__F_DSCav1_mut1 (opt1)
gggagacccgugacccggaaguuguacggcuacgcgacuuucccucccacaaacccucgcgcccuuccuuuccuacuugggcccggcagaaagcuuaccauggagcugcccauccucaagaccaacgccaucaccacgauccuggccgcggugacccugugcuucgccagcucccagaacaucaccgaggaguucuaccagagcacgugcuccgccgucagcaagggcuaccucggggcccugcgcaccggcugguacaccuccgugaucaccaucgagcugagcaacaucaaggagaacaagugcaacgggaccgacgccaaggugaagcucaucaagcaggagcuggacaaguacaagaacgcggucacggagcugcagcuccugaugcaguccaccccggccgccggcagcggguccgccaucugcagcggcaucgcggugugcaaggugcugcaccucgagggcgaggucaacaagaucaagaacgcccugcuguccaccaacaaggccguggugagccucuccaacggggucagcgugcugaccuucaaggugcuggaccucaagaacuacaucgacaagcagcugcugcccauccucaacaagcaguccugcagcauccccaacaucgagacggucaucgaguuccagcagaagaacaaccggcugcuggagaucacccgcgaguucuccgugaacgccggcgugaccacccccgucagcacguacaugcucaccaacuccgagcugcugagccucaucaacgacaugccgaucaccaacgaccagaagaagcugaugagcaacaacgugcagaucgugcggcagcaguccuacagcaucaugugcaucaucaaggaggagguccuggccuacguggugcagcucccccuguacggggucaucgacacccccugcuggaagcugcacacgagcccccucugcaccaccaacaccaaggagggcuccaacaucugccugacgcgcaccgaccgggggugguacugcgacaacgcgggcuccgugagcuucuucccgcaggccgagaccugcaaggugcaguccaaccgcgucuucugcgacaccaugaacagccugacgcuccccuccgaggugaaccugugcaacaucgacaucuucaaccccaaguacgacugcaagaucaugaccagcaagaccgacgucuccagcuccgugaucaccagccugggcgccaucguguccugcuacgggaagacgaagugcaccgccagcaacaagaaccggggcaucaucaagaccuucuccaacgggugcgacuacgucagcaacaagggcguggacaccguguccgucggcaacacgcucuacugcgugaacaagcaggaggggcagagccuguacgugaagggcgagcccaucaucaacuucuacgacccgcuggucuuccccagcgacgaguucgacgccuccaucagccaggugaacgagaagaucaaccagucccucgcguucauccgcaagagcgacgagcugcugcacaacgugaacgucgggaaguccaccaccaacaucaugaucaccaccaucaucaucgugaucaucgugauccuccugcugcucaucgccgucggccuguuccuguacugcaaggcccggagcacgcccgugacccuguccaaggaccagcucagcgggaucaacaacaucgccuucuccaacugaggacuaguggaagcauuuuccuggcugauuaaaagaaauuacucagcuauggucaucuguuccuguuagaaggcuaugcagcauauuauauacuaugcgcauguuaugaaaugcauaauaaaaaauuuuaaaaaaucuaaaagaucuaaaaaaaaaaaaaaaaaaaaaaaaaaaaaaaaaaaaaaaaaaaaaaaaaaaaaaaaaaaaaaaaugcaucccccccccccccccccccccccccccccccaaaggcucuuuucagagccaccagaauu

SEQ ID NO: 14255 - RNA, 1982 nt, Artificial Sequence
  mRNA product Design h-3 comprising derived and/or modified sequence from HRSV(Memphis-37)__AIY60640.1__F_DSCav1_mut1 (opt2)
gggagacccgugacccggaaguuguacggcuacgcgacuuucccucccacaaacccucgcgcccuuccuuuccuacuugggcccggcagaaagcuuaccauggagcuccccauccucaagaccaacgccaucaccaccauccucgccgccgucacccucugcuucgccuccucccagaacaucaccgaggaguucuaccaguccaccugcuccgccgucuccaagggcuaccucggcgcccuccgcaccggcugguacaccuccgucaucaccaucgagcucuccaacaucaaggagaacaagugcaacggcaccgacgccaaggucaagcucaucaagcaggagcucgacaaguacaagaacgccgucaccgagcuccagcuccucaugcaguccacccccgccgccggcuccggcuccgccaucugcuccggcaucgccgucugcaagguccuccaccucgagggcgaggucaacaagaucaagaacgcccuccucuccaccaacaaggccgucgucucccucuccaacggcgucuccguccucaccuucaagguccucgaccucaagaacuacaucgacaagcagcuccuccccauccucaacaagcaguccugcuccauccccaacaucgagaccgucaucgaguuccagcagaagaacaaccgccuccucgagaucacccgcgaguucuccgucaacgccggcgucaccacccccgucuccaccuacaugcucaccaacuccgagcuccucucccucaucaacgacaugcccaucaccaacgaccagaagaagcucauguccaacaacguccagaucguccgccagcaguccuacuccaucaugugcaucaucaaggaggagguccucgccuacgucguccagcucccccucuacggcgucaucgacacccccugcuggaagcuccacaccuccccccucugcaccaccaacaccaaggagggcuccaacaucugccucacccgcaccgaccgcggcugguacugcgacaacgccggcuccgucuccuucuucccccaggccgagaccugcaagguccaguccaaccgcgucuucugcgacaccaugaacucccucacccuccccuccgaggucaaccucugcaacaucgacaucuucaaccccaaguacgacugcaagaucaugaccuccaagaccgacgucuccuccuccgucaucaccucccucggcgccaucgucuccugcuacggcaagaccaagugcaccgccuccaacaagaaccgcggcaucaucaagaccuucuccaacggcugcgacuacgucuccaacaagggcgucgacaccgucuccgucggcaacacccucuacugcgucaacaagcaggagggccagucccucuacgucaagggcgagcccaucaucaacuucuacgacccccucgucuuccccuccgacgaguucgacgccuccaucucccaggucaacgagaagaucaaccagucccucgccuucauccgcaaguccgacgagcuccuccacaacgucaacgucggcaaguccaccaccaacaucaugaucaccaccaucaucaucgucaucaucgucauccuccuccuccucaucgccgucggccucuuccucuacugcaaggcccgcuccacccccgucacccucuccaaggaccagcucuccggcaucaacaacaucgccuucuccaacugaggacuaguggaagcauuuuccuggcugauuaaaagaaauuacucagcuauggucaucuguuccuguuagaaggcuaugcagcauauuauauacuaugcgcauguuaugaaaugcauaauaaaaaauuuuaaaaaaucuaaaagaucuaaaaaaaaaaaaaaaaaaaaaaaaaaaaaaaaaaaaaaaaaaaaaaaaaaaaaaaaaaaaaaaaugcaucccccccccccccccccccccccccccccccaaaggcucuuuucagagccaccagaauu

SEQ ID NO: 14256 - RNA, 1982 nt, Artificial Sequence
  mRNA product Design h-3 comprising derived and/or modified sequence from HRSV(Memphis-37)__AIY60640.1__F_DSCav1_mut1 (opt3)
gggagacccgugacccggaaguuguacggcuacgcgacuuucccucccacaaacccucgcgcccuuccuuuccuacuugggcccggcagaaagcuuaccauggagcugcccauccucaagaccaacgccauuacaacuauacuugcugcagugacgcugugcuucgccagcucccagaauaucaccgaagaguuuuaccaaucuacauguucagcggucaguaaaggcuauuugggggcuuuaagaacuggaugguacaccagcguuauuacaaucgaacuguccaacauuaaggagaauaaaugcaacgguaccgacgccaaggugaaacuaaucaagcaggaacucgauaaguauaaaaaugcaguaacugagcugcagcuucugaugcagucuacuccugccgcuggcucggggucagcaauauguagcggaaucgccgugugcaaggucuugcaccucgagggcgaagugaacaaaauuaagaaugcucugcugaguaccaacaaagccguugugucccucucuaauggugucagcguguuaacguucaagguacuggaccuuaagaacuacaucgauaaacaauugcugccaauucuaaauaagcaguccuguucaaucccgaacauagagacuguuauugaauuucagcagaaaaauaacaggcuccuggagaucacccgggaguucagugugaaugcgggggucacaacucccgugagcaccuauaugcuuacaaacucugaacuguugucccucauuaacgacaugccuaucaccaaugaucaaaagaaacugaugucaaacaaugugcagaucguccgccagcagagcuacaguauuaugugcauaaucaaggaggaaguuuuagcauaugugguacaacugccacucuacggagugauugacacgcccuguuggaaacuucauacuucuccucugugcacaaccaacacuaaggagggcuccaauaucuguuugacacgaaccgaucguggcugguacugcgacaacgccgggagcgucucguuuuucccacaggcugaaacguguaaggugcagucuaauagaguguuuugcgauaccaugaacucccuaacacugcccucagagguuaaucucugcaacauagacauuuucaauccuaaauaugauuguaagaucaugacaaguaaaaccgacgucagcuccucugugaucacaagccugggagccauuguaucaugcuacgguaagacuaaauguaccgcaaguaacaagaauaggggcaucauuaagacauuuuccaacgggugcgauuauguuagcaauaaaggaguggacaccgucucugugggcaacacucuuuacugugucaacaagcaagagggucagucacuguaugugaaaggggaaccaauaaucaauuucuacgacccguugguuuuucccagugaugaguucgacgcuagcauuucccaggugaacgaaaagaucaaucagucucucgccuuuauccggaaaucggaugagcuguuacacaacguaaaugucggaaagagcacgacaaacauuaugauaaccacuaucauuaucgugauuaucguuauacugcuacuccugaucgcggugggccuuuucuuguauugcaaggcccgcuccaccccugucacacugucaaaagaccaacucaguggcauuaauaacaucgcauucucuaauugaggacuaguggaagcauuuuccuggcugauuaaaagaaauuacucagcuauggucaucuguuccuguuagaaggcuaugcagcauauuauauacuaugcgcauguuaugaaaugcauaauaaaaaauuuuaaaaaaucuaaaagaucuaaaaaaaaaaaaaaaaaaaaaaaaaaaaaaaaaaaaaaaaaaaaaaaaaaaaaaaaaaaaaaaaugcaucccccccccccccccccccccccccccccccaaaggcucuuuucagagccaccagaauu

SEQ ID NO: 14257 - RNA, 1982 nt, Artificial Sequence
  mRNA product Design h-3 comprising derived and/or modified sequence from HRSV(Memphis-37)__AIY60640.1__F_DSCav1_mut1 (opt4)
gggagacccgugacccggaaguuguacggcuacgcgacuuucccucccacaaacccucgcgcccuuccuuuccuacuugggcccggcagaaagcuuaccauggagcugcccauccugaagaccaacgccaucaccaccauccuggccgccgugacccugugcuucgccagcagccagaacaucaccgaggaguucuaccagagcaccugcagcgccgugagcaagggcuaccugggcgcccugagaaccggcugguacaccagcgugaucaccaucgagcugagcaacaucaaggagaacaagugcaacggcaccgacgccaaggugaagcugaucaagcaggagcuggacaaguacaagaacgccgugaccgagcugcagcugcugaugcagagcacccccgccgccggcagcggcagcgccaucugcagcggcaucgccgugugcaaggugcugcaccuggagggcgaggugaacaagaucaagaacgcccugcugagcaccaacaaggccguggugagccugagcaacggcgugagcgugcugaccuucaaggugcuggaccugaagaacuacaucgacaagcagcugcugcccauccugaacaagcagagcugcagcauccccaacaucgagaccgugaucgaguuccagcagaagaacaacagacugcuggagaucaccagagaguucagcgugaacgccggcgugaccacccccgugagcaccuacaugcugaccaacagcgagcugcugagccugaucaacgacaugcccaucaccaacgaccagaagaagcugaugagcaacaacgugcagaucgugagacagcagagcuacagcaucaugugcaucaucaaggaggaggugcuggccuacguggugcagcugccccuguacggcgugaucgacacccccugcuggaagcugcacaccagcccccugugcaccaccaacaccaaggagggcagcaacaucugccugaccagaaccgacagaggcugguacugcgacaacgccggcagcgugagcuucuucccccaggccgagaccugcaaggugcagagcaacagaguguucugcgacaccaugaacagccugacccugcccagcgaggugaaccugugcaacaucgacaucuucaaccccaaguacgacugcaagaucaugaccagcaagaccgacgugagcagcagcgugaucaccagccugggcgccaucgugagcugcuacggcaagaccaagugcaccgccagcaacaagaacagaggcaucaucaagaccuucagcaacggcugcgacuacgugagcaacaagggcguggacaccgugagcgugggcaacacccuguacugcgugaacaagcaggagggccagagccuguacgugaagggcgagcccaucaucaacuucuacgacccccugguguuccccagcgacgaguucgacgccagcaucagccaggugaacgagaagaucaaccagagccuggccuucaucagaaagagcgacgagcugcugcacaacgugaacgugggcaagagcaccaccaacaucaugaucaccaccaucaucaucgugaucaucgugauccugcugcugcugaucgccgugggccuguuccuguacugcaaggccagaagcacccccgugacccugagcaaggaccagcugagcggcaucaacaacaucgccuucagcaacugaggacuaguggaagcauuuuccuggcugauuaaaagaaauuacucagcuauggucaucuguuccuguuagaaggcuaugcagcauauuauauacuaugcgcauguuaugaaaugcauaauaaaaaauuuuaaaaaaucuaaaagaucuaaaaaaaaaaaaaaaaaaaaaaaaaaaaaaaaaaaaaaaaaaaaaaaaaaaaaaaaaaaaaaaaugcaucccccccccccccccccccccccccccccccaaaggcucuuuucagagccaccagaauu

SEQ ID NO: 14258 - RNA, 1982 nt, Artificial Sequence
  mRNA product Design h-3 comprising derived and/or modified sequence from HRSV(Memphis-37)__AIY60640.1__F_DSCav1_mut1 (opt5)
gggagacccgugacccggaaguuguacggcuacgcgacuuucccucccacaaacccucgcgcccuuccuuuccuacuugggcccggcagaaagcuuaccauggagcugcccauccucaagaccaacgccauuacaacgauccuggcugccgugacccuuugcuucgcgagcucccagaauauuacagaagaguuuuaccaaucuaccuguagcgcugucuccaaaggcuaucugggggcccucagaacaggaugguacaccucuguuaucacaauugaacugagcaacaucaaggagaauaaaugcaacggcaccgacgccaaggugaaacuuaucaagcaggaacuggauaaguauaaaaaugcugugacggagcuccagcugcugaugcaguccaccccugccgcugggucuggaagcgccauuuguuccggcaucgcggucugcaaggugcuccaccuggagggggaaguuaacaaaauuaagaaugcccuucugagcacaaacaaagcuguggucucucucuccaauggagugagcguucugaccuucaaggugcuugaccugaagaacuacaucgauaaacaacuccugccgauucugaauaagcagucuuguuccauccccaacauugagacagucaucgaauuucagcagaaaaauaaccggcuccuggagaucacccgcgaguucagcgugaaugccggcgugacgacaccugucucuaccuauaugcuuacaaacuccgaacugcucagccugauuaacgacaugcccaucaccaaugaucaaaagaaacuuauguccaacaauguucagauugugagacagcagucuuacagcaucaugugcauuaucaaggaggaagugcuggcuuaugucgugcaacucccucuguacggcguuaucgacacccccuguuggaaacugcauacauccccucucugcacgaccaacacaaaggaggggagcaauauuugucugacccggacagaucgcggaugguacugcgacaacgccggcucuguguccuuuuucccgcaggcggaaaccuguaagguccagagcaauagaguguuuugcgauacgaugaacucucuuacacugcccagcgagguuaaucucugcaacaucgacauuuucaauccuaaauaugauuguaagaucaugaccuccaaaaccgacgugucuagcuccgucauuacaagccugggggccaucgugucuugcuacggaaagaccaaauguacagcuuccaacaagaaucggggcaucauuaagacguuuagcaacgggugcgauuaugucucuaauaaaggaguggacaccguuuccgugggcaacacacuuuacugugucaacaagcaagagggccagagccuguaugugaaaggggaacccaucauuaauuucuacgacccucucguuuuucccuccgaugaguucgacgccucuaucagccaggugaacgaaaagauuaaucagucccuggcuuuuauccgcaaaucugaugagcugcuccacaacgucaaugugggaaagagcaccacaaacauuaugaucaccacgaucauuaucgugauuaucguuauucugcuucugcucaucgccgucggccuguuccuguauugcaaggccagauccaccccggugacacuuagcaaagaccaacucucugggaucaauaacauugcuuucuccaauugaggacuaguggaagcauuuuccuggcugauuaaaagaaauuacucagcuauggucaucuguuccuguuagaaggcuaugcagcauauuauauacuaugcgcauguuaugaaaugcauaauaaaaaauuuuaaaaaaucuaaaagaucuaaaaaaaaaaaaaaaaaaaaaaaaaaaaaaaaaaaaaaaaaaaaaaaaaaaaaaaaaaaaaaaaugcaucccccccccccccccccccccccccccccccaaaggcucuuuucagagccaccagaauu

SEQ ID NO: 14259 - RNA, 1982 nt, Artificial Sequence
  mRNA product Design h-3 comprising derived and/or modified sequence from HRSV(Memphis-37)__AIY60640.1__F_DSCav1_mut1 (opt6)
gggagacccgugacccggaaguuguacggcuacgcgacuuucccucccacaaacccucgcgcccuuccuuuccuacuugggcccggcagaaagcuuaccauggaacuuccaauucuaaaaaccaaugcuauaacaacaauauuagcagcaguuacauuaugcuucgccucaucacaaaauaucacagaagaauuuuaccaauccacaugcucagcaguaucuaaaggguaccuaggagcccuacgaacaggaugguacacaucaguaauaacaauagaacucucaaacaucaaagaaaacaaaugcaauggaacagacgcuaaaguaaaauuaauaaaacaagaacuagacaaauacaaaaacgccgucaccgaacuucaguuacucaugcaaagcacaccugcagcaggaucagguucagcaauaugcucaggaauagcaguuugcaaaguauuacaccuagaaggugaagucaacaaaauaaaaaacgcacuucuaaguacuaacaaagcuguaguaucauuaucaaacggaguauccguacuaaccuuuaaaguccuagaccuaaaaaacuacauagacaaacaacuacucccaauacucaauaaacaauccugcucaauucccaacaucgaaacaguaauagaauuucaacaaaaaaacaaucgccuucuagaaauaacaagagaauuuucagucaacgccggaguaacaacaccaguaucaacauauaugcuaacaaacagugaacuauuauccuuaauaaacgacaugccaauaacaaaugaccaaaaaaaacuaauguccaauaauguccaaauaguaagacaacaaagcuauucaauuauguguauaauaaaagaagaaguauuagcauacguaguucaacuaccacuauauggcguuauagacacaccaugcuggaaauuacacacaagcccacuaugcacaacaaauacaaaagaaggauccaacauuugcuuaacuagaacugacagaggaugguacugcgacaacgcuggaucagucucuuucuucccacaagcagaaaccuguaaaguacaaucaaauagagucuucugcgacacaaugaacucacuaacucucccaucugaaguaaacuuaugcaacaucgauauauuuaacccaaaauacgauuguaaaauaaugacauccaaaacagacguuucaucaagcguaaucaccucccucggagcaaucguaagcugcuacgguaaaacaaaaugcacagcauccaacaaaaacagaggcaucauaaaaacauucucaaacggaugugacuauguaucaaacaaaggaguagacacaguuucaguaggcaauaccuuauacugugucaauaaacaagaaggacaaucacuauauguaaaaggagaaccuauaauaaacuucuacgacccccucgucuucccuagcgaugaauuugacgcaucaauaucgcaaguaaacgaaaaaauaaaccaaucauuagccuuuauaagaaaaucagacgaauuauuacacaacguaaacguggggaaaagcacaacuaacaucaugauaacaacuaucauaauuguaaucaucgucauccuauuacuccuaaucgcaguaggacuauuccuauacugcaaagcuagaucaacaccagucacccuaucgaaagaucaauugucaggaauaaacaauauagccuuuucaaauuaaggacuaguggaagcauuuuccuggcugauuaaaagaaauuacucagcuauggucaucuguuccuguuagaaggcuaugcagcauauuauauacuaugcgcauguuaugaaaugcauaauaaaaaauuuuaaaaaaucuaaaagaucuaaaaaaaaaaaaaaaaaaaaaaaaaaaaaaaaaaaaaaaaaaaaaaaaaaaaaaaaaaaaaaaaugcaucccccccccccccccccccccccccccccccaaaggcucuuuucagagccaccagaauu

SEQ ID NO: 14260 - RNA, 1982 nt, Artificial Sequence
  mRNA product Design h-3 comprising derived and/or modified sequence from HRSV(Memphis-37)__AIY60640.1__F_DSCav1_mut1 (opt11)
gggagacccgugacccggaaguuguacggcuacgcgacuuucccucccacaaacccucgcgcccuuccuuuccuacuugggcccggcagaaagcuuaccauggaacuccccauccucaaaacgaacgccaucacaaccauccucgccgccgucacccucugcuucgcgucaucccaaaacauaacugaagaguucuaucaaucaaccugcuccgcagucucaaaaggcuaccucggcgcccuacggaccggcugguacacaagcgucaucacaauagaacuuuccaacaucaaagaaaacaaauguaacggcaccgacgcaaaagucaaacucauaaaacaagaacuagacaaauauaaaaacgccguaacugaacuacaacuccucaugcaaucaacuccugcagccgguagcggcuccgcaaucugcucaggcaucgcagucugcaaagucuuacaccuagaaggcgaagucaacaaaaucaagaacgcccuacuauccacaaacaaagcaguagucucucuauccaacggagucuccguccucacauucaaaguacucgaccuaaagaacuacaucgacaaacaacuacuaccaaucuuaaacaaacaauccugcucaaucccuaacauugaaaccgucauagaguuccaacagaaaaacaaccgccuccucgaaauaaccagagaguucucagucaacgccggcgucaccaccccggucucaaccuacaugcuaaccaacucugaacuucucagccuaaucaacgacaugcccauuaccaacgaccaaaagaaacucauguccaauaacguccaaaucguucgacaacaauccuacucaaucaugugcaucauaaaagaagaaguccuagcauacgucguccaacucccacuauacggcguaaucgacacccccugcuggaaacuccacaccuccccucucuguaccaccaacaccaaagaaggguccaacaucugccucacgcgcaccgaccgaggcugguauugcgacaaugcaggcucugucuccuucuucccccaagccgaaaccugcaaaguccaaucuaaccgcgucuucugcgacaccaugaacagucuuacccucccgucagaagucaaccucugcaacauagauaucuucaacccaaaauacgacugcaaaaucaugaccucaaaaaccgacguuuccucauccguuaucaccucccucggcgcaaucgucagcugcuacggcaagacaaagugcacggcuucaaacaaaaaccgcggaaucaucaagacauucagcaacggcugcgacuacguauccaacaaaggaguggacacagucuccguuggaaacacccucuacugcguaaacaaacaagaaggccaaucacucuacgucaaaggcgaacccaucaucaacuucuacgacccacucgucuuccccuccgacgaguucgacgccucaaucagccaagucaacgagaaaauuaaccagucacucgccuucauacgcaaauccgacgaacuucuacacaacguaaacgucggaaaaucaaccacaaacaucaugauuaccacaauuaucauagucaucauaguaauccuccugcuacucauagcagucggacucuuccuauacugcaaagcccgcuccaccccugucacccuauccaaagaccaacuuuccggcaucaacaacauagccuuuuccaacuaaggacuaguggaagcauuuuccuggcugauuaaaagaaauuacucagcuauggucaucuguuccuguuagaaggcuaugcagcauauuauauacuaugcgcauguuaugaaaugcauaauaaaaaauuuuaaaaaaucuaaaagaucuaaaaaaaaaaaaaaaaaaaaaaaaaaaaaaaaaaaaaaaaaaaaaaaaaaaaaaaaaaaaaaaaugcaucccccccccccccccccccccccccccccccaaaggcucuuuucagagccaccagaauu

SEQ ID NO: 14261 - RNA, 2045 nt, Artificial Sequence
  mRNA product Design h-4 comprising derived and/or modified sequence from HRSV(Memphis-37)__AIY60640.1__F_DSCav1_mut1 (opt1)
gggagagggcgcuuggcuugcaaggacccugagcugcggcauugaagcacacccaacccaacucgacugaagucagccucacugaaccggaucugagaaucuucucucucugggcuugccagggcucuccgaaccuagcuagcauccucuucaauuccaacuagaaagcuuaccauggagcugcccauccucaagaccaacgccaucaccacgauccuggccgcggugacccugugcuucgccagcucccagaacaucaccgaggaguucuaccagagcacgugcuccgccgucagcaagggcuaccucggcgcccugcgcaccgggugguacaccagcgugaucaccaucgagcuguccaacaucaaggagaacaagugcaacggcaccgacgccaaggugaagcucaucaagcaggagcuggacaaguacaagaacgcggucacggagcugcagcuccugaugcagagcaccccggccgccggcuccgggagcgcgaucugcuccggcaucgccgucugcaaggugcugcaccucgagggcgaggugaacaagaucaagaacgcccugcuguccaccaacaaggccgucgugagccucuccaacggggugagcguccugaccuucaaggugcuggaccucaagaacuacaucgacaagcagcugcugcccauccugaacaagcagagcugcuccauccccaacaucgagaccgucaucgaguuccagcagaagaacaaccgccuccuggagaucacgcgggaguucagcgugaacgcgggcgugaccacccccgucuccaccuacaugcugacgaacagcgagcuccugucccugaucaacgacaugccgaucaccaacgaccagaagaagcucaugagcaacaacgugcagaucgugcgccagcaguccuacagcaucaugugcaucaucaaggaggagguccuggccuacguggugcagcugccccucuacggggucaucgacacccccugcuggaagcugcacaccagcccccugugcacgaccaacaccaaggagggcuccaacaucugccucacccggacggaccgcgggugguacugcgacaacgccggcagcguguccuucuucccgcaggccgagaccugcaagguccagagcaaccggguguucugcgacaccaugaacucccugacccugcccagcgaggugaaccucugcaacaucgacaucuucaaccccaaguacgacugcaagaucaugacguccaagaccgacgucagcuccagcgugaucaccucccugggcgccaucgugagcugcuacgggaagaccaagugcacggcgagcaacaagaaccgcggcaucaucaagaccuucuccaacgggugcgacuacgucagcaacaagggcguggacaccguguccgucggcaacacccuguacugcgugaacaagcaggagggccagagccucuacgugaagggggagcccaucaucaacuucuacgacccgcuggucuuccccuccgacgaguucgacgccagcaucucccaggugaacgagaagaucaaccagagccuggccuucauccggaaguccgacgagcuccugcacaacgugaacgucggcaagagcaccacgaacaucaugaucaccaccaucaucaucgugaucaucgugauccugcugcuccugaucgccgucgggcuguuccucuacugcaaggcccgcuccacccccgugacgcugagcaaggaccagcuguccgggaucaacaacaucgcguucagcaacugaggacuaguaauaaggaaacuguaugaaugucugugggcaggaagugaagagauccuucuguaaagguuuuuggaauuaugucugcugaauaauaaacuuuuuugaaauaauaaaucugguagaaaaaugagaucuaaaaaaaaaaaaaaaaaaaaaaaaaaaaaaaaaaaaaaaaaaaaaaaaaaaaaaaaaaaaaaaaugcaucccccccccccccccccccccccccccccccaaaggcucuuuucagagccaccagaauu

SEQ ID NO: 14262 - RNA, 2045 nt, Artificial Sequence
  mRNA product Design h-4 comprising derived and/or modified sequence from HRSV(Memphis-37)__AIY60640.1__F_DSCav1_mut1 (opt1)
gggagagggcgcuuggcuugcaaggacccugagcugcggcauugaagcacacccaacccaacucgacugaagucagccucacugaaccggaucugagaaucuucucucucugggcuugccagggcucuccgaaccuagcuagcauccucuucaauuccaacuagaaagcuuaccauggagcugcccauccucaagaccaacgccaucaccacgauccuggccgcggugacccugugcuucgccagcucccagaacaucaccgaggaguucuaccagagcacgugcuccgccgucagcaagggcuaccucggggcccugcgcaccggcugguacaccuccgugaucaccaucgagcugagcaacaucaaggagaacaagugcaacgggaccgacgccaaggugaagcucaucaagcaggagcuggacaaguacaagaacgcggucacggagcugcagcuccugaugcaguccaccccggccgccggcagcggguccgccaucugcagcggcaucgcggugugcaaggugcugcaccucgagggcgaggucaacaagaucaagaacgcccugcuguccaccaacaaggccguggugagccucuccaacggggucagcgugcugaccuucaaggugcuggaccucaagaacuacaucgacaagcagcugcugcccauccucaacaagcaguccugcagcauccccaacaucgagacggucaucgaguuccagcagaagaacaaccggcugcuggagaucacccgcgaguucuccgugaacgccggcgugaccacccccgucagcacguacaugcucaccaacuccgagcugcugagccucaucaacgacaugccgaucaccaacgaccagaagaagcugaugagcaacaacgugcagaucgugcggcagcaguccuacagcaucaugugcaucaucaaggaggagguccuggccuacguggugcagcucccccuguacggggucaucgacacccccugcuggaagcugcacacgagcccccucugcaccaccaacaccaaggagggcuccaacaucugccugacgcgcaccgaccgggggugguacugcgacaacgcgggcuccgugagcuucuucccgcaggccgagaccugcaaggugcaguccaaccgcgucuucugcgacaccaugaacagccugacgcuccccuccgaggugaaccugugcaacaucgacaucuucaaccccaaguacgacugcaagaucaugaccagcaagaccgacgucuccagcuccgugaucaccagccugggcgccaucguguccugcuacgggaagacgaagugcaccgccagcaacaagaaccggggcaucaucaagaccuucuccaacgggugcgacuacgucagcaacaagggcguggacaccguguccgucggcaacacgcucuacugcgugaacaagcaggaggggcagagccuguacgugaagggcgagcccaucaucaacuucuacgacccgcuggucuuccccagcgacgaguucgacgccuccaucagccaggugaacgagaagaucaaccagucccucgcguucauccgcaagagcgacgagcugcugcacaacgugaacgucgggaaguccaccaccaacaucaugaucaccaccaucaucaucgugaucaucgugauccuccugcugcucaucgccgucggccuguuccuguacugcaaggcccggagcacgcccgugacccuguccaaggaccagcucagcgggaucaacaacaucgccuucuccaacugaggacuaguaauaaggaaacuguaugaaugucugugggcaggaagugaagagauccuucuguaaagguuuuuggaauuaugucugcugaauaauaaacuuuuuugaaauaauaaaucugguagaaaaaugagaucuaaaaaaaaaaaaaaaaaaaaaaaaaaaaaaaaaaaaaaaaaaaaaaaaaaaaaaaaaaaaaaaaugcaucccccccccccccccccccccccccccccccaaaggcucuuuucagagccaccagaauu

SEQ ID NO: 14263 - RNA, 2045 nt, Artificial Sequence
  mRNA product Design h-4 comprising derived and/or modified sequence from HRSV(Memphis-37)__AIY60640.1__F_DSCav1_mut1 (opt2)
gggagagggcgcuuggcuugcaaggacccugagcugcggcauugaagcacacccaacccaacucgacugaagucagccucacugaaccggaucugagaaucuucucucucugggcuugccagggcucuccgaaccuagcuagcauccucuucaauuccaacuagaaagcuuaccauggagcuccccauccucaagaccaacgccaucaccaccauccucgccgccgucacccucugcuucgccuccucccagaacaucaccgaggaguucuaccaguccaccugcuccgccgucuccaagggcuaccucggcgcccuccgcaccggcugguacaccuccgucaucaccaucgagcucuccaacaucaaggagaacaagugcaacggcaccgacgccaaggucaagcucaucaagcaggagcucgacaaguacaagaacgccgucaccgagcuccagcuccucaugcaguccacccccgccgccggcuccggcuccgccaucugcuccggcaucgccgucugcaagguccuccaccucgagggcgaggucaacaagaucaagaacgcccuccucuccaccaacaaggccgucgucucccucuccaacggcgucuccguccucaccuucaagguccucgaccucaagaacuacaucgacaagcagcuccuccccauccucaacaagcaguccugcuccauccccaacaucgagaccgucaucgaguuccagcagaagaacaaccgccuccucgagaucacccgcgaguucuccgucaacgccggcgucaccacccccgucuccaccuacaugcucaccaacuccgagcuccucucccucaucaacgacaugcccaucaccaacgaccagaagaagcucauguccaacaacguccagaucguccgccagcaguccuacuccaucaugugcaucaucaaggaggagguccucgccuacgucguccagcucccccucuacggcgucaucgacacccccugcuggaagcuccacaccuccccccucugcaccaccaacaccaaggagggcuccaacaucugccucacccgcaccgaccgcggcugguacugcgacaacgccggcuccgucuccuucuucccccaggccgagaccugcaagguccaguccaaccgcgucuucugcgacaccaugaacucccucacccuccccuccgaggucaaccucugcaacaucgacaucuucaaccccaaguacgacugcaagaucaugaccuccaagaccgacgucuccuccuccgucaucaccucccucggcgccaucgucuccugcuacggcaagaccaagugcaccgccuccaacaagaaccgcggcaucaucaagaccuucuccaacggcugcgacuacgucuccaacaagggcgucgacaccgucuccgucggcaacacccucuacugcgucaacaagcaggagggccagucccucuacgucaagggcgagcccaucaucaacuucuacgacccccucgucuuccccuccgacgaguucgacgccuccaucucccaggucaacgagaagaucaaccagucccucgccuucauccgcaaguccgacgagcuccuccacaacgucaacgucggcaaguccaccaccaacaucaugaucaccaccaucaucaucgucaucaucgucauccuccuccuccucaucgccgucggccucuuccucuacugcaaggcccgcuccacccccgucacccucuccaaggaccagcucuccggcaucaacaacaucgccuucuccaacugaggacuaguaauaaggaaacuguaugaaugucugugggcaggaagugaagagauccuucuguaaagguuuuuggaauuaugucugcugaauaauaaacuuuuuugaaauaauaaaucugguagaaaaaugagaucuaaaaaaaaaaaaaaaaaaaaaaaaaaaaaaaaaaaaaaaaaaaaaaaaaaaaaaaaaaaaaaaaugcaucccccccccccccccccccccccccccccccaaaggcucuuuucagagccaccagaauu

SEQ ID NO: 14264 - RNA, 2045 nt, Artificial Sequence
  mRNA product Design h-4 comprising derived and/or modified sequence from HRSV(Memphis-37)__AIY60640.1__F_DSCav1_mut1 (opt3)
gggagagggcgcuuggcuugcaaggacccugagcugcggcauugaagcacacccaacccaacucgacugaagucagccucacugaaccggaucugagaaucuucucucucugggcuugccagggcucuccgaaccuagcuagcauccucuucaauuccaacuagaaagcuuaccauggagcugcccauccucaagaccaacgccauuacaacuauacuugcugcagugacgcugugcuucgccagcucccagaauaucaccgaagaguuuuaccaaucuacauguucagcggucaguaaaggcuauuugggggcuuuaagaacuggaugguacaccagcguuauuacaaucgaacuguccaacauuaaggagaauaaaugcaacgguaccgacgccaaggugaaacuaaucaagcaggaacucgauaaguauaaaaaugcaguaacugagcugcagcuucugaugcagucuacuccugccgcuggcucggggucagcaauauguagcggaaucgccgugugcaaggucuugcaccucgagggcgaagugaacaaaauuaagaaugcucugcugaguaccaacaaagccguugugucccucucuaauggugucagcguguuaacguucaagguacuggaccuuaagaacuacaucgauaaacaauugcugccaauucuaaauaagcaguccuguucaaucccgaacauagagacuguuauugaauuucagcagaaaaauaacaggcuccuggagaucacccgggaguucagugugaaugcgggggucacaacucccgugagcaccuauaugcuuacaaacucugaacuguugucccucauuaacgacaugccuaucaccaaugaucaaaagaaacugaugucaaacaaugugcagaucguccgccagcagagcuacaguauuaugugcauaaucaaggaggaaguuuuagcauaugugguacaacugccacucuacggagugauugacacgcccuguuggaaacuucauacuucuccucugugcacaaccaacacuaaggagggcuccaauaucuguuugacacgaaccgaucguggcugguacugcgacaacgccgggagcgucucguuuuucccacaggcugaaacguguaaggugcagucuaauagaguguuuugcgauaccaugaacucccuaacacugcccucagagguuaaucucugcaacauagacauuuucaauccuaaauaugauuguaagaucaugacaaguaaaaccgacgucagcuccucugugaucacaagccugggagccauuguaucaugcuacgguaagacuaaauguaccgcaaguaacaagaauaggggcaucauuaagacauuuuccaacgggugcgauuauguuagcaauaaaggaguggacaccgucucugugggcaacacucuuuacugugucaacaagcaagagggucagucacuguaugugaaaggggaaccaauaaucaauuucuacgacccguugguuuuucccagugaugaguucgacgcuagcauuucccaggugaacgaaaagaucaaucagucucucgccuuuauccggaaaucggaugagcuguuacacaacguaaaugucggaaagagcacgacaaacauuaugauaaccacuaucauuaucgugauuaucguuauacugcuacuccugaucgcggugggccuuuucuuguauugcaaggcccgcuccaccccugucacacugucaaaagaccaacucaguggcauuaauaacaucgcauucucuaauugaggacuaguaauaaggaaacuguaugaaugucugugggcaggaagugaagagauccuucuguaaagguuuuuggaauuaugucugcugaauaauaaacuuuuuugaaauaauaaaucugguagaaaaaugagaucuaaaaaaaaaaaaaaaaaaaaaaaaaaaaaaaaaaaaaaaaaaaaaaaaaaaaaaaaaaaaaaaaugcaucccccccccccccccccccccccccccccccaaaggcucuuuucagagccaccagaauu

SEQ ID NO: 14265 - RNA, 2045 nt, Artificial Sequence
  mRNA product Design h-4 comprising derived and/or modified sequence from HRSV(Memphis-37)__AIY60640.1__F_DSCav1_mut1 (opt4)
gggagagggcgcuuggcuugcaaggacccugagcugcggcauugaagcacacccaacccaacucgacugaagucagccucacugaaccggaucugagaaucuucucucucugggcuugccagggcucuccgaaccuagcuagcauccucuucaauuccaacuagaaagcuuaccauggagcugcccauccugaagaccaacgccaucaccaccauccuggccgccgugacccugugcuucgccagcagccagaacaucaccgaggaguucuaccagagcaccugcagcgccgugagcaagggcuaccugggcgcccugagaaccggcugguacaccagcgugaucaccaucgagcugagcaacaucaaggagaacaagugcaacggcaccgacgccaaggugaagcugaucaagcaggagcuggacaaguacaagaacgccgugaccgagcugcagcugcugaugcagagcacccccgccgccggcagcggcagcgccaucugcagcggcaucgccgugugcaaggugcugcaccuggagggcgaggugaacaagaucaagaacgcccugcugagcaccaacaaggccguggugagccugagcaacggcgugagcgugcugaccuucaaggugcuggaccugaagaacuacaucgacaagcagcugcugcccauccugaacaagcagagcugcagcauccccaacaucgagaccgugaucgaguuccagcagaagaacaacagacugcuggagaucaccagagaguucagcgugaacgccggcgugaccacccccgugagcaccuacaugcugaccaacagcgagcugcugagccugaucaacgacaugcccaucaccaacgaccagaagaagcugaugagcaacaacgugcagaucgugagacagcagagcuacagcaucaugugcaucaucaaggaggaggugcuggccuacguggugcagcugccccuguacggcgugaucgacacccccugcuggaagcugcacaccagcccccugugcaccaccaacaccaaggagggcagcaacaucugccugaccagaaccgacagaggcugguacugcgacaacgccggcagcgugagcuucuucccccaggccgagaccugcaaggugcagagcaacagaguguucugcgacaccaugaacagccugacccugcccagcgaggugaaccugugcaacaucgacaucuucaaccccaaguacgacugcaagaucaugaccagcaagaccgacgugagcagcagcgugaucaccagccugggcgccaucgugagcugcuacggcaagaccaagugcaccgccagcaacaagaacagaggcaucaucaagaccuucagcaacggcugcgacuacgugagcaacaagggcguggacaccgugagcgugggcaacacccuguacugcgugaacaagcaggagggccagagccuguacgugaagggcgagcccaucaucaacuucuacgacccccugguguuccccagcgacgaguucgacgccagcaucagccaggugaacgagaagaucaaccagagccuggccuucaucagaaagagcgacgagcugcugcacaacgugaacgugggcaagagcaccaccaacaucaugaucaccaccaucaucaucgugaucaucgugauccugcugcugcugaucgccgugggccuguuccuguacugcaaggccagaagcacccccgugacccugagcaaggaccagcugagcggcaucaacaacaucgccuucagcaacugaggacuaguaauaaggaaacuguaugaaugucugugggcaggaagugaagagauccuucuguaaagguuuuuggaauuaugucugcugaauaauaaacuuuuuugaaauaauaaaucugguagaaaaaugagaucuaaaaaaaaaaaaaaaaaaaaaaaaaaaaaaaaaaaaaaaaaaaaaaaaaaaaaaaaaaaaaaaaugcaucccccccccccccccccccccccccccccccaaaggcucuuuucagagccaccagaauu

SEQ ID NO: 14266 - RNA, 2045 nt, Artificial Sequence
  mRNA product Design h-4 comprising derived and/or modified sequence from HRSV(Memphis-37)__AIY60640.1__F_DSCav1_mut1 (opt5)
gggagagggcgcuuggcuugcaaggacccugagcugcggcauugaagcacacccaacccaacucgacugaagucagccucacugaaccggaucugagaaucuucucucucugggcuugccagggcucuccgaaccuagcuagcauccucuucaauuccaacuagaaagcuuaccauggagcugcccauccucaagaccaacgccauuacaacgauccuggcugccgugacccuuugcuucgcgagcucccagaauauuacagaagaguuuuaccaaucuaccuguagcgcugucuccaaaggcuaucugggggcccucagaacaggaugguacaccucuguuaucacaauugaacugagcaacaucaaggagaauaaaugcaacggcaccgacgccaaggugaaacuuaucaagcaggaacuggauaaguauaaaaaugcugugacggagcuccagcugcugaugcaguccaccccugccgcugggucuggaagcgccauuuguuccggcaucgcggucugcaaggugcuccaccuggagggggaaguuaacaaaauuaagaaugcccuucugagcacaaacaaagcuguggucucucucuccaauggagugagcguucugaccuucaaggugcuugaccugaagaacuacaucgauaaacaacuccugccgauucugaauaagcagucuuguuccauccccaacauugagacagucaucgaauuucagcagaaaaauaaccggcuccuggagaucacccgcgaguucagcgugaaugccggcgugacgacaccugucucuaccuauaugcuuacaaacuccgaacugcucagccugauuaacgacaugcccaucaccaaugaucaaaagaaacuuauguccaacaauguucagauugugagacagcagucuuacagcaucaugugcauuaucaaggaggaagugcuggcuuaugucgugcaacucccucuguacggcguuaucgacacccccuguuggaaacugcauacauccccucucugcacgaccaacacaaaggaggggagcaauauuugucugacccggacagaucgcggaugguacugcgacaacgccggcucuguguccuuuuucccgcaggcggaaaccuguaagguccagagcaauagaguguuuugcgauacgaugaacucucuuacacugcccagcgagguuaaucucugcaacaucgacauuuucaauccuaaauaugauuguaagaucaugaccuccaaaaccgacgugucuagcuccgucauuacaagccugggggccaucgugucuugcuacggaaagaccaaauguacagcuuccaacaagaaucggggcaucauuaagacguuuagcaacgggugcgauuaugucucuaauaaaggaguggacaccguuuccgugggcaacacacuuuacugugucaacaagcaagagggccagagccuguaugugaaaggggaacccaucauuaauuucuacgacccucucguuuuucccuccgaugaguucgacgccucuaucagccaggugaacgaaaagauuaaucagucccuggcuuuuauccgcaaaucugaugagcugcuccacaacgucaaugugggaaagagcaccacaaacauuaugaucaccacgaucauuaucgugauuaucguuauucugcuucugcucaucgccgucggccuguuccuguauugcaaggccagauccaccccggugacacuuagcaaagaccaacucucugggaucaauaacauugcuuucuccaauugaggacuaguaauaaggaaacuguaugaaugucugugggcaggaagugaagagauccuucuguaaagguuuuuggaauuaugucugcugaauaauaaacuuuuuugaaauaauaaaucugguagaaaaaugagaucuaaaaaaaaaaaaaaaaaaaaaaaaaaaaaaaaaaaaaaaaaaaaaaaaaaaaaaaaaaaaaaaaugcaucccccccccccccccccccccccccccccccaaaggcucuuuucagagccaccagaauu

SEQ ID NO: 14267 - RNA, 2045 nt, Artificial Sequence
  mRNA product Design h-4 comprising derived and/or modified sequence from HRSV(Memphis-37)__AIY60640.1__F_DSCav1_mut1 (opt6)
gggagagggcgcuuggcuugcaaggacccugagcugcggcauugaagcacacccaacccaacucgacugaagucagccucacugaaccggaucugagaaucuucucucucugggcuugccagggcucuccgaaccuagcuagcauccucuucaauuccaacuagaaagcuuaccauggaacuuccaauucuaaaaaccaaugcuauaacaacaauauuagcagcaguuacauuaugcuucgccucaucacaaaauaucacagaagaauuuuaccaauccacaugcucagcaguaucuaaaggguaccuaggagcccuacgaacaggaugguacacaucaguaauaacaauagaacucucaaacaucaaagaaaacaaaugcaauggaacagacgcuaaaguaaaauuaauaaaacaagaacuagacaaauacaaaaacgccgucaccgaacuucaguuacucaugcaaagcacaccugcagcaggaucagguucagcaauaugcucaggaauagcaguuugcaaaguauuacaccuagaaggugaagucaacaaaauaaaaaacgcacuucuaaguacuaacaaagcuguaguaucauuaucaaacggaguauccguacuaaccuuuaaaguccuagaccuaaaaaacuacauagacaaacaacuacucccaauacucaauaaacaauccugcucaauucccaacaucgaaacaguaauagaauuucaacaaaaaaacaaucgccuucuagaaauaacaagagaauuuucagucaacgccggaguaacaacaccaguaucaacauauaugcuaacaaacagugaacuauuauccuuaauaaacgacaugccaauaacaaaugaccaaaaaaaacuaauguccaauaauguccaaauaguaagacaacaaagcuauucaauuauguguauaauaaaagaagaaguauuagcauacguaguucaacuaccacuauauggcguuauagacacaccaugcuggaaauuacacacaagcccacuaugcacaacaaauacaaaagaaggauccaacauuugcuuaacuagaacugacagaggaugguacugcgacaacgcuggaucagucucuuucuucccacaagcagaaaccuguaaaguacaaucaaauagagucuucugcgacacaaugaacucacuaacucucccaucugaaguaaacuuaugcaacaucgauauauuuaacccaaaauacgauuguaaaauaaugacauccaaaacagacguuucaucaagcguaaucaccucccucggagcaaucguaagcugcuacgguaaaacaaaaugcacagcauccaacaaaaacagaggcaucauaaaaacauucucaaacggaugugacuauguaucaaacaaaggaguagacacaguuucaguaggcaauaccuuauacugugucaauaaacaagaaggacaaucacuauauguaaaaggagaaccuauaauaaacuucuacgacccccucgucuucccuagcgaugaauuugacgcaucaauaucgcaaguaaacgaaaaaauaaaccaaucauuagccuuuauaagaaaaucagacgaauuauuacacaacguaaacguggggaaaagcacaacuaacaucaugauaacaacuaucauaauuguaaucaucgucauccuauuacuccuaaucgcaguaggacuauuccuauacugcaaagcuagaucaacaccagucacccuaucgaaagaucaauugucaggaauaaacaauauagccuuuucaaauuaaggacuaguaauaaggaaacuguaugaaugucugugggcaggaagugaagagauccuucuguaaagguuuuuggaauuaugucugcugaauaauaaacuuuuuugaaauaauaaaucugguagaaaaaugagaucuaaaaaaaaaaaaaaaaaaaaaaaaaaaaaaaaaaaaaaaaaaaaaaaaaaaaaaaaaaaaaaaaugcaucccccccccccccccccccccccccccccccaaaggcucuuuucagagccaccagaauu

SEQ ID NO: 14268 - RNA, 2045 nt, Artificial Sequence
  mRNA product Design h-4 comprising derived and/or modified sequence from HRSV(Memphis-37)__AIY60640.1__F_DSCav1_mut1 (opt11)
gggagagggcgcuuggcuugcaaggacccugagcugcggcauugaagcacacccaacccaacucgacugaagucagccucacugaaccggaucugagaaucuucucucucugggcuugccagggcucuccgaaccuagcuagcauccucuucaauuccaacuagaaagcuuaccauggaacuccccauccucaaaacgaacgccaucacaaccauccucgccgccgucacccucugcuucgcgucaucccaaaacauaacugaagaguucuaucaaucaaccugcuccgcagucucaaaaggcuaccucggcgcccuacggaccggcugguacacaagcgucaucacaauagaacuuuccaacaucaaagaaaacaaauguaacggcaccgacgcaaaagucaaacucauaaaacaagaacuagacaaauauaaaaacgccguaacugaacuacaacuccucaugcaaucaacuccugcagccgguagcggcuccgcaaucugcucaggcaucgcagucugcaaagucuuacaccuagaaggcgaagucaacaaaaucaagaacgcccuacuauccacaaacaaagcaguagucucucuauccaacggagucuccguccucacauucaaaguacucgaccuaaagaacuacaucgacaaacaacuacuaccaaucuuaaacaaacaauccugcucaaucccuaacauugaaaccgucauagaguuccaacagaaaaacaaccgccuccucgaaauaaccagagaguucucagucaacgccggcgucaccaccccggucucaaccuacaugcuaaccaacucugaacuucucagccuaaucaacgacaugcccauuaccaacgaccaaaagaaacucauguccaauaacguccaaaucguucgacaacaauccuacucaaucaugugcaucauaaaagaagaaguccuagcauacgucguccaacucccacuauacggcguaaucgacacccccugcuggaaacuccacaccuccccucucuguaccaccaacaccaaagaaggguccaacaucugccucacgcgcaccgaccgaggcugguauugcgacaaugcaggcucugucuccuucuucccccaagccgaaaccugcaaaguccaaucuaaccgcgucuucugcgacaccaugaacagucuuacccucccgucagaagucaaccucugcaacauagauaucuucaacccaaaauacgacugcaaaaucaugaccucaaaaaccgacguuuccucauccguuaucaccucccucggcgcaaucgucagcugcuacggcaagacaaagugcacggcuucaaacaaaaaccgcggaaucaucaagacauucagcaacggcugcgacuacguauccaacaaaggaguggacacagucuccguuggaaacacccucuacugcguaaacaaacaagaaggccaaucacucuacgucaaaggcgaacccaucaucaacuucuacgacccacucgucuuccccuccgacgaguucgacgccucaaucagccaagucaacgagaaaauuaaccagucacucgccuucauacgcaaauccgacgaacuucuacacaacguaaacgucggaaaaucaaccacaaacaucaugauuaccacaauuaucauagucaucauaguaauccuccugcuacucauagcagucggacucuuccuauacugcaaagcccgcuccaccccugucacccuauccaaagaccaacuuuccggcaucaacaacauagccuuuuccaacuaaggacuaguaauaaggaaacuguaugaaugucugugggcaggaagugaagagauccuucuguaaagguuuuuggaauuaugucugcugaauaauaaacuuuuuugaaauaauaaaucugguagaaaaaugagaucuaaaaaaaaaaaaaaaaaaaaaaaaaaaaaaaaaaaaaaaaaaaaaaaaaaaaaaaaaaaaaaaaugcaucccccccccccccccccccccccccccccccaaaggcucuuuucagagccaccagaauu

SEQ ID NO: 14269 - RNA, 2061 nt, Artificial Sequence
  mRNA product Design h-5 comprising derived and/or modified sequence from HRSV(Memphis-37)__AIY60640.1__F_DSCav1_mut1 (opt1)
gggagagggcgcuuggcuugcaaggacccugagcugcggcauugaagcacacccaacccaacucgacugaagucagccucacugaaccggaucugagaaucuucucucucugggcuugccagggcucuccgaaccuagcuagcauccucuucaauuccaacuagaaagcuuaccauggagcugcccauccucaagaccaacgccaucaccacgauccuggccgcggugacccugugcuucgccagcucccagaacaucaccgaggaguucuaccagagcacgugcuccgccgucagcaagggcuaccucggcgcccugcgcaccgggugguacaccagcgugaucaccaucgagcuguccaacaucaaggagaacaagugcaacggcaccgacgccaaggugaagcucaucaagcaggagcuggacaaguacaagaacgcggucacggagcugcagcuccugaugcagagcaccccggccgccggcuccgggagcgcgaucugcuccggcaucgccgucugcaaggugcugcaccucgagggcgaggugaacaagaucaagaacgcccugcuguccaccaacaaggccgucgugagccucuccaacggggugagcguccugaccuucaaggugcuggaccucaagaacuacaucgacaagcagcugcugcccauccugaacaagcagagcugcuccauccccaacaucgagaccgucaucgaguuccagcagaagaacaaccgccuccuggagaucacgcgggaguucagcgugaacgcgggcgugaccacccccgucuccaccuacaugcugacgaacagcgagcuccugucccugaucaacgacaugccgaucaccaacgaccagaagaagcucaugagcaacaacgugcagaucgugcgccagcaguccuacagcaucaugugcaucaucaaggaggagguccuggccuacguggugcagcugccccucuacggggucaucgacacccccugcuggaagcugcacaccagcccccugugcacgaccaacaccaaggagggcuccaacaucugccucacccggacggaccgcgggugguacugcgacaacgccggcagcguguccuucuucccgcaggccgagaccugcaagguccagagcaaccggguguucugcgacaccaugaacucccugacccugcccagcgaggugaaccucugcaacaucgacaucuucaaccccaaguacgacugcaagaucaugacguccaagaccgacgucagcuccagcgugaucaccucccugggcgccaucgugagcugcuacgggaagaccaagugcacggcgagcaacaagaaccgcggcaucaucaagaccuucuccaacgggugcgacuacgucagcaacaagggcguggacaccguguccgucggcaacacccuguacugcgugaacaagcaggagggccagagccucuacgugaagggggagcccaucaucaacuucuacgacccgcuggucuuccccuccgacgaguucgacgccagcaucucccaggugaacgagaagaucaaccagagccuggccuucauccggaaguccgacgagcuccugcacaacgugaacgucggcaagagcaccacgaacaucaugaucaccaccaucaucaucgugaucaucgugauccugcugcuccugaucgccgucgggcuguuccucuacugcaaggcccgcuccacccccgugacgcugagcaaggaccagcuguccgggaucaacaacaucgcguucagcaacugaggacuaguacuggcugcaucucccuuuccucuguccuccauccuucucccaggauggugaagggggaccugguacccagugauccccaccccaggauccuaaaucaugacuuaccugcuaauaaaaacucauuggaaaagugagaagaucuaaaaaaaaaaaaaaaaaaaaaaaaaaaaaaaaaaaaaaaaaaaaaaaaaaaaaaaaaaaaaaaaugcaucccccccccccccccccccccccccccccccaaaggcucuuuucagagccaccagaauu

SEQ ID NO: 14270 - RNA, 2061 nt, Artificial Sequence
  mRNA product Design h-5 comprising derived and/or modified sequence from HRSV(Memphis-37)__AIY60640.1__F_DSCav1_mut1 (opt1)
gggagagggcgcuuggcuugcaaggacccugagcugcggcauugaagcacacccaacccaacucgacugaagucagccucacugaaccggaucugagaaucuucucucucugggcuugccagggcucuccgaaccuagcuagcauccucuucaauuccaacuagaaagcuuaccauggagcugcccauccucaagaccaacgccaucaccacgauccuggccgcggugacccugugcuucgccagcucccagaacaucaccgaggaguucuaccagagcacgugcuccgccgucagcaagggcuaccucggggcccugcgcaccggcugguacaccuccgugaucaccaucgagcugagcaacaucaaggagaacaagugcaacgggaccgacgccaaggugaagcucaucaagcaggagcuggacaaguacaagaacgcggucacggagcugcagcuccugaugcaguccaccccggccgccggcagcggguccgccaucugcagcggcaucgcggugugcaaggugcugcaccucgagggcgaggucaacaagaucaagaacgcccugcuguccaccaacaaggccguggugagccucuccaacggggucagcgugcugaccuucaaggugcuggaccucaagaacuacaucgacaagcagcugcugcccauccucaacaagcaguccugcagcauccccaacaucgagacggucaucgaguuccagcagaagaacaaccggcugcuggagaucacccgcgaguucuccgugaacgccggcgugaccacccccgucagcacguacaugcucaccaacuccgagcugcugagccucaucaacgacaugccgaucaccaacgaccagaagaagcugaugagcaacaacgugcagaucgugcggcagcaguccuacagcaucaugugcaucaucaaggaggagguccuggccuacguggugcagcucccccuguacggggucaucgacacccccugcuggaagcugcacacgagcccccucugcaccaccaacaccaaggagggcuccaacaucugccugacgcgcaccgaccgggggugguacugcgacaacgcgggcuccgugagcuucuucccgcaggccgagaccugcaaggugcaguccaaccgcgucuucugcgacaccaugaacagccugacgcuccccuccgaggugaaccugugcaacaucgacaucuucaaccccaaguacgacugcaagaucaugaccagcaagaccgacgucuccagcuccgugaucaccagccugggcgccaucguguccugcuacgggaagacgaagugcaccgccagcaacaagaaccggggcaucaucaagaccuucuccaacgggugcgacuacgucagcaacaagggcguggacaccguguccgucggcaacacgcucuacugcgugaacaagcaggaggggcagagccuguacgugaagggcgagcccaucaucaacuucuacgacccgcuggucuuccccagcgacgaguucgacgccuccaucagccaggugaacgagaagaucaaccagucccucgcguucauccgcaagagcgacgagcugcugcacaacgugaacgucgggaaguccaccaccaacaucaugaucaccaccaucaucaucgugaucaucgugauccuccugcugcucaucgccgucggccuguuccuguacugcaaggcccggagcacgcccgugacccuguccaaggaccagcucagcgggaucaacaacaucgccuucuccaacugaggacuaguacuggcugcaucucccuuuccucuguccuccauccuucucccaggauggugaagggggaccugguacccagugauccccaccccaggauccuaaaucaugacuuaccugcuaauaaaaacucauuggaaaagugagaagaucuaaaaaaaaaaaaaaaaaaaaaaaaaaaaaaaaaaaaaaaaaaaaaaaaaaaaaaaaaaaaaaaaugcaucccccccccccccccccccccccccccccccaaaggcucuuuucagagccaccagaauu

SEQ ID NO: 14271 - RNA, 2061 nt, Artificial Sequence
  mRNA product Design h-5 comprising derived and/or modified sequence from HRSV(Memphis-37)__AIY60640.1__F_DSCav1_mut1 (opt2)
gggagagggcgcuuggcuugcaaggacccugagcugcggcauugaagcacacccaacccaacucgacugaagucagccucacugaaccggaucugagaaucuucucucucugggcuugccagggcucuccgaaccuagcuagcauccucuucaauuccaacuagaaagcuuaccauggagcuccccauccucaagaccaacgccaucaccaccauccucgccgccgucacccucugcuucgccuccucccagaacaucaccgaggaguucuaccaguccaccugcuccgccgucuccaagggcuaccucggcgcccuccgcaccggcugguacaccuccgucaucaccaucgagcucuccaacaucaaggagaacaagugcaacggcaccgacgccaaggucaagcucaucaagcaggagcucgacaaguacaagaacgccgucaccgagcuccagcuccucaugcaguccacccccgccgccggcuccggcuccgccaucugcuccggcaucgccgucugcaagguccuccaccucgagggcgaggucaacaagaucaagaacgcccuccucuccaccaacaaggccgucgucucccucuccaacggcgucuccguccucaccuucaagguccucgaccucaagaacuacaucgacaagcagcuccuccccauccucaacaagcaguccugcuccauccccaacaucgagaccgucaucgaguuccagcagaagaacaaccgccuccucgagaucacccgcgaguucuccgucaacgccggcgucaccacccccgucuccaccuacaugcucaccaacuccgagcuccucucccucaucaacgacaugcccaucaccaacgaccagaagaagcucauguccaacaacguccagaucguccgccagcaguccuacuccaucaugugcaucaucaaggaggagguccucgccuacgucguccagcucccccucuacggcgucaucgacacccccugcuggaagcuccacaccuccccccucugcaccaccaacaccaaggagggcuccaacaucugccucacccgcaccgaccgcggcugguacugcgacaacgccggcuccgucuccuucuucccccaggccgagaccugcaagguccaguccaaccgcgucuucugcgacaccaugaacucccucacccuccccuccgaggucaaccucugcaacaucgacaucuucaaccccaaguacgacugcaagaucaugaccuccaagaccgacgucuccuccuccgucaucaccucccucggcgccaucgucuccugcuacggcaagaccaagugcaccgccuccaacaagaaccgcggcaucaucaagaccuucuccaacggcugcgacuacgucuccaacaagggcgucgacaccgucuccgucggcaacacccucuacugcgucaacaagcaggagggccagucccucuacgucaagggcgagcccaucaucaacuucuacgacccccucgucuuccccuccgacgaguucgacgccuccaucucccaggucaacgagaagaucaaccagucccucgccuucauccgcaaguccgacgagcuccuccacaacgucaacgucggcaaguccaccaccaacaucaugaucaccaccaucaucaucgucaucaucgucauccuccuccuccucaucgccgucggccucuuccucuacugcaaggcccgcuccacccccgucacccucuccaaggaccagcucuccggcaucaacaacaucgccuucuccaacugaggacuaguacuggcugcaucucccuuuccucuguccuccauccuucucccaggauggugaagggggaccugguacccagugauccccaccccaggauccuaaaucaugacuuaccugcuaauaaaaacucauuggaaaagugagaagaucuaaaaaaaaaaaaaaaaaaaaaaaaaaaaaaaaaaaaaaaaaaaaaaaaaaaaaaaaaaaaaaaaugcaucccccccccccccccccccccccccccccccaaaggcucuuuucagagccaccagaauu

SEQ ID NO: 14272 - RNA, 2061 nt, Artificial Sequence
  mRNA product Design h-5 comprising derived and/or modified sequence from HRSV(Memphis-37)__AIY60640.1__F_DSCav1_mut1 (opt3)
gggagagggcgcuuggcuugcaaggacccugagcugcggcauugaagcacacccaacccaacucgacugaagucagccucacugaaccggaucugagaaucuucucucucugggcuugccagggcucuccgaaccuagcuagcauccucuucaauuccaacuagaaagcuuaccauggagcugcccauccucaagaccaacgccauuacaacuauacuugcugcagugacgcugugcuucgccagcucccagaauaucaccgaagaguuuuaccaaucuacauguucagcggucaguaaaggcuauuugggggcuuuaagaacuggaugguacaccagcguuauuacaaucgaacuguccaacauuaaggagaauaaaugcaacgguaccgacgccaaggugaaacuaaucaagcaggaacucgauaaguauaaaaaugcaguaacugagcugcagcuucugaugcagucuacuccugccgcuggcucggggucagcaauauguagcggaaucgccgugugcaaggucuugcaccucgagggcgaagugaacaaaauuaagaaugcucugcugaguaccaacaaagccguugugucccucucuaauggugucagcguguuaacguucaagguacuggaccuuaagaacuacaucgauaaacaauugcugccaauucuaaauaagcaguccuguucaaucccgaacauagagacuguuauugaauuucagcagaaaaauaacaggcuccuggagaucacccgggaguucagugugaaugcgggggucacaacucccgugagcaccuauaugcuuacaaacucugaacuguugucccucauuaacgacaugccuaucaccaaugaucaaaagaaacugaugucaaacaaugugcagaucguccgccagcagagcuacaguauuaugugcauaaucaaggaggaaguuuuagcauaugugguacaacugccacucuacggagugauugacacgcccuguuggaaacuucauacuucuccucugugcacaaccaacacuaaggagggcuccaauaucuguuugacacgaaccgaucguggcugguacugcgacaacgccgggagcgucucguuuuucccacaggcugaaacguguaaggugcagucuaauagaguguuuugcgauaccaugaacucccuaacacugcccucagagguuaaucucugcaacauagacauuuucaauccuaaauaugauuguaagaucaugacaaguaaaaccgacgucagcuccucugugaucacaagccugggagccauuguaucaugcuacgguaagacuaaauguaccgcaaguaacaagaauaggggcaucauuaagacauuuuccaacgggugcgauuauguuagcaauaaaggaguggacaccgucucugugggcaacacucuuuacugugucaacaagcaagagggucagucacuguaugugaaaggggaaccaauaaucaauuucuacgacccguugguuuuucccagugaugaguucgacgcuagcauuucccaggugaacgaaaagaucaaucagucucucgccuuuauccggaaaucggaugagcuguuacacaacguaaaugucggaaagagcacgacaaacauuaugauaaccacuaucauuaucgugauuaucguuauacugcuacuccugaucgcggugggccuuuucuuguauugcaaggcccgcuccaccccugucacacugucaaaagaccaacucaguggcauuaauaacaucgcauucucuaauugaggacuaguacuggcugcaucucccuuuccucuguccuccauccuucucccaggauggugaagggggaccugguacccagugauccccaccccaggauccuaaaucaugacuuaccugcuaauaaaaacucauuggaaaagugagaagaucuaaaaaaaaaaaaaaaaaaaaaaaaaaaaaaaaaaaaaaaaaaaaaaaaaaaaaaaaaaaaaaaaugcaucccccccccccccccccccccccccccccccaaaggcucuuuucagagccaccagaauu

SEQ ID NO: 14273 - RNA, 2061 nt, Artificial Sequence
  mRNA product Design h-5 comprising derived and/or modified sequence from HRSV(Memphis-37)__AIY60640.1__F_DSCav1_mut1 (opt4)
gggagagggcgcuuggcuugcaaggacccugagcugcggcauugaagcacacccaacccaacucgacugaagucagccucacugaaccggaucugagaaucuucucucucugggcuugccagggcucuccgaaccuagcuagcauccucuucaauuccaacuagaaagcuuaccauggagcugcccauccugaagaccaacgccaucaccaccauccuggccgccgugacccugugcuucgccagcagccagaacaucaccgaggaguucuaccagagcaccugcagcgccgugagcaagggcuaccugggcgcccugagaaccggcugguacaccagcgugaucaccaucgagcugagcaacaucaaggagaacaagugcaacggcaccgacgccaaggugaagcugaucaagcaggagcuggacaaguacaagaacgccgugaccgagcugcagcugcugaugcagagcacccccgccgccggcagcggcagcgccaucugcagcggcaucgccgugugcaaggugcugcaccuggagggcgaggugaacaagaucaagaacgcccugcugagcaccaacaaggccguggugagccugagcaacggcgugagcgugcugaccuucaaggugcuggaccugaagaacuacaucgacaagcagcugcugcccauccugaacaagcagagcugcagcauccccaacaucgagaccgugaucgaguuccagcagaagaacaacagacugcuggagaucaccagagaguucagcgugaacgccggcgugaccacccccgugagcaccuacaugcugaccaacagcgagcugcugagccugaucaacgacaugcccaucaccaacgaccagaagaagcugaugagcaacaacgugcagaucgugagacagcagagcuacagcaucaugugcaucaucaaggaggaggugcuggccuacguggugcagcugccccuguacggcgugaucgacacccccugcuggaagcugcacaccagcccccugugcaccaccaacaccaaggagggcagcaacaucugccugaccagaaccgacagaggcugguacugcgacaacgccggcagcgugagcuucuucccccaggccgagaccugcaaggugcagagcaacagaguguucugcgacaccaugaacagccugacccugcccagcgaggugaaccugugcaacaucgacaucuucaaccccaaguacgacugcaagaucaugaccagcaagaccgacgugagcagcagcgugaucaccagccugggcgccaucgugagcugcuacggcaagaccaagugcaccgccagcaacaagaacagaggcaucaucaagaccuucagcaacggcugcgacuacgugagcaacaagggcguggacaccgugagcgugggcaacacccuguacugcgugaacaagcaggagggccagagccuguacgugaagggcgagcccaucaucaacuucuacgacccccugguguuccccagcgacgaguucgacgccagcaucagccaggugaacgagaagaucaaccagagccuggccuucaucagaaagagcgacgagcugcugcacaacgugaacgugggcaagagcaccaccaacaucaugaucaccaccaucaucaucgugaucaucgugauccugcugcugcugaucgccgugggccuguuccuguacugcaaggccagaagcacccccgugacccugagcaaggaccagcugagcggcaucaacaacaucgccuucagcaacugaggacuaguacuggcugcaucucccuuuccucuguccuccauccuucucccaggauggugaagggggaccugguacccagugauccccaccccaggauccuaaaucaugacuuaccugcuaauaaaaacucauuggaaaagugagaagaucuaaaaaaaaaaaaaaaaaaaaaaaaaaaaaaaaaaaaaaaaaaaaaaaaaaaaaaaaaaaaaaaaugcaucccccccccccccccccccccccccccccccaaaggcucuuuucagagccaccagaauu

SEQ ID NO: 14274 - RNA, 2061 nt, Artificial Sequence
  mRNA product Design h-5 comprising derived and/or modified sequence from HRSV(Memphis-37)__AIY60640.1__F_DSCav1_mut1 (opt5)
gggagagggcgcuuggcuugcaaggacccugagcugcggcauugaagcacacccaacccaacucgacugaagucagccucacugaaccggaucugagaaucuucucucucugggcuugccagggcucuccgaaccuagcuagcauccucuucaauuccaacuagaaagcuuaccauggagcugcccauccucaagaccaacgccauuacaacgauccuggcugccgugacccuuugcuucgcgagcucccagaauauuacagaagaguuuuaccaaucuaccuguagcgcugucuccaaaggcuaucugggggcccucagaacaggaugguacaccucuguuaucacaauugaacugagcaacaucaaggagaauaaaugcaacggcaccgacgccaaggugaaacuuaucaagcaggaacuggauaaguauaaaaaugcugugacggagcuccagcugcugaugcaguccaccccugccgcugggucuggaagcgccauuuguuccggcaucgcggucugcaaggugcuccaccuggagggggaaguuaacaaaauuaagaaugcccuucugagcacaaacaaagcuguggucucucucuccaauggagugagcguucugaccuucaaggugcuugaccugaagaacuacaucgauaaacaacuccugccgauucugaauaagcagucuuguuccauccccaacauugagacagucaucgaauuucagcagaaaaauaaccggcuccuggagaucacccgcgaguucagcgugaaugccggcgugacgacaccugucucuaccuauaugcuuacaaacuccgaacugcucagccugauuaacgacaugcccaucaccaaugaucaaaagaaacuuauguccaacaauguucagauugugagacagcagucuuacagcaucaugugcauuaucaaggaggaagugcuggcuuaugucgugcaacucccucuguacggcguuaucgacacccccuguuggaaacugcauacauccccucucugcacgaccaacacaaaggaggggagcaauauuugucugacccggacagaucgcggaugguacugcgacaacgccggcucuguguccuuuuucccgcaggcggaaaccuguaagguccagagcaauagaguguuuugcgauacgaugaacucucuuacacugcccagcgagguuaaucucugcaacaucgacauuuucaauccuaaauaugauuguaagaucaugaccuccaaaaccgacgugucuagcuccgucauuacaagccugggggccaucgugucuugcuacggaaagaccaaauguacagcuuccaacaagaaucggggcaucauuaagacguuuagcaacgggugcgauuaugucucuaauaaaggaguggacaccguuuccgugggcaacacacuuuacugugucaacaagcaagagggccagagccuguaugugaaaggggaacccaucauuaauuucuacgacccucucguuuuucccuccgaugaguucgacgccucuaucagccaggugaacgaaaagauuaaucagucccuggcuuuuauccgcaaaucugaugagcugcuccacaacgucaaugugggaaagagcaccacaaacauuaugaucaccacgaucauuaucgugauuaucguuauucugcuucugcucaucgccgucggccuguuccuguauugcaaggccagauccaccccggugacacuuagcaaagaccaacucucugggaucaauaacauugcuuucuccaauugaggacuaguacuggcugcaucucccuuuccucuguccuccauccuucucccaggauggugaagggggaccugguacccagugauccccaccccaggauccuaaaucaugacuuaccugcuaauaaaaacucauuggaaaagugagaagaucuaaaaaaaaaaaaaaaaaaaaaaaaaaaaaaaaaaaaaaaaaaaaaaaaaaaaaaaaaaaaaaaaugcaucccccccccccccccccccccccccccccccaaaggcucuuuucagagccaccagaauu

SEQ ID NO: 14275 - RNA, 2061 nt, Artificial Sequence
  mRNA product Design h-5 comprising derived and/or modified sequence from HRSV(Memphis-37)__AIY60640.1__F_DSCav1_mut1 (opt6)
gggagagggcgcuuggcuugcaaggacccugagcugcggcauugaagcacacccaacccaacucgacugaagucagccucacugaaccggaucugagaaucuucucucucugggcuugccagggcucuccgaaccuagcuagcauccucuucaauuccaacuagaaagcuuaccauggaacuuccaauucuaaaaaccaaugcuauaacaacaauauuagcagcaguuacauuaugcuucgccucaucacaaaauaucacagaagaauuuuaccaauccacaugcucagcaguaucuaaaggguaccuaggagcccuacgaacaggaugguacacaucaguaauaacaauagaacucucaaacaucaaagaaaacaaaugcaauggaacagacgcuaaaguaaaauuaauaaaacaagaacuagacaaauacaaaaacgccgucaccgaacuucaguuacucaugcaaagcacaccugcagcaggaucagguucagcaauaugcucaggaauagcaguuugcaaaguauuacaccuagaaggugaagucaacaaaauaaaaaacgcacuucuaaguacuaacaaagcuguaguaucauuaucaaacggaguauccguacuaaccuuuaaaguccuagaccuaaaaaacuacauagacaaacaacuacucccaauacucaauaaacaauccugcucaauucccaacaucgaaacaguaauagaauuucaacaaaaaaacaaucgccuucuagaaauaacaagagaauuuucagucaacgccggaguaacaacaccaguaucaacauauaugcuaacaaacagugaacuauuauccuuaauaaacgacaugccaauaacaaaugaccaaaaaaaacuaauguccaauaauguccaaauaguaagacaacaaagcuauucaauuauguguauaauaaaagaagaaguauuagcauacguaguucaacuaccacuauauggcguuauagacacaccaugcuggaaauuacacacaagcccacuaugcacaacaaauacaaaagaaggauccaacauuugcuuaacuagaacugacagaggaugguacugcgacaacgcuggaucagucucuuucuucccacaagcagaaaccuguaaaguacaaucaaauagagucuucugcgacacaaugaacucacuaacucucccaucugaaguaaacuuaugcaacaucgauauauuuaacccaaaauacgauuguaaaauaaugacauccaaaacagacguuucaucaagcguaaucaccucccucggagcaaucguaagcugcuacgguaaaacaaaaugcacagcauccaacaaaaacagaggcaucauaaaaacauucucaaacggaugugacuauguaucaaacaaaggaguagacacaguuucaguaggcaauaccuuauacugugucaauaaacaagaaggacaaucacuauauguaaaaggagaaccuauaauaaacuucuacgacccccucgucuucccuagcgaugaauuugacgcaucaauaucgcaaguaaacgaaaaaauaaaccaaucauuagccuuuauaagaaaaucagacgaauuauuacacaacguaaacguggggaaaagcacaacuaacaucaugauaacaacuaucauaauuguaaucaucgucauccuauuacuccuaaucgcaguaggacuauuccuauacugcaaagcuagaucaacaccagucacccuaucgaaagaucaauugucaggaauaaacaauauagccuuuucaaauuaaggacuaguacuggcugcaucucccuuuccucuguccuccauccuucucccaggauggugaagggggaccugguacccagugauccccaccccaggauccuaaaucaugacuuaccugcuaauaaaaacucauuggaaaagugagaagaucuaaaaaaaaaaaaaaaaaaaaaaaaaaaaaaaaaaaaaaaaaaaaaaaaaaaaaaaaaaaaaaaaugcaucccccccccccccccccccccccccccccccaaaggcucuuuucagagccaccagaauu

SEQ ID NO: 14276 - RNA, 2061 nt, Artificial Sequence
  mRNA product Design h-5 comprising derived and/or modified sequence from HRSV(Memphis-37)__AIY60640.1__F_DSCav1_mut1 (opt11)
gggagagggcgcuuggcuugcaaggacccugagcugcggcauugaagcacacccaacccaacucgacugaagucagccucacugaaccggaucugagaaucuucucucucugggcuugccagggcucuccgaaccuagcuagcauccucuucaauuccaacuagaaagcuuaccauggaacuccccauccucaaaacgaacgccaucacaaccauccucgccgccgucacccucugcuucgcgucaucccaaaacauaacugaagaguucuaucaaucaaccugcuccgcagucucaaaaggcuaccucggcgcccuacggaccggcugguacacaagcgucaucacaauagaacuuuccaacaucaaagaaaacaaauguaacggcaccgacgcaaaagucaaacucauaaaacaagaacuagacaaauauaaaaacgccguaacugaacuacaacuccucaugcaaucaacuccugcagccgguagcggcuccgcaaucugcucaggcaucgcagucugcaaagucuuacaccuagaaggcgaagucaacaaaaucaagaacgcccuacuauccacaaacaaagcaguagucucucuauccaacggagucuccguccucacauucaaaguacucgaccuaaagaacuacaucgacaaacaacuacuaccaaucuuaaacaaacaauccugcucaaucccuaacauugaaaccgucauagaguuccaacagaaaaacaaccgccuccucgaaauaaccagagaguucucagucaacgccggcgucaccaccccggucucaaccuacaugcuaaccaacucugaacuucucagccuaaucaacgacaugcccauuaccaacgaccaaaagaaacucauguccaauaacguccaaaucguucgacaacaauccuacucaaucaugugcaucauaaaagaagaaguccuagcauacgucguccaacucccacuauacggcguaaucgacacccccugcuggaaacuccacaccuccccucucuguaccaccaacaccaaagaaggguccaacaucugccucacgcgcaccgaccgaggcugguauugcgacaaugcaggcucugucuccuucuucccccaagccgaaaccugcaaaguccaaucuaaccgcgucuucugcgacaccaugaacagucuuacccucccgucagaagucaaccucugcaacauagauaucuucaacccaaaauacgacugcaaaaucaugaccucaaaaaccgacguuuccucauccguuaucaccucccucggcgcaaucgucagcugcuacggcaagacaaagugcacggcuucaaacaaaaaccgcggaaucaucaagacauucagcaacggcugcgacuacguauccaacaaaggaguggacacagucuccguuggaaacacccucuacugcguaaacaaacaagaaggccaaucacucuacgucaaaggcgaacccaucaucaacuucuacgacccacucgucuuccccuccgacgaguucgacgccucaaucagccaagucaacgagaaaauuaaccagucacucgccuucauacgcaaauccgacgaacuucuacacaacguaaacgucggaaaaucaaccacaaacaucaugauuaccacaauuaucauagucaucauaguaauccuccugcuacucauagcagucggacucuuccuauacugcaaagcccgcuccaccccugucacccuauccaaagaccaacuuuccggcaucaacaacauagccuuuuccaacuaaggacuaguacuggcugcaucucccuuuccucuguccuccauccuucucccaggauggugaagggggaccugguacccagugauccccaccccaggauccuaaaucaugacuuaccugcuaauaaaaacucauuggaaaagugagaagaucuaaaaaaaaaaaaaaaaaaaaaaaaaaaaaaaaaaaaaaaaaaaaaaaaaaaaaaaaaaaaaaaaugcaucccccccccccccccccccccccccccccccaaaggcucuuuucagagccaccagaauu

SEQ ID NO: 14277 - RNA, 1994 nt, Artificial Sequence
  mRNA product Design i-1 comprising derived and/or modified sequence from HRSV(Memphis-37)__AIY60640.1__F_DSCav1_mut1 (opt1)
gggagagggcgcuuggcuugcaaggacccugagcugcggcauugaagcacacccaacccaacucgacugaagucagccucacugaaccggaucugagaaucuucucucucugggcuugccagggcucuccgaaccuagcuagcauccucuucaauuccaacuagaaagcuuaccauggagcugcccauccucaagaccaacgccaucaccacgauccuggccgcggugacccugugcuucgccagcucccagaacaucaccgaggaguucuaccagagcacgugcuccgccgucagcaagggcuaccucggcgcccugcgcaccgggugguacaccagcgugaucaccaucgagcuguccaacaucaaggagaacaagugcaacggcaccgacgccaaggugaagcucaucaagcaggagcuggacaaguacaagaacgcggucacggagcugcagcuccugaugcagagcaccccggccgccggcuccgggagcgcgaucugcuccggcaucgccgucugcaaggugcugcaccucgagggcgaggugaacaagaucaagaacgcccugcuguccaccaacaaggccgucgugagccucuccaacggggugagcguccugaccuucaaggugcuggaccucaagaacuacaucgacaagcagcugcugcccauccugaacaagcagagcugcuccauccccaacaucgagaccgucaucgaguuccagcagaagaacaaccgccuccuggagaucacgcgggaguucagcgugaacgcgggcgugaccacccccgucuccaccuacaugcugacgaacagcgagcuccugucccugaucaacgacaugccgaucaccaacgaccagaagaagcucaugagcaacaacgugcagaucgugcgccagcaguccuacagcaucaugugcaucaucaaggaggagguccuggccuacguggugcagcugccccucuacggggucaucgacacccccugcuggaagcugcacaccagcccccugugcacgaccaacaccaaggagggcuccaacaucugccucacccggacggaccgcgggugguacugcgacaacgccggcagcguguccuucuucccgcaggccgagaccugcaagguccagagcaaccggguguucugcgacaccaugaacucccugacccugcccagcgaggugaaccucugcaacaucgacaucuucaaccccaaguacgacugcaagaucaugacguccaagaccgacgucagcuccagcgugaucaccucccugggcgccaucgugagcugcuacgggaagaccaagugcacggcgagcaacaagaaccgcggcaucaucaagaccuucuccaacgggugcgacuacgucagcaacaagggcguggacaccguguccgucggcaacacccuguacugcgugaacaagcaggagggccagagccucuacgugaagggggagcccaucaucaacuucuacgacccgcuggucuuccccuccgacgaguucgacgccagcaucucccaggugaacgagaagaucaaccagagccuggccuucauccggaaguccgacgagcuccugcacaacgugaacgucggcaagagcaccacgaacaucaugaucaccaccaucaucaucgugaucaucgugauccugcugcuccugaucgccgucgggcuguuccucuacugcaaggcccgcuccacccccgugacgcugagcaaggaccagcuguccgggaucaacaacaucgcguucagcaacugaggacuaguguccaccugucccuccugggcugcuggauugucucguuuuccugccaaauaaacaggaucagcgcuuuacagaucuaaaaaaaaaaaaaaaaaaaaaaaaaaaaaaaaaaaaaaaaaaaaaaaaaaaaaaaaaaaaaaaaugcaucccccccccccccccccccccccccccccccaaaggcucuuuucagagccaccagaauu

SEQ ID NO: 14278 - RNA, 1994 nt, Artificial Sequence
  mRNA product Design i-1 comprising derived and/or modified sequence from HRSV(Memphis-37)__AIY60640.1__F_DSCav1_mut1 (opt1)
gggagagggcgcuuggcuugcaaggacccugagcugcggcauugaagcacacccaacccaacucgacugaagucagccucacugaaccggaucugagaaucuucucucucugggcuugccagggcucuccgaaccuagcuagcauccucuucaauuccaacuagaaagcuuaccauggagcugcccauccucaagaccaacgccaucaccacgauccuggccgcggugacccugugcuucgccagcucccagaacaucaccgaggaguucuaccagagcacgugcuccgccgucagcaagggcuaccucggggcccugcgcaccggcugguacaccuccgugaucaccaucgagcugagcaacaucaaggagaacaagugcaacgggaccgacgccaaggugaagcucaucaagcaggagcuggacaaguacaagaacgcggucacggagcugcagcuccugaugcaguccaccccggccgccggcagcggguccgccaucugcagcggcaucgcggugugcaaggugcugcaccucgagggcgaggucaacaagaucaagaacgcccugcuguccaccaacaaggccguggugagccucuccaacggggucagcgugcugaccuucaaggugcuggaccucaagaacuacaucgacaagcagcugcugcccauccucaacaagcaguccugcagcauccccaacaucgagacggucaucgaguuccagcagaagaacaaccggcugcuggagaucacccgcgaguucuccgugaacgccggcgugaccacccccgucagcacguacaugcucaccaacuccgagcugcugagccucaucaacgacaugccgaucaccaacgaccagaagaagcugaugagcaacaacgugcagaucgugcggcagcaguccuacagcaucaugugcaucaucaaggaggagguccuggccuacguggugcagcucccccuguacggggucaucgacacccccugcuggaagcugcacacgagcccccucugcaccaccaacaccaaggagggcuccaacaucugccugacgcgcaccgaccgggggugguacugcgacaacgcgggcuccgugagcuucuucccgcaggccgagaccugcaaggugcaguccaaccgcgucuucugcgacaccaugaacagccugacgcuccccuccgaggugaaccugugcaacaucgacaucuucaaccccaaguacgacugcaagaucaugaccagcaagaccgacgucuccagcuccgugaucaccagccugggcgccaucguguccugcuacgggaagacgaagugcaccgccagcaacaagaaccggggcaucaucaagaccuucuccaacgggugcgacuacgucagcaacaagggcguggacaccguguccgucggcaacacgcucuacugcgugaacaagcaggaggggcagagccuguacgugaagggcgagcccaucaucaacuucuacgacccgcuggucuuccccagcgacgaguucgacgccuccaucagccaggugaacgagaagaucaaccagucccucgcguucauccgcaagagcgacgagcugcugcacaacgugaacgucgggaaguccaccaccaacaucaugaucaccaccaucaucaucgugaucaucgugauccuccugcugcucaucgccgucggccuguuccuguacugcaaggcccggagcacgcccgugacccuguccaaggaccagcucagcgggaucaacaacaucgccuucuccaacugaggacuaguguccaccugucccuccugggcugcuggauugucucguuuuccugccaaauaaacaggaucagcgcuuuacagaucuaaaaaaaaaaaaaaaaaaaaaaaaaaaaaaaaaaaaaaaaaaaaaaaaaaaaaaaaaaaaaaaaugcaucccccccccccccccccccccccccccccccaaaggcucuuuucagagccaccagaauu

SEQ ID NO: 14279 - RNA, 1994 nt, Artificial Sequence
  mRNA product Design i-1 comprising derived and/or modified sequence from HRSV(Memphis-37)__AIY60640.1__F_DSCav1_mut1 (opt2)
gggagagggcgcuuggcuugcaaggacccugagcugcggcauugaagcacacccaacccaacucgacugaagucagccucacugaaccggaucugagaaucuucucucucugggcuugccagggcucuccgaaccuagcuagcauccucuucaauuccaacuagaaagcuuaccauggagcuccccauccucaagaccaacgccaucaccaccauccucgccgccgucacccucugcuucgccuccucccagaacaucaccgaggaguucuaccaguccaccugcuccgccgucuccaagggcuaccucggcgcccuccgcaccggcugguacaccuccgucaucaccaucgagcucuccaacaucaaggagaacaagugcaacggcaccgacgccaaggucaagcucaucaagcaggagcucgacaaguacaagaacgccgucaccgagcuccagcuccucaugcaguccacccccgccgccggcuccggcuccgccaucugcuccggcaucgccgucugcaagguccuccaccucgagggcgaggucaacaagaucaagaacgcccuccucuccaccaacaaggccgucgucucccucuccaacggcgucuccguccucaccuucaagguccucgaccucaagaacuacaucgacaagcagcuccuccccauccucaacaagcaguccugcuccauccccaacaucgagaccgucaucgaguuccagcagaagaacaaccgccuccucgagaucacccgcgaguucuccgucaacgccggcgucaccacccccgucuccaccuacaugcucaccaacuccgagcuccucucccucaucaacgacaugcccaucaccaacgaccagaagaagcucauguccaacaacguccagaucguccgccagcaguccuacuccaucaugugcaucaucaaggaggagguccucgccuacgucguccagcucccccucuacggcgucaucgacacccccugcuggaagcuccacaccuccccccucugcaccaccaacaccaaggagggcuccaacaucugccucacccgcaccgaccgcggcugguacugcgacaacgccggcuccgucuccuucuucccccaggccgagaccugcaagguccaguccaaccgcgucuucugcgacaccaugaacucccucacccuccccuccgaggucaaccucugcaacaucgacaucuucaaccccaaguacgacugcaagaucaugaccuccaagaccgacgucuccuccuccgucaucaccucccucggcgccaucgucuccugcuacggcaagaccaagugcaccgccuccaacaagaaccgcggcaucaucaagaccuucuccaacggcugcgacuacgucuccaacaagggcgucgacaccgucuccgucggcaacacccucuacugcgucaacaagcaggagggccagucccucuacgucaagggcgagcccaucaucaacuucuacgacccccucgucuuccccuccgacgaguucgacgccuccaucucccaggucaacgagaagaucaaccagucccucgccuucauccgcaaguccgacgagcuccuccacaacgucaacgucggcaaguccaccaccaacaucaugaucaccaccaucaucaucgucaucaucgucauccuccuccuccucaucgccgucggccucuuccucuacugcaaggcccgcuccacccccgucacccucuccaaggaccagcucuccggcaucaacaacaucgccuucuccaacugaggacuaguguccaccugucccuccugggcugcuggauugucucguuuuccugccaaauaaacaggaucagcgcuuuacagaucuaaaaaaaaaaaaaaaaaaaaaaaaaaaaaaaaaaaaaaaaaaaaaaaaaaaaaaaaaaaaaaaaugcaucccccccccccccccccccccccccccccccaaaggcucuuuucagagccaccagaauu

SEQ ID NO: 14280 - RNA, 1994 nt, Artificial Sequence
  mRNA product Design i-1 comprising derived and/or modified sequence from HRSV(Memphis-37)__AIY60640.1__F_DSCav1_mut1 (opt3)
gggagagggcgcuuggcuugcaaggacccugagcugcggcauugaagcacacccaacccaacucgacugaagucagccucacugaaccggaucugagaaucuucucucucugggcuugccagggcucuccgaaccuagcuagcauccucuucaauuccaacuagaaagcuuaccauggagcugcccauccucaagaccaacgccauuacaacuauacuugcugcagugacgcugugcuucgccagcucccagaauaucaccgaagaguuuuaccaaucuacauguucagcggucaguaaaggcuauuugggggcuuuaagaacuggaugguacaccagcguuauuacaaucgaacuguccaacauuaaggagaauaaaugcaacgguaccgacgccaaggugaaacuaaucaagcaggaacucgauaaguauaaaaaugcaguaacugagcugcagcuucugaugcagucuacuccugccgcuggcucggggucagcaauauguagcggaaucgccgugugcaaggucuugcaccucgagggcgaagugaacaaaauuaagaaugcucugcugaguaccaacaaagccguugugucccucucuaauggugucagcguguuaacguucaagguacuggaccuuaagaacuacaucgauaaacaauugcugccaauucuaaauaagcaguccuguucaaucccgaacauagagacuguuauugaauuucagcagaaaaauaacaggcuccuggagaucacccgggaguucagugugaaugcgggggucacaacucccgugagcaccuauaugcuuacaaacucugaacuguugucccucauuaacgacaugccuaucaccaaugaucaaaagaaacugaugucaaacaaugugcagaucguccgccagcagagcuacaguauuaugugcauaaucaaggaggaaguuuuagcauaugugguacaacugccacucuacggagugauugacacgcccuguuggaaacuucauacuucuccucugugcacaaccaacacuaaggagggcuccaauaucuguuugacacgaaccgaucguggcugguacugcgacaacgccgggagcgucucguuuuucccacaggcugaaacguguaaggugcagucuaauagaguguuuugcgauaccaugaacucccuaacacugcccucagagguuaaucucugcaacauagacauuuucaauccuaaauaugauuguaagaucaugacaaguaaaaccgacgucagcuccucugugaucacaagccugggagccauuguaucaugcuacgguaagacuaaauguaccgcaaguaacaagaauaggggcaucauuaagacauuuuccaacgggugcgauuauguuagcaauaaaggaguggacaccgucucugugggcaacacucuuuacugugucaacaagcaagagggucagucacuguaugugaaaggggaaccaauaaucaauuucuacgacccguugguuuuucccagugaugaguucgacgcuagcauuucccaggugaacgaaaagaucaaucagucucucgccuuuauccggaaaucggaugagcuguuacacaacguaaaugucggaaagagcacgacaaacauuaugauaaccacuaucauuaucgugauuaucguuauacugcuacuccugaucgcggugggccuuuucuuguauugcaaggcccgcuccaccccugucacacugucaaaagaccaacucaguggcauuaauaacaucgcauucucuaauugaggacuaguguccaccugucccuccugggcugcuggauugucucguuuuccugccaaauaaacaggaucagcgcuuuacagaucuaaaaaaaaaaaaaaaaaaaaaaaaaaaaaaaaaaaaaaaaaaaaaaaaaaaaaaaaaaaaaaaaugcaucccccccccccccccccccccccccccccccaaaggcucuuuucagagccaccagaauu

SEQ ID NO: 14281 - RNA, 1994 nt, Artificial Sequence
  mRNA product Design i-1 comprising derived and/or modified sequence from HRSV(Memphis-37)__AIY60640.1__F_DSCav1_mut1 (opt4)
gggagagggcgcuuggcuugcaaggacccugagcugcggcauugaagcacacccaacccaacucgacugaagucagccucacugaaccggaucugagaaucuucucucucugggcuugccagggcucuccgaaccuagcuagcauccucuucaauuccaacuagaaagcuuaccauggagcugcccauccugaagaccaacgccaucaccaccauccuggccgccgugacccugugcuucgccagcagccagaacaucaccgaggaguucuaccagagcaccugcagcgccgugagcaagggcuaccugggcgcccugagaaccggcugguacaccagcgugaucaccaucgagcugagcaacaucaaggagaacaagugcaacggcaccgacgccaaggugaagcugaucaagcaggagcuggacaaguacaagaacgccgugaccgagcugcagcugcugaugcagagcacccccgccgccggcagcggcagcgccaucugcagcggcaucgccgugugcaaggugcugcaccuggagggcgaggugaacaagaucaagaacgcccugcugagcaccaacaaggccguggugagccugagcaacggcgugagcgugcugaccuucaaggugcuggaccugaagaacuacaucgacaagcagcugcugcccauccugaacaagcagagcugcagcauccccaacaucgagaccgugaucgaguuccagcagaagaacaacagacugcuggagaucaccagagaguucagcgugaacgccggcgugaccacccccgugagcaccuacaugcugaccaacagcgagcugcugagccugaucaacgacaugcccaucaccaacgaccagaagaagcugaugagcaacaacgugcagaucgugagacagcagagcuacagcaucaugugcaucaucaaggaggaggugcuggccuacguggugcagcugccccuguacggcgugaucgacacccccugcuggaagcugcacaccagcccccugugcaccaccaacaccaaggagggcagcaacaucugccugaccagaaccgacagaggcugguacugcgacaacgccggcagcgugagcuucuucccccaggccgagaccugcaaggugcagagcaacagaguguucugcgacaccaugaacagccugacccugcccagcgaggugaaccugugcaacaucgacaucuucaaccccaaguacgacugcaagaucaugaccagcaagaccgacgugagcagcagcgugaucaccagccugggcgccaucgugagcugcuacggcaagaccaagugcaccgccagcaacaagaacagaggcaucaucaagaccuucagcaacggcugcgacuacgugagcaacaagggcguggacaccgugagcgugggcaacacccuguacugcgugaacaagcaggagggccagagccuguacgugaagggcgagcccaucaucaacuucuacgacccccugguguuccccagcgacgaguucgacgccagcaucagccaggugaacgagaagaucaaccagagccuggccuucaucagaaagagcgacgagcugcugcacaacgugaacgugggcaagagcaccaccaacaucaugaucaccaccaucaucaucgugaucaucgugauccugcugcugcugaucgccgugggccuguuccuguacugcaaggccagaagcacccccgugacccugagcaaggaccagcugagcggcaucaacaacaucgccuucagcaacugaggacuaguguccaccugucccuccugggcugcuggauugucucguuuuccugccaaauaaacaggaucagcgcuuuacagaucuaaaaaaaaaaaaaaaaaaaaaaaaaaaaaaaaaaaaaaaaaaaaaaaaaaaaaaaaaaaaaaaaugcaucccccccccccccccccccccccccccccccaaaggcucuuuucagagccaccagaauu

SEQ ID NO: 14282 - RNA, 1994 nt, Artificial Sequence
  mRNA product Design i-1 comprising derived and/or modified sequence from HRSV(Memphis-37)__AIY60640.1__F_DSCav1_mut1 (opt5)
gggagagggcgcuuggcuugcaaggacccugagcugcggcauugaagcacacccaacccaacucgacugaagucagccucacugaaccggaucugagaaucuucucucucugggcuugccagggcucuccgaaccuagcuagcauccucuucaauuccaacuagaaagcuuaccauggagcugcccauccucaagaccaacgccauuacaacgauccuggcugccgugacccuuugcuucgcgagcucccagaauauuacagaagaguuuuaccaaucuaccuguagcgcugucuccaaaggcuaucugggggcccucagaacaggaugguacaccucuguuaucacaauugaacugagcaacaucaaggagaauaaaugcaacggcaccgacgccaaggugaaacuuaucaagcaggaacuggauaaguauaaaaaugcugugacggagcuccagcugcugaugcaguccaccccugccgcugggucuggaagcgccauuuguuccggcaucgcggucugcaaggugcuccaccuggagggggaaguuaacaaaauuaagaaugcccuucugagcacaaacaaagcuguggucucucucuccaauggagugagcguucugaccuucaaggugcuugaccugaagaacuacaucgauaaacaacuccugccgauucugaauaagcagucuuguuccauccccaacauugagacagucaucgaauuucagcagaaaaauaaccggcuccuggagaucacccgcgaguucagcgugaaugccggcgugacgacaccugucucuaccuauaugcuuacaaacuccgaacugcucagccugauuaacgacaugcccaucaccaaugaucaaaagaaacuuauguccaacaauguucagauugugagacagcagucuuacagcaucaugugcauuaucaaggaggaagugcuggcuuaugucgugcaacucccucuguacggcguuaucgacacccccuguuggaaacugcauacauccccucucugcacgaccaacacaaaggaggggagcaauauuugucugacccggacagaucgcggaugguacugcgacaacgccggcucuguguccuuuuucccgcaggcggaaaccuguaagguccagagcaauagaguguuuugcgauacgaugaacucucuuacacugcccagcgagguuaaucucugcaacaucgacauuuucaauccuaaauaugauuguaagaucaugaccuccaaaaccgacgugucuagcuccgucauuacaagccugggggccaucgugucuugcuacggaaagaccaaauguacagcuuccaacaagaaucggggcaucauuaagacguuuagcaacgggugcgauuaugucucuaauaaaggaguggacaccguuuccgugggcaacacacuuuacugugucaacaagcaagagggccagagccuguaugugaaaggggaacccaucauuaauuucuacgacccucucguuuuucccuccgaugaguucgacgccucuaucagccaggugaacgaaaagauuaaucagucccuggcuuuuauccgcaaaucugaugagcugcuccacaacgucaaugugggaaagagcaccacaaacauuaugaucaccacgaucauuaucgugauuaucguuauucugcuucugcucaucgccgucggccuguuccuguauugcaaggccagauccaccccggugacacuuagcaaagaccaacucucugggaucaauaacauugcuuucuccaauugaggacuaguguccaccugucccuccugggcugcuggauugucucguuuuccugccaaauaaacaggaucagcgcuuuacagaucuaaaaaaaaaaaaaaaaaaaaaaaaaaaaaaaaaaaaaaaaaaaaaaaaaaaaaaaaaaaaaaaaugcaucccccccccccccccccccccccccccccccaaaggcucuuuucagagccaccagaauu

SEQ ID NO: 14283 - RNA, 1994 nt, Artificial Sequence
  mRNA product Design i-1 comprising derived and/or modified sequence from HRSV(Memphis-37)__AIY60640.1__F_DSCav1_mut1 (opt6)
gggagagggcgcuuggcuugcaaggacccugagcugcggcauugaagcacacccaacccaacucgacugaagucagccucacugaaccggaucugagaaucuucucucucugggcuugccagggcucuccgaaccuagcuagcauccucuucaauuccaacuagaaagcuuaccauggaacuuccaauucuaaaaaccaaugcuauaacaacaauauuagcagcaguuacauuaugcuucgccucaucacaaaauaucacagaagaauuuuaccaauccacaugcucagcaguaucuaaaggguaccuaggagcccuacgaacaggaugguacacaucaguaauaacaauagaacucucaaacaucaaagaaaacaaaugcaauggaacagacgcuaaaguaaaauuaauaaaacaagaacuagacaaauacaaaaacgccgucaccgaacuucaguuacucaugcaaagcacaccugcagcaggaucagguucagcaauaugcucaggaauagcaguuugcaaaguauuacaccuagaaggugaagucaacaaaauaaaaaacgcacuucuaaguacuaacaaagcuguaguaucauuaucaaacggaguauccguacuaaccuuuaaaguccuagaccuaaaaaacuacauagacaaacaacuacucccaauacucaauaaacaauccugcucaauucccaacaucgaaacaguaauagaauuucaacaaaaaaacaaucgccuucuagaaauaacaagagaauuuucagucaacgccggaguaacaacaccaguaucaacauauaugcuaacaaacagugaacuauuauccuuaauaaacgacaugccaauaacaaaugaccaaaaaaaacuaauguccaauaauguccaaauaguaagacaacaaagcuauucaauuauguguauaauaaaagaagaaguauuagcauacguaguucaacuaccacuauauggcguuauagacacaccaugcuggaaauuacacacaagcccacuaugcacaacaaauacaaaagaaggauccaacauuugcuuaacuagaacugacagaggaugguacugcgacaacgcuggaucagucucuuucuucccacaagcagaaaccuguaaaguacaaucaaauagagucuucugcgacacaaugaacucacuaacucucccaucugaaguaaacuuaugcaacaucgauauauuuaacccaaaauacgauuguaaaauaaugacauccaaaacagacguuucaucaagcguaaucaccucccucggagcaaucguaagcugcuacgguaaaacaaaaugcacagcauccaacaaaaacagaggcaucauaaaaacauucucaaacggaugugacuauguaucaaacaaaggaguagacacaguuucaguaggcaauaccuuauacugugucaauaaacaagaaggacaaucacuauauguaaaaggagaaccuauaauaaacuucuacgacccccucgucuucccuagcgaugaauuugacgcaucaauaucgcaaguaaacgaaaaaauaaaccaaucauuagccuuuauaagaaaaucagacgaauuauuacacaacguaaacguggggaaaagcacaacuaacaucaugauaacaacuaucauaauuguaaucaucgucauccuauuacuccuaaucgcaguaggacuauuccuauacugcaaagcuagaucaacaccagucacccuaucgaaagaucaauugucaggaauaaacaauauagccuuuucaaauuaaggacuaguguccaccugucccuccugggcugcuggauugucucguuuuccugccaaauaaacaggaucagcgcuuuacagaucuaaaaaaaaaaaaaaaaaaaaaaaaaaaaaaaaaaaaaaaaaaaaaaaaaaaaaaaaaaaaaaaaugcaucccccccccccccccccccccccccccccccaaaggcucuuuucagagccaccagaauu

SEQ ID NO: 14284 - RNA, 1994 nt, Artificial Sequence
  mRNA product Design i-1 comprising derived and/or modified sequence from HRSV(Memphis-37)__AIY60640.1__F_DSCav1_mut1 (opt11)
gggagagggcgcuuggcuugcaaggacccugagcugcggcauugaagcacacccaacccaacucgacugaagucagccucacugaaccggaucugagaaucuucucucucugggcuugccagggcucuccgaaccuagcuagcauccucuucaauuccaacuagaaagcuuaccauggaacuccccauccucaaaacgaacgccaucacaaccauccucgccgccgucacccucugcuucgcgucaucccaaaacauaacugaagaguucuaucaaucaaccugcuccgcagucucaaaaggcuaccucggcgcccuacggaccggcugguacacaagcgucaucacaauagaacuuuccaacaucaaagaaaacaaauguaacggcaccgacgcaaaagucaaacucauaaaacaagaacuagacaaauauaaaaacgccguaacugaacuacaacuccucaugcaaucaacuccugcagccgguagcggcuccgcaaucugcucaggcaucgcagucugcaaagucuuacaccuagaaggcgaagucaacaaaaucaagaacgcccuacuauccacaaacaaagcaguagucucucuauccaacggagucuccguccucacauucaaaguacucgaccuaaagaacuacaucgacaaacaacuacuaccaaucuuaaacaaacaauccugcucaaucccuaacauugaaaccgucauagaguuccaacagaaaaacaaccgccuccucgaaauaaccagagaguucucagucaacgccggcgucaccaccccggucucaaccuacaugcuaaccaacucugaacuucucagccuaaucaacgacaugcccauuaccaacgaccaaaagaaacucauguccaauaacguccaaaucguucgacaacaauccuacucaaucaugugcaucauaaaagaagaaguccuagcauacgucguccaacucccacuauacggcguaaucgacacccccugcuggaaacuccacaccuccccucucuguaccaccaacaccaaagaaggguccaacaucugccucacgcgcaccgaccgaggcugguauugcgacaaugcaggcucugucuccuucuucccccaagccgaaaccugcaaaguccaaucuaaccgcgucuucugcgacaccaugaacagucuuacccucccgucagaagucaaccucugcaacauagauaucuucaacccaaaauacgacugcaaaaucaugaccucaaaaaccgacguuuccucauccguuaucaccucccucggcgcaaucgucagcugcuacggcaagacaaagugcacggcuucaaacaaaaaccgcggaaucaucaagacauucagcaacggcugcgacuacguauccaacaaaggaguggacacagucuccguuggaaacacccucuacugcguaaacaaacaagaaggccaaucacucuacgucaaaggcgaacccaucaucaacuucuacgacccacucgucuuccccuccgacgaguucgacgccucaaucagccaagucaacgagaaaauuaaccagucacucgccuucauacgcaaauccgacgaacuucuacacaacguaaacgucggaaaaucaaccacaaacaucaugauuaccacaauuaucauagucaucauaguaauccuccugcuacucauagcagucggacucuuccuauacugcaaagcccgcuccaccccugucacccuauccaaagaccaacuuuccggcaucaacaacauagccuuuuccaacuaaggacuaguguccaccugucccuccugggcugcuggauugucucguuuuccugccaaauaaacaggaucagcgcuuuacagaucuaaaaaaaaaaaaaaaaaaaaaaaaaaaaaaaaaaaaaaaaaaaaaaaaaaaaaaaaaaaaaaaaugcaucccccccccccccccccccccccccccccccaaaggcucuuuucagagccaccagaauu

SEQ ID NO: 14285 - RNA, 1994 nt, Artificial Sequence
  mRNA product Design i-2 comprising derived and/or modified sequence from HRSV(Memphis-37)__AIY60640.1__F_DSCav1_mut1 (opt1)
gggagaggcgcugccuacggagguggcagccaucuccuucucggcaucaagcuuaccauggagcugcccauccucaagaccaacgccaucaccacgauccuggccgcggugacccugugcuucgccagcucccagaacaucaccgaggaguucuaccagagcacgugcuccgccgucagcaagggcuaccucggcgcccugcgcaccgggugguacaccagcgugaucaccaucgagcuguccaacaucaaggagaacaagugcaacggcaccgacgccaaggugaagcucaucaagcaggagcuggacaaguacaagaacgcggucacggagcugcagcuccugaugcagagcaccccggccgccggcuccgggagcgcgaucugcuccggcaucgccgucugcaaggugcugcaccucgagggcgaggugaacaagaucaagaacgcccugcuguccaccaacaaggccgucgugagccucuccaacggggugagcguccugaccuucaaggugcuggaccucaagaacuacaucgacaagcagcugcugcccauccugaacaagcagagcugcuccauccccaacaucgagaccgucaucgaguuccagcagaagaacaaccgccuccuggagaucacgcgggaguucagcgugaacgcgggcgugaccacccccgucuccaccuacaugcugacgaacagcgagcuccugucccugaucaacgacaugccgaucaccaacgaccagaagaagcucaugagcaacaacgugcagaucgugcgccagcaguccuacagcaucaugugcaucaucaaggaggagguccuggccuacguggugcagcugccccucuacggggucaucgacacccccugcuggaagcugcacaccagcccccugugcacgaccaacaccaaggagggcuccaacaucugccucacccggacggaccgcgggugguacugcgacaacgccggcagcguguccuucuucccgcaggccgagaccugcaagguccagagcaaccggguguucugcgacaccaugaacucccugacccugcccagcgaggugaaccucugcaacaucgacaucuucaaccccaaguacgacugcaagaucaugacguccaagaccgacgucagcuccagcgugaucaccucccugggcgccaucgugagcugcuacgggaagaccaagugcacggcgagcaacaagaaccgcggcaucaucaagaccuucuccaacgggugcgacuacgucagcaacaagggcguggacaccguguccgucggcaacacccuguacugcgugaacaagcaggagggccagagccucuacgugaagggggagcccaucaucaacuucuacgacccgcuggucuuccccuccgacgaguucgacgccagcaucucccaggugaacgagaagaucaaccagagccuggccuucauccggaaguccgacgagcuccugcacaacgugaacgucggcaagagcaccacgaacaucaugaucaccaccaucaucaucgugaucaucgugauccugcugcuccugaucgccgucgggcuguuccucuacugcaaggcccgcuccacccccgugacgcugagcaaggaccagcuguccgggaucaacaacaucgcguucagcaacugaggacuagugcaucacauuuaaaagcaucucagccuaccaugagaauaagagaaagaaaaugaagaucaauagcuuauucaucucuuuuucuuuuucguugguguaaagccaacacccugucuaaaaaacauaaauuucuuuaaucauuuugccucuuuucucugugcuucaauuaauaaaaaauggaaagaaccuagaucuaaaaaaaaaaaaaaaaaaaaaaaaaaaaaaaaaaaaaaaaaaaaaaaaaaaaaaaaaaaaaaaaugcaucccccccccccccccccccccccccccccccaaaggcucuuuucagagccaccagaauu

SEQ ID NO: 14286 - RNA, 1994 nt, Artificial Sequence
  mRNA product Design i-2 comprising derived and/or modified sequence from HRSV(Memphis-37)__AIY60640.1__F_DSCav1_mut1 (opt1)
gggagaggcgcugccuacggagguggcagccaucuccuucucggcaucaagcuuaccauggagcugcccauccucaagaccaacgccaucaccacgauccuggccgcggugacccugugcuucgccagcucccagaacaucaccgaggaguucuaccagagcacgugcuccgccgucagcaagggcuaccucggggcccugcgcaccggcugguacaccuccgugaucaccaucgagcugagcaacaucaaggagaacaagugcaacgggaccgacgccaaggugaagcucaucaagcaggagcuggacaaguacaagaacgcggucacggagcugcagcuccugaugcaguccaccccggccgccggcagcggguccgccaucugcagcggcaucgcggugugcaaggugcugcaccucgagggcgaggucaacaagaucaagaacgcccugcuguccaccaacaaggccguggugagccucuccaacggggucagcgugcugaccuucaaggugcuggaccucaagaacuacaucgacaagcagcugcugcccauccucaacaagcaguccugcagcauccccaacaucgagacggucaucgaguuccagcagaagaacaaccggcugcuggagaucacccgcgaguucuccgugaacgccggcgugaccacccccgucagcacguacaugcucaccaacuccgagcugcugagccucaucaacgacaugccgaucaccaacgaccagaagaagcugaugagcaacaacgugcagaucgugcggcagcaguccuacagcaucaugugcaucaucaaggaggagguccuggccuacguggugcagcucccccuguacggggucaucgacacccccugcuggaagcugcacacgagcccccucugcaccaccaacaccaaggagggcuccaacaucugccugacgcgcaccgaccgggggugguacugcgacaacgcgggcuccgugagcuucuucccgcaggccgagaccugcaaggugcaguccaaccgcgucuucugcgacaccaugaacagccugacgcuccccuccgaggugaaccugugcaacaucgacaucuucaaccccaaguacgacugcaagaucaugaccagcaagaccgacgucuccagcuccgugaucaccagccugggcgccaucguguccugcuacgggaagacgaagugcaccgccagcaacaagaaccggggcaucaucaagaccuucuccaacgggugcgacuacgucagcaacaagggcguggacaccguguccgucggcaacacgcucuacugcgugaacaagcaggaggggcagagccuguacgugaagggcgagcccaucaucaacuucuacgacccgcuggucuuccccagcgacgaguucgacgccuccaucagccaggugaacgagaagaucaaccagucccucgcguucauccgcaagagcgacgagcugcugcacaacgugaacgucgggaaguccaccaccaacaucaugaucaccaccaucaucaucgugaucaucgugauccuccugcugcucaucgccgucggccuguuccuguacugcaaggcccggagcacgcccgugacccuguccaaggaccagcucagcgggaucaacaacaucgccuucuccaacugaggacuagugcaucacauuuaaaagcaucucagccuaccaugagaauaagagaaagaaaaugaagaucaauagcuuauucaucucuuuuucuuuuucguugguguaaagccaacacccugucuaaaaaacauaaauuucuuuaaucauuuugccucuuuucucugugcuucaauuaauaaaaaauggaaagaaccuagaucuaaaaaaaaaaaaaaaaaaaaaaaaaaaaaaaaaaaaaaaaaaaaaaaaaaaaaaaaaaaaaaaaugcaucccccccccccccccccccccccccccccccaaaggcucuuuucagagccaccagaauu

SEQ ID NO: 14287 - RNA, 1994 nt, Artificial Sequence
  mRNA product Design i-2 comprising derived and/or modified sequence from HRSV(Memphis-37)__AIY60640.1__F_DSCav1_mut1 (opt2)
gggagaggcgcugccuacggagguggcagccaucuccuucucggcaucaagcuuaccauggagcuccccauccucaagaccaacgccaucaccaccauccucgccgccgucacccucugcuucgccuccucccagaacaucaccgaggaguucuaccaguccaccugcuccgccgucuccaagggcuaccucggcgcccuccgcaccggcugguacaccuccgucaucaccaucgagcucuccaacaucaaggagaacaagugcaacggcaccgacgccaaggucaagcucaucaagcaggagcucgacaaguacaagaacgccgucaccgagcuccagcuccucaugcaguccacccccgccgccggcuccggcuccgccaucugcuccggcaucgccgucugcaagguccuccaccucgagggcgaggucaacaagaucaagaacgcccuccucuccaccaacaaggccgucgucucccucuccaacggcgucuccguccucaccuucaagguccucgaccucaagaacuacaucgacaagcagcuccuccccauccucaacaagcaguccugcuccauccccaacaucgagaccgucaucgaguuccagcagaagaacaaccgccuccucgagaucacccgcgaguucuccgucaacgccggcgucaccacccccgucuccaccuacaugcucaccaacuccgagcuccucucccucaucaacgacaugcccaucaccaacgaccagaagaagcucauguccaacaacguccagaucguccgccagcaguccuacuccaucaugugcaucaucaaggaggagguccucgccuacgucguccagcucccccucuacggcgucaucgacacccccugcuggaagcuccacaccuccccccucugcaccaccaacaccaaggagggcuccaacaucugccucacccgcaccgaccgcggcugguacugcgacaacgccggcuccgucuccuucuucccccaggccgagaccugcaagguccaguccaaccgcgucuucugcgacaccaugaacucccucacccuccccuccgaggucaaccucugcaacaucgacaucuucaaccccaaguacgacugcaagaucaugaccuccaagaccgacgucuccuccuccgucaucaccucccucggcgccaucgucuccugcuacggcaagaccaagugcaccgccuccaacaagaaccgcggcaucaucaagaccuucuccaacggcugcgacuacgucuccaacaagggcgucgacaccgucuccgucggcaacacccucuacugcgucaacaagcaggagggccagucccucuacgucaagggcgagcccaucaucaacuucuacgacccccucgucuuccccuccgacgaguucgacgccuccaucucccaggucaacgagaagaucaaccagucccucgccuucauccgcaaguccgacgagcuccuccacaacgucaacgucggcaaguccaccaccaacaucaugaucaccaccaucaucaucgucaucaucgucauccuccuccuccucaucgccgucggccucuuccucuacugcaaggcccgcuccacccccgucacccucuccaaggaccagcucuccggcaucaacaacaucgccuucuccaacugaggacuagugcaucacauuuaaaagcaucucagccuaccaugagaauaagagaaagaaaaugaagaucaauagcuuauucaucucuuuuucuuuuucguugguguaaagccaacacccugucuaaaaaacauaaauuucuuuaaucauuuugccucuuuucucugugcuucaauuaauaaaaaauggaaagaaccuagaucuaaaaaaaaaaaaaaaaaaaaaaaaaaaaaaaaaaaaaaaaaaaaaaaaaaaaaaaaaaaaaaaaugcaucccccccccccccccccccccccccccccccaaaggcucuuuucagagccaccagaauu

SEQ ID NO: 14288 - RNA, 1994 nt, Artificial Sequence
  mRNA product Design i-2 comprising derived and/or modified sequence from HRSV(Memphis-37)__AIY60640.1__F_DSCav1_mut1 (opt3)
gggagaggcgcugccuacggagguggcagccaucuccuucucggcaucaagcuuaccauggagcugcccauccucaagaccaacgccauuacaacuauacuugcugcagugacgcugugcuucgccagcucccagaauaucaccgaagaguuuuaccaaucuacauguucagcggucaguaaaggcuauuugggggcuuuaagaacuggaugguacaccagcguuauuacaaucgaacuguccaacauuaaggagaauaaaugcaacgguaccgacgccaaggugaaacuaaucaagcaggaacucgauaaguauaaaaaugcaguaacugagcugcagcuucugaugcagucuacuccugccgcuggcucggggucagcaauauguagcggaaucgccgugugcaaggucuugcaccucgagggcgaagugaacaaaauuaagaaugcucugcugaguaccaacaaagccguugugucccucucuaauggugucagcguguuaacguucaagguacuggaccuuaagaacuacaucgauaaacaauugcugccaauucuaaauaagcaguccuguucaaucccgaacauagagacuguuauugaauuucagcagaaaaauaacaggcuccuggagaucacccgggaguucagugugaaugcgggggucacaacucccgugagcaccuauaugcuuacaaacucugaacuguugucccucauuaacgacaugccuaucaccaaugaucaaaagaaacugaugucaaacaaugugcagaucguccgccagcagagcuacaguauuaugugcauaaucaaggaggaaguuuuagcauaugugguacaacugccacucuacggagugauugacacgcccuguuggaaacuucauacuucuccucugugcacaaccaacacuaaggagggcuccaauaucuguuugacacgaaccgaucguggcugguacugcgacaacgccgggagcgucucguuuuucccacaggcugaaacguguaaggugcagucuaauagaguguuuugcgauaccaugaacucccuaacacugcccucagagguuaaucucugcaacauagacauuuucaauccuaaauaugauuguaagaucaugacaaguaaaaccgacgucagcuccucugugaucacaagccugggagccauuguaucaugcuacgguaagacuaaauguaccgcaaguaacaagaauaggggcaucauuaagacauuuuccaacgggugcgauuauguuagcaauaaaggaguggacaccgucucugugggcaacacucuuuacugugucaacaagcaagagggucagucacuguaugugaaaggggaaccaauaaucaauuucuacgacccguugguuuuucccagugaugaguucgacgcuagcauuucccaggugaacgaaaagaucaaucagucucucgccuuuauccggaaaucggaugagcuguuacacaacguaaaugucggaaagagcacgacaaacauuaugauaaccacuaucauuaucgugauuaucguuauacugcuacuccugaucgcggugggccuuuucuuguauugcaaggcccgcuccaccccugucacacugucaaaagaccaacucaguggcauuaauaacaucgcauucucuaauugaggacuagugcaucacauuuaaaagcaucucagccuaccaugagaauaagagaaagaaaaugaagaucaauagcuuauucaucucuuuuucuuuuucguugguguaaagccaacacccugucuaaaaaacauaaauuucuuuaaucauuuugccucuuuucucugugcuucaauuaauaaaaaauggaaagaaccuagaucuaaaaaaaaaaaaaaaaaaaaaaaaaaaaaaaaaaaaaaaaaaaaaaaaaaaaaaaaaaaaaaaaugcaucccccccccccccccccccccccccccccccaaaggcucuuuucagagccaccagaauu

SEQ ID NO: 14289 - RNA, 1994 nt, Artificial Sequence
  mRNA product Design i-2 comprising derived and/or modified sequence from HRSV(Memphis-37)__AIY60640.1__F_DSCav1_mut1 (opt4)
gggagaggcgcugccuacggagguggcagccaucuccuucucggcaucaagcuuaccauggagcugcccauccugaagaccaacgccaucaccaccauccuggccgccgugacccugugcuucgccagcagccagaacaucaccgaggaguucuaccagagcaccugcagcgccgugagcaagggcuaccugggcgcccugagaaccggcugguacaccagcgugaucaccaucgagcugagcaacaucaaggagaacaagugcaacggcaccgacgccaaggugaagcugaucaagcaggagcuggacaaguacaagaacgccgugaccgagcugcagcugcugaugcagagcacccccgccgccggcagcggcagcgccaucugcagcggcaucgccgugugcaaggugcugcaccuggagggcgaggugaacaagaucaagaacgcccugcugagcaccaacaaggccguggugagccugagcaacggcgugagcgugcugaccuucaaggugcuggaccugaagaacuacaucgacaagcagcugcugcccauccugaacaagcagagcugcagcauccccaacaucgagaccgugaucgaguuccagcagaagaacaacagacugcuggagaucaccagagaguucagcgugaacgccggcgugaccacccccgugagcaccuacaugcugaccaacagcgagcugcugagccugaucaacgacaugcccaucaccaacgaccagaagaagcugaugagcaacaacgugcagaucgugagacagcagagcuacagcaucaugugcaucaucaaggaggaggugcuggccuacguggugcagcugccccuguacggcgugaucgacacccccugcuggaagcugcacaccagcccccugugcaccaccaacaccaaggagggcagcaacaucugccugaccagaaccgacagaggcugguacugcgacaacgccggcagcgugagcuucuucccccaggccgagaccugcaaggugcagagcaacagaguguucugcgacaccaugaacagccugacccugcccagcgaggugaaccugugcaacaucgacaucuucaaccccaaguacgacugcaagaucaugaccagcaagaccgacgugagcagcagcgugaucaccagccugggcgccaucgugagcugcuacggcaagaccaagugcaccgccagcaacaagaacagaggcaucaucaagaccuucagcaacggcugcgacuacgugagcaacaagggcguggacaccgugagcgugggcaacacccuguacugcgugaacaagcaggagggccagagccuguacgugaagggcgagcccaucaucaacuucuacgacccccugguguuccccagcgacgaguucgacgccagcaucagccaggugaacgagaagaucaaccagagccuggccuucaucagaaagagcgacgagcugcugcacaacgugaacgugggcaagagcaccaccaacaucaugaucaccaccaucaucaucgugaucaucgugauccugcugcugcugaucgccgugggccuguuccuguacugcaaggccagaagcacccccgugacccugagcaaggaccagcugagcggcaucaacaacaucgccuucagcaacugaggacuagugcaucacauuuaaaagcaucucagccuaccaugagaauaagagaaagaaaaugaagaucaauagcuuauucaucucuuuuucuuuuucguugguguaaagccaacacccugucuaaaaaacauaaauuucuuuaaucauuuugccucuuuucucugugcuucaauuaauaaaaaauggaaagaaccuagaucuaaaaaaaaaaaaaaaaaaaaaaaaaaaaaaaaaaaaaaaaaaaaaaaaaaaaaaaaaaaaaaaaugcaucccccccccccccccccccccccccccccccaaaggcucuuuucagagccaccagaauu

SEQ ID NO: 14290 - RNA, 1994 nt, Artificial Sequence
  mRNA product Design i-2 comprising derived and/or modified sequence from HRSV(Memphis-37)__AIY60640.1__F_DSCav1_mut1 (opt5)
gggagaggcgcugccuacggagguggcagccaucuccuucucggcaucaagcuuaccauggagcugcccauccucaagaccaacgccauuacaacgauccuggcugccgugacccuuugcuucgcgagcucccagaauauuacagaagaguuuuaccaaucuaccuguagcgcugucuccaaaggcuaucugggggcccucagaacaggaugguacaccucuguuaucacaauugaacugagcaacaucaaggagaauaaaugcaacggcaccgacgccaaggugaaacuuaucaagcaggaacuggauaaguauaaaaaugcugugacggagcuccagcugcugaugcaguccaccccugccgcugggucuggaagcgccauuuguuccggcaucgcggucugcaaggugcuccaccuggagggggaaguuaacaaaauuaagaaugcccuucugagcacaaacaaagcuguggucucucucuccaauggagugagcguucugaccuucaaggugcuugaccugaagaacuacaucgauaaacaacuccugccgauucugaauaagcagucuuguuccauccccaacauugagacagucaucgaauuucagcagaaaaauaaccggcuccuggagaucacccgcgaguucagcgugaaugccggcgugacgacaccugucucuaccuauaugcuuacaaacuccgaacugcucagccugauuaacgacaugcccaucaccaaugaucaaaagaaacuuauguccaacaauguucagauugugagacagcagucuuacagcaucaugugcauuaucaaggaggaagugcuggcuuaugucgugcaacucccucuguacggcguuaucgacacccccuguuggaaacugcauacauccccucucugcacgaccaacacaaaggaggggagcaauauuugucugacccggacagaucgcggaugguacugcgacaacgccggcucuguguccuuuuucccgcaggcggaaaccuguaagguccagagcaauagaguguuuugcgauacgaugaacucucuuacacugcccagcgagguuaaucucugcaacaucgacauuuucaauccuaaauaugauuguaagaucaugaccuccaaaaccgacgugucuagcuccgucauuacaagccugggggccaucgugucuugcuacggaaagaccaaauguacagcuuccaacaagaaucggggcaucauuaagacguuuagcaacgggugcgauuaugucucuaauaaaggaguggacaccguuuccgugggcaacacacuuuacugugucaacaagcaagagggccagagccuguaugugaaaggggaacccaucauuaauuucuacgacccucucguuuuucccuccgaugaguucgacgccucuaucagccaggugaacgaaaagauuaaucagucccuggcuuuuauccgcaaaucugaugagcugcuccacaacgucaaugugggaaagagcaccacaaacauuaugaucaccacgaucauuaucgugauuaucguuauucugcuucugcucaucgccgucggccuguuccuguauugcaaggccagauccaccccggugacacuuagcaaagaccaacucucugggaucaauaacauugcuuucuccaauugaggacuagugcaucacauuuaaaagcaucucagccuaccaugagaauaagagaaagaaaaugaagaucaauagcuuauucaucucuuuuucuuuuucguugguguaaagccaacacccugucuaaaaaacauaaauuucuuuaaucauuuugccucuuuucucugugcuucaauuaauaaaaaauggaaagaaccuagaucuaaaaaaaaaaaaaaaaaaaaaaaaaaaaaaaaaaaaaaaaaaaaaaaaaaaaaaaaaaaaaaaaugcaucccccccccccccccccccccccccccccccaaaggcucuuuucagagccaccagaauu

SEQ ID NO: 14291 - RNA, 1994 nt, Artificial Sequence
  mRNA product Design i-2 comprising derived and/or modified sequence from HRSV(Memphis-37)__AIY60640.1__F_DSCav1_mut1 (opt6)
gggagaggcgcugccuacggagguggcagccaucuccuucucggcaucaagcuuaccauggaacuuccaauucuaaaaaccaaugcuauaacaacaauauuagcagcaguuacauuaugcuucgccucaucacaaaauaucacagaagaauuuuaccaauccacaugcucagcaguaucuaaaggguaccuaggagcccuacgaacaggaugguacacaucaguaauaacaauagaacucucaaacaucaaagaaaacaaaugcaauggaacagacgcuaaaguaaaauuaauaaaacaagaacuagacaaauacaaaaacgccgucaccgaacuucaguuacucaugcaaagcacaccugcagcaggaucagguucagcaauaugcucaggaauagcaguuugcaaaguauuacaccuagaaggugaagucaacaaaauaaaaaacgcacuucuaaguacuaacaaagcuguaguaucauuaucaaacggaguauccguacuaaccuuuaaaguccuagaccuaaaaaacuacauagacaaacaacuacucccaauacucaauaaacaauccugcucaauucccaacaucgaaacaguaauagaauuucaacaaaaaaacaaucgccuucuagaaauaacaagagaauuuucagucaacgccggaguaacaacaccaguaucaacauauaugcuaacaaacagugaacuauuauccuuaauaaacgacaugccaauaacaaaugaccaaaaaaaacuaauguccaauaauguccaaauaguaagacaacaaagcuauucaauuauguguauaauaaaagaagaaguauuagcauacguaguucaacuaccacuauauggcguuauagacacaccaugcuggaaauuacacacaagcccacuaugcacaacaaauacaaaagaaggauccaacauuugcuuaacuagaacugacagaggaugguacugcgacaacgcuggaucagucucuuucuucccacaagcagaaaccuguaaaguacaaucaaauagagucuucugcgacacaaugaacucacuaacucucccaucugaaguaaacuuaugcaacaucgauauauuuaacccaaaauacgauuguaaaauaaugacauccaaaacagacguuucaucaagcguaaucaccucccucggagcaaucguaagcugcuacgguaaaacaaaaugcacagcauccaacaaaaacagaggcaucauaaaaacauucucaaacggaugugacuauguaucaaacaaaggaguagacacaguuucaguaggcaauaccuuauacugugucaauaaacaagaaggacaaucacuauauguaaaaggagaaccuauaauaaacuucuacgacccccucgucuucccuagcgaugaauuugacgcaucaauaucgcaaguaaacgaaaaaauaaaccaaucauuagccuuuauaagaaaaucagacgaauuauuacacaacguaaacguggggaaaagcacaacuaacaucaugauaacaacuaucauaauuguaaucaucgucauccuauuacuccuaaucgcaguaggacuauuccuauacugcaaagcuagaucaacaccagucacccuaucgaaagaucaauugucaggaauaaacaauauagccuuuucaaauuaaggacuagugcaucacauuuaaaagcaucucagccuaccaugagaauaagagaaagaaaaugaagaucaauagcuuauucaucucuuuuucuuuuucguugguguaaagccaacacccugucuaaaaaacauaaauuucuuuaaucauuuugccucuuuucucugugcuucaauuaauaaaaaauggaaagaaccuagaucuaaaaaaaaaaaaaaaaaaaaaaaaaaaaaaaaaaaaaaaaaaaaaaaaaaaaaaaaaaaaaaaaugcaucccccccccccccccccccccccccccccccaaaggcucuuuucagagccaccagaauu

SEQ ID NO: 14292 - RNA, 1994 nt, Artificial Sequence
  mRNA product Design i-2 comprising derived and/or modified sequence from HRSV(Memphis-37)__AIY60640.1__F_DSCav1_mut1 (opt11)
gggagaggcgcugccuacggagguggcagccaucuccuucucggcaucaagcuuaccauggaacuccccauccucaaaacgaacgccaucacaaccauccucgccgccgucacccucugcuucgcgucaucccaaaacauaacugaagaguucuaucaaucaaccugcuccgcagucucaaaaggcuaccucggcgcccuacggaccggcugguacacaagcgucaucacaauagaacuuuccaacaucaaagaaaacaaauguaacggcaccgacgcaaaagucaaacucauaaaacaagaacuagacaaauauaaaaacgccguaacugaacuacaacuccucaugcaaucaacuccugcagccgguagcggcuccgcaaucugcucaggcaucgcagucugcaaagucuuacaccuagaaggcgaagucaacaaaaucaagaacgcccuacuauccacaaacaaagcaguagucucucuauccaacggagucuccguccucacauucaaaguacucgaccuaaagaacuacaucgacaaacaacuacuaccaaucuuaaacaaacaauccugcucaaucccuaacauugaaaccgucauagaguuccaacagaaaaacaaccgccuccucgaaauaaccagagaguucucagucaacgccggcgucaccaccccggucucaaccuacaugcuaaccaacucugaacuucucagccuaaucaacgacaugcccauuaccaacgaccaaaagaaacucauguccaauaacguccaaaucguucgacaacaauccuacucaaucaugugcaucauaaaagaagaaguccuagcauacgucguccaacucccacuauacggcguaaucgacacccccugcuggaaacuccacaccuccccucucuguaccaccaacaccaaagaaggguccaacaucugccucacgcgcaccgaccgaggcugguauugcgacaaugcaggcucugucuccuucuucccccaagccgaaaccugcaaaguccaaucuaaccgcgucuucugcgacaccaugaacagucuuacccucccgucagaagucaaccucugcaacauagauaucuucaacccaaaauacgacugcaaaaucaugaccucaaaaaccgacguuuccucauccguuaucaccucccucggcgcaaucgucagcugcuacggcaagacaaagugcacggcuucaaacaaaaaccgcggaaucaucaagacauucagcaacggcugcgacuacguauccaacaaaggaguggacacagucuccguuggaaacacccucuacugcguaaacaaacaagaaggccaaucacucuacgucaaaggcgaacccaucaucaacuucuacgacccacucgucuuccccuccgacgaguucgacgccucaaucagccaagucaacgagaaaauuaaccagucacucgccuucauacgcaaauccgacgaacuucuacacaacguaaacgucggaaaaucaaccacaaacaucaugauuaccacaauuaucauagucaucauaguaauccuccugcuacucauagcagucggacucuuccuauacugcaaagcccgcuccaccccugucacccuauccaaagaccaacuuuccggcaucaacaacauagccuuuuccaacuaaggacuagugcaucacauuuaaaagcaucucagccuaccaugagaauaagagaaagaaaaugaagaucaauagcuuauucaucucuuuuucuuuuucguugguguaaagccaacacccugucuaaaaaacauaaauuucuuuaaucauuuugccucuuuucucugugcuucaauuaauaaaaaauggaaagaaccuagaucuaaaaaaaaaaaaaaaaaaaaaaaaaaaaaaaaaaaaaaaaaaaaaaaaaaaaaaaaaaaaaaaaugcaucccccccccccccccccccccccccccccccaaaggcucuuuucagagccaccagaauu

SEQ ID NO: 14293 - RNA, 1990 nt, Artificial Sequence
  mRNA product Design i-2 comprising derived and/or modified sequence from HRSV(Memphis-37)__AIY60640.1__F_DSCav1_mut1 (opt1)
ggggcgcugccuacggagguggcagccaucuccuucucggcaucaagcuuaccauggagcugcccauccucaagaccaacgccaucaccacgauccuggccgcggugacccugugcuucgccagcucccagaacaucaccgaggaguucuaccagagcacgugcuccgccgucagcaagggcuaccucggcgcccugcgcaccgggugguacaccagcgugaucaccaucgagcuguccaacaucaaggagaacaagugcaacggcaccgacgccaaggugaagcucaucaagcaggagcuggacaaguacaagaacgcggucacggagcugcagcuccugaugcagagcaccccggccgccggcuccgggagcgcgaucugcuccggcaucgccgucugcaaggugcugcaccucgagggcgaggugaacaagaucaagaacgcccugcuguccaccaacaaggccgucgugagccucuccaacggggugagcguccugaccuucaaggugcuggaccucaagaacuacaucgacaagcagcugcugcccauccugaacaagcagagcugcuccauccccaacaucgagaccgucaucgaguuccagcagaagaacaaccgccuccuggagaucacgcgggaguucagcgugaacgcgggcgugaccacccccgucuccaccuacaugcugacgaacagcgagcuccugucccugaucaacgacaugccgaucaccaacgaccagaagaagcucaugagcaacaacgugcagaucgugcgccagcaguccuacagcaucaugugcaucaucaaggaggagguccuggccuacguggugcagcugccccucuacggggucaucgacacccccugcuggaagcugcacaccagcccccugugcacgaccaacaccaaggagggcuccaacaucugccucacccggacggaccgcgggugguacugcgacaacgccggcagcguguccuucuucccgcaggccgagaccugcaagguccagagcaaccggguguucugcgacaccaugaacucccugacccugcccagcgaggugaaccucugcaacaucgacaucuucaaccccaaguacgacugcaagaucaugacguccaagaccgacgucagcuccagcgugaucaccucccugggcgccaucgugagcugcuacgggaagaccaagugcacggcgagcaacaagaaccgcggcaucaucaagaccuucuccaacgggugcgacuacgucagcaacaagggcguggacaccguguccgucggcaacacccuguacugcgugaacaagcaggagggccagagccucuacgugaagggggagcccaucaucaacuucuacgacccgcuggucuuccccuccgacgaguucgacgccagcaucucccaggugaacgagaagaucaaccagagccuggccuucauccggaaguccgacgagcuccugcacaacgugaacgucggcaagagcaccacgaacaucaugaucaccaccaucaucaucgugaucaucgugauccugcugcuccugaucgccgucgggcuguuccucuacugcaaggcccgcuccacccccgugacgcugagcaaggaccagcuguccgggaucaacaacaucgcguucagcaacugaggacuagugcaucacauuuaaaagcaucucagccuaccaugagaauaagagaaagaaaaugaagaucaauagcuuauucaucucuuuuucuuuuucguugguguaaagccaacacccugucuaaaaaacauaaauuucuuuaaucauuuugccucuuuucucugugcuucaauuaauaaaaaauggaaagaaccuagaucuaaaaaaaaaaaaaaaaaaaaaaaaaaaaaaaaaaaaaaaaaaaaaaaaaaaaaaaaaaaaaaaaugcaucccccccccccccccccccccccccccccccaaaggcucuuuucagagccaccagaauu

SEQ ID NO: 14294 - RNA, 1990 nt, Artificial Sequence
  mRNA product Design i-2 comprising derived and/or modified sequence from HRSV(Memphis-37)__AIY60640.1__F_DSCav1_mut1 (opt1)
ggggcgcugccuacggagguggcagccaucuccuucucggcaucaagcuuaccauggagcugcccauccucaagaccaacgccaucaccacgauccuggccgcggugacccugugcuucgccagcucccagaacaucaccgaggaguucuaccagagcacgugcuccgccgucagcaagggcuaccucggggcccugcgcaccggcugguacaccuccgugaucaccaucgagcugagcaacaucaaggagaacaagugcaacgggaccgacgccaaggugaagcucaucaagcaggagcuggacaaguacaagaacgcggucacggagcugcagcuccugaugcaguccaccccggccgccggcagcggguccgccaucugcagcggcaucgcggugugcaaggugcugcaccucgagggcgaggucaacaagaucaagaacgcccugcuguccaccaacaaggccguggugagccucuccaacggggucagcgugcugaccuucaaggugcuggaccucaagaacuacaucgacaagcagcugcugcccauccucaacaagcaguccugcagcauccccaacaucgagacggucaucgaguuccagcagaagaacaaccggcugcuggagaucacccgcgaguucuccgugaacgccggcgugaccacccccgucagcacguacaugcucaccaacuccgagcugcugagccucaucaacgacaugccgaucaccaacgaccagaagaagcugaugagcaacaacgugcagaucgugcggcagcaguccuacagcaucaugugcaucaucaaggaggagguccuggccuacguggugcagcucccccuguacggggucaucgacacccccugcuggaagcugcacacgagcccccucugcaccaccaacaccaaggagggcuccaacaucugccugacgcgcaccgaccgggggugguacugcgacaacgcgggcuccgugagcuucuucccgcaggccgagaccugcaaggugcaguccaaccgcgucuucugcgacaccaugaacagccugacgcuccccuccgaggugaaccugugcaacaucgacaucuucaaccccaaguacgacugcaagaucaugaccagcaagaccgacgucuccagcuccgugaucaccagccugggcgccaucguguccugcuacgggaagacgaagugcaccgccagcaacaagaaccggggcaucaucaagaccuucuccaacgggugcgacuacgucagcaacaagggcguggacaccguguccgucggcaacacgcucuacugcgugaacaagcaggaggggcagagccuguacgugaagggcgagcccaucaucaacuucuacgacccgcuggucuuccccagcgacgaguucgacgccuccaucagccaggugaacgagaagaucaaccagucccucgcguucauccgcaagagcgacgagcugcugcacaacgugaacgucgggaaguccaccaccaacaucaugaucaccaccaucaucaucgugaucaucgugauccuccugcugcucaucgccgucggccuguuccuguacugcaaggcccggagcacgcccgugacccuguccaaggaccagcucagcgggaucaacaacaucgccuucuccaacugaggacuagugcaucacauuuaaaagcaucucagccuaccaugagaauaagagaaagaaaaugaagaucaauagcuuauucaucucuuuuucuuuuucguugguguaaagccaacacccugucuaaaaaacauaaauuucuuuaaucauuuugccucuuuucucugugcuucaauuaauaaaaaauggaaagaaccuagaucuaaaaaaaaaaaaaaaaaaaaaaaaaaaaaaaaaaaaaaaaaaaaaaaaaaaaaaaaaaaaaaaaugcaucccccccccccccccccccccccccccccccaaaggcucuuuucagagccaccagaauu

SEQ ID NO: 14295 - RNA, 1990 nt, Artificial Sequence
  mRNA product Design i-2 comprising derived and/or modified sequence from HRSV(Memphis-37)__AIY60640.1__F_DSCav1_mut1 (opt2)
ggggcgcugccuacggagguggcagccaucuccuucucggcaucaagcuuaccauggagcuccccauccucaagaccaacgccaucaccaccauccucgccgccgucacccucugcuucgccuccucccagaacaucaccgaggaguucuaccaguccaccugcuccgccgucuccaagggcuaccucggcgcccuccgcaccggcugguacaccuccgucaucaccaucgagcucuccaacaucaaggagaacaagugcaacggcaccgacgccaaggucaagcucaucaagcaggagcucgacaaguacaagaacgccgucaccgagcuccagcuccucaugcaguccacccccgccgccggcuccggcuccgccaucugcuccggcaucgccgucugcaagguccuccaccucgagggcgaggucaacaagaucaagaacgcccuccucuccaccaacaaggccgucgucucccucuccaacggcgucuccguccucaccuucaagguccucgaccucaagaacuacaucgacaagcagcuccuccccauccucaacaagcaguccugcuccauccccaacaucgagaccgucaucgaguuccagcagaagaacaaccgccuccucgagaucacccgcgaguucuccgucaacgccggcgucaccacccccgucuccaccuacaugcucaccaacuccgagcuccucucccucaucaacgacaugcccaucaccaacgaccagaagaagcucauguccaacaacguccagaucguccgccagcaguccuacuccaucaugugcaucaucaaggaggagguccucgccuacgucguccagcucccccucuacggcgucaucgacacccccugcuggaagcuccacaccuccccccucugcaccaccaacaccaaggagggcuccaacaucugccucacccgcaccgaccgcggcugguacugcgacaacgccggcuccgucuccuucuucccccaggccgagaccugcaagguccaguccaaccgcgucuucugcgacaccaugaacucccucacccuccccuccgaggucaaccucugcaacaucgacaucuucaaccccaaguacgacugcaagaucaugaccuccaagaccgacgucuccuccuccgucaucaccucccucggcgccaucgucuccugcuacggcaagaccaagugcaccgccuccaacaagaaccgcggcaucaucaagaccuucuccaacggcugcgacuacgucuccaacaagggcgucgacaccgucuccgucggcaacacccucuacugcgucaacaagcaggagggccagucccucuacgucaagggcgagcccaucaucaacuucuacgacccccucgucuuccccuccgacgaguucgacgccuccaucucccaggucaacgagaagaucaaccagucccucgccuucauccgcaaguccgacgagcuccuccacaacgucaacgucggcaaguccaccaccaacaucaugaucaccaccaucaucaucgucaucaucgucauccuccuccuccucaucgccgucggccucuuccucuacugcaaggcccgcuccacccccgucacccucuccaaggaccagcucuccggcaucaacaacaucgccuucuccaacugaggacuagugcaucacauuuaaaagcaucucagccuaccaugagaauaagagaaagaaaaugaagaucaauagcuuauucaucucuuuuucuuuuucguugguguaaagccaacacccugucuaaaaaacauaaauuucuuuaaucauuuugccucuuuucucugugcuucaauuaauaaaaaauggaaagaaccuagaucuaaaaaaaaaaaaaaaaaaaaaaaaaaaaaaaaaaaaaaaaaaaaaaaaaaaaaaaaaaaaaaaaugcaucccccccccccccccccccccccccccccccaaaggcucuuuucagagccaccagaauu

SEQ ID NO: 14296 - RNA, 1990 nt, Artificial Sequence
  mRNA product Design i-2 comprising derived and/or modified sequence from HRSV(Memphis-37)__AIY60640.1__F_DSCav1_mut1 (opt3)
ggggcgcugccuacggagguggcagccaucuccuucucggcaucaagcuuaccauggagcugcccauccucaagaccaacgccauuacaacuauacuugcugcagugacgcugugcuucgccagcucccagaauaucaccgaagaguuuuaccaaucuacauguucagcggucaguaaaggcuauuugggggcuuuaagaacuggaugguacaccagcguuauuacaaucgaacuguccaacauuaaggagaauaaaugcaacgguaccgacgccaaggugaaacuaaucaagcaggaacucgauaaguauaaaaaugcaguaacugagcugcagcuucugaugcagucuacuccugccgcuggcucggggucagcaauauguagcggaaucgccgugugcaaggucuugcaccucgagggcgaagugaacaaaauuaagaaugcucugcugaguaccaacaaagccguugugucccucucuaauggugucagcguguuaacguucaagguacuggaccuuaagaacuacaucgauaaacaauugcugccaauucuaaauaagcaguccuguucaaucccgaacauagagacuguuauugaauuucagcagaaaaauaacaggcuccuggagaucacccgggaguucagugugaaugcgggggucacaacucccgugagcaccuauaugcuuacaaacucugaacuguugucccucauuaacgacaugccuaucaccaaugaucaaaagaaacugaugucaaacaaugugcagaucguccgccagcagagcuacaguauuaugugcauaaucaaggaggaaguuuuagcauaugugguacaacugccacucuacggagugauugacacgcccuguuggaaacuucauacuucuccucugugcacaaccaacacuaaggagggcuccaauaucuguuugacacgaaccgaucguggcugguacugcgacaacgccgggagcgucucguuuuucccacaggcugaaacguguaaggugcagucuaauagaguguuuugcgauaccaugaacucccuaacacugcccucagagguuaaucucugcaacauagacauuuucaauccuaaauaugauuguaagaucaugacaaguaaaaccgacgucagcuccucugugaucacaagccugggagccauuguaucaugcuacgguaagacuaaauguaccgcaaguaacaagaauaggggcaucauuaagacauuuuccaacgggugcgauuauguuagcaauaaaggaguggacaccgucucugugggcaacacucuuuacugugucaacaagcaagagggucagucacuguaugugaaaggggaaccaauaaucaauuucuacgacccguugguuuuucccagugaugaguucgacgcuagcauuucccaggugaacgaaaagaucaaucagucucucgccuuuauccggaaaucggaugagcuguuacacaacguaaaugucggaaagagcacgacaaacauuaugauaaccacuaucauuaucgugauuaucguuauacugcuacuccugaucgcggugggccuuuucuuguauugcaaggcccgcuccaccccugucacacugucaaaagaccaacucaguggcauuaauaacaucgcauucucuaauugaggacuagugcaucacauuuaaaagcaucucagccuaccaugagaauaagagaaagaaaaugaagaucaauagcuuauucaucucuuuuucuuuuucguugguguaaagccaacacccugucuaaaaaacauaaauuucuuuaaucauuuugccucuuuucucugugcuucaauuaauaaaaaauggaaagaaccuagaucuaaaaaaaaaaaaaaaaaaaaaaaaaaaaaaaaaaaaaaaaaaaaaaaaaaaaaaaaaaaaaaaaugcaucccccccccccccccccccccccccccccccaaaggcucuuuucagagccaccagaauu

SEQ ID NO: 14297 - RNA, 1990 nt, Artificial Sequence
  mRNA product Design i-2 comprising derived and/or modified sequence from HRSV(Memphis-37)__AIY60640.1__F_DSCav1_mut1 (opt4)
ggggcgcugccuacggagguggcagccaucuccuucucggcaucaagcuuaccauggagcugcccauccugaagaccaacgccaucaccaccauccuggccgccgugacccugugcuucgccagcagccagaacaucaccgaggaguucuaccagagcaccugcagcgccgugagcaagggcuaccugggcgcccugagaaccggcugguacaccagcgugaucaccaucgagcugagcaacaucaaggagaacaagugcaacggcaccgacgccaaggugaagcugaucaagcaggagcuggacaaguacaagaacgccgugaccgagcugcagcugcugaugcagagcacccccgccgccggcagcggcagcgccaucugcagcggcaucgccgugugcaaggugcugcaccuggagggcgaggugaacaagaucaagaacgcccugcugagcaccaacaaggccguggugagccugagcaacggcgugagcgugcugaccuucaaggugcuggaccugaagaacuacaucgacaagcagcugcugcccauccugaacaagcagagcugcagcauccccaacaucgagaccgugaucgaguuccagcagaagaacaacagacugcuggagaucaccagagaguucagcgugaacgccggcgugaccacccccgugagcaccuacaugcugaccaacagcgagcugcugagccugaucaacgacaugcccaucaccaacgaccagaagaagcugaugagcaacaacgugcagaucgugagacagcagagcuacagcaucaugugcaucaucaaggaggaggugcuggccuacguggugcagcugccccuguacggcgugaucgacacccccugcuggaagcugcacaccagcccccugugcaccaccaacaccaaggagggcagcaacaucugccugaccagaaccgacagaggcugguacugcgacaacgccggcagcgugagcuucuucccccaggccgagaccugcaaggugcagagcaacagaguguucugcgacaccaugaacagccugacccugcccagcgaggugaaccugugcaacaucgacaucuucaaccccaaguacgacugcaagaucaugaccagcaagaccgacgugagcagcagcgugaucaccagccugggcgccaucgugagcugcuacggcaagaccaagugcaccgccagcaacaagaacagaggcaucaucaagaccuucagcaacggcugcgacuacgugagcaacaagggcguggacaccgugagcgugggcaacacccuguacugcgugaacaagcaggagggccagagccuguacgugaagggcgagcccaucaucaacuucuacgacccccugguguuccccagcgacgaguucgacgccagcaucagccaggugaacgagaagaucaaccagagccuggccuucaucagaaagagcgacgagcugcugcacaacgugaacgugggcaagagcaccaccaacaucaugaucaccaccaucaucaucgugaucaucgugauccugcugcugcugaucgccgugggccuguuccuguacugcaaggccagaagcacccccgugacccugagcaaggaccagcugagcggcaucaacaacaucgccuucagcaacugaggacuagugcaucacauuuaaaagcaucucagccuaccaugagaauaagagaaagaaaaugaagaucaauagcuuauucaucucuuuuucuuuuucguugguguaaagccaacacccugucuaaaaaacauaaauuucuuuaaucauuuugccucuuuucucugugcuucaauuaauaaaaaauggaaagaaccuagaucuaaaaaaaaaaaaaaaaaaaaaaaaaaaaaaaaaaaaaaaaaaaaaaaaaaaaaaaaaaaaaaaaugcaucccccccccccccccccccccccccccccccaaaggcucuuuucagagccaccagaauu

SEQ ID NO: 14298 - RNA, 1990 nt, Artificial Sequence
  mRNA product Design i-2 comprising derived and/or modified sequence from HRSV(Memphis-37)__AIY60640.1__F_DSCav1_mut1 (opt5)
ggggcgcugccuacggagguggcagccaucuccuucucggcaucaagcuuaccauggagcugcccauccucaagaccaacgccauuacaacgauccuggcugccgugacccuuugcuucgcgagcucccagaauauuacagaagaguuuuaccaaucuaccuguagcgcugucuccaaaggcuaucugggggcccucagaacaggaugguacaccucuguuaucacaauugaacugagcaacaucaaggagaauaaaugcaacggcaccgacgccaaggugaaacuuaucaagcaggaacuggauaaguauaaaaaugcugugacggagcuccagcugcugaugcaguccaccccugccgcugggucuggaagcgccauuuguuccggcaucgcggucugcaaggugcuccaccuggagggggaaguuaacaaaauuaagaaugcccuucugagcacaaacaaagcuguggucucucucuccaauggagugagcguucugaccuucaaggugcuugaccugaagaacuacaucgauaaacaacuccugccgauucugaauaagcagucuuguuccauccccaacauugagacagucaucgaauuucagcagaaaaauaaccggcuccuggagaucacccgcgaguucagcgugaaugccggcgugacgacaccugucucuaccuauaugcuuacaaacuccgaacugcucagccugauuaacgacaugcccaucaccaaugaucaaaagaaacuuauguccaacaauguucagauugugagacagcagucuuacagcaucaugugcauuaucaaggaggaagugcuggcuuaugucgugcaacucccucuguacggcguuaucgacacccccuguuggaaacugcauacauccccucucugcacgaccaacacaaaggaggggagcaauauuugucugacccggacagaucgcggaugguacugcgacaacgccggcucuguguccuuuuucccgcaggcggaaaccuguaagguccagagcaauagaguguuuugcgauacgaugaacucucuuacacugcccagcgagguuaaucucugcaacaucgacauuuucaauccuaaauaugauuguaagaucaugaccuccaaaaccgacgugucuagcuccgucauuacaagccugggggccaucgugucuugcuacggaaagaccaaauguacagcuuccaacaagaaucggggcaucauuaagacguuuagcaacgggugcgauuaugucucuaauaaaggaguggacaccguuuccgugggcaacacacuuuacugugucaacaagcaagagggccagagccuguaugugaaaggggaacccaucauuaauuucuacgacccucucguuuuucccuccgaugaguucgacgccucuaucagccaggugaacgaaaagauuaaucagucccuggcuuuuauccgcaaaucugaugagcugcuccacaacgucaaugugggaaagagcaccacaaacauuaugaucaccacgaucauuaucgugauuaucguuauucugcuucugcucaucgccgucggccuguuccuguauugcaaggccagauccaccccggugacacuuagcaaagaccaacucucugggaucaauaacauugcuuucuccaauugaggacuagugcaucacauuuaaaagcaucucagccuaccaugagaauaagagaaagaaaaugaagaucaauagcuuauucaucucuuuuucuuuuucguugguguaaagccaacacccugucuaaaaaacauaaauuucuuuaaucauuuugccucuuuucucugugcuucaauuaauaaaaaauggaaagaaccuagaucuaaaaaaaaaaaaaaaaaaaaaaaaaaaaaaaaaaaaaaaaaaaaaaaaaaaaaaaaaaaaaaaaugcaucccccccccccccccccccccccccccccccaaaggcucuuuucagagccaccagaauu

SEQ ID NO: 14299 - RNA, 1990 nt, Artificial Sequence
  mRNA product Design i-2 comprising derived and/or modified sequence from HRSV(Memphis-37)__AIY60640.1__F_DSCav1_mut1 (opt6)
ggggcgcugccuacggagguggcagccaucuccuucucggcaucaagcuuaccauggaacuuccaauucuaaaaaccaaugcuauaacaacaauauuagcagcaguuacauuaugcuucgccucaucacaaaauaucacagaagaauuuuaccaauccacaugcucagcaguaucuaaaggguaccuaggagcccuacgaacaggaugguacacaucaguaauaacaauagaacucucaaacaucaaagaaaacaaaugcaauggaacagacgcuaaaguaaaauuaauaaaacaagaacuagacaaauacaaaaacgccgucaccgaacuucaguuacucaugcaaagcacaccugcagcaggaucagguucagcaauaugcucaggaauagcaguuugcaaaguauuacaccuagaaggugaagucaacaaaauaaaaaacgcacuucuaaguacuaacaaagcuguaguaucauuaucaaacggaguauccguacuaaccuuuaaaguccuagaccuaaaaaacuacauagacaaacaacuacucccaauacucaauaaacaauccugcucaauucccaacaucgaaacaguaauagaauuucaacaaaaaaacaaucgccuucuagaaauaacaagagaauuuucagucaacgccggaguaacaacaccaguaucaacauauaugcuaacaaacagugaacuauuauccuuaauaaacgacaugccaauaacaaaugaccaaaaaaaacuaauguccaauaauguccaaauaguaagacaacaaagcuauucaauuauguguauaauaaaagaagaaguauuagcauacguaguucaacuaccacuauauggcguuauagacacaccaugcuggaaauuacacacaagcccacuaugcacaacaaauacaaaagaaggauccaacauuugcuuaacuagaacugacagaggaugguacugcgacaacgcuggaucagucucuuucuucccacaagcagaaaccuguaaaguacaaucaaauagagucuucugcgacacaaugaacucacuaacucucccaucugaaguaaacuuaugcaacaucgauauauuuaacccaaaauacgauuguaaaauaaugacauccaaaacagacguuucaucaagcguaaucaccucccucggagcaaucguaagcugcuacgguaaaacaaaaugcacagcauccaacaaaaacagaggcaucauaaaaacauucucaaacggaugugacuauguaucaaacaaaggaguagacacaguuucaguaggcaauaccuuauacugugucaauaaacaagaaggacaaucacuauauguaaaaggagaaccuauaauaaacuucuacgacccccucgucuucccuagcgaugaauuugacgcaucaauaucgcaaguaaacgaaaaaauaaaccaaucauuagccuuuauaagaaaaucagacgaauuauuacacaacguaaacguggggaaaagcacaacuaacaucaugauaacaacuaucauaauuguaaucaucgucauccuauuacuccuaaucgcaguaggacuauuccuauacugcaaagcuagaucaacaccagucacccuaucgaaagaucaauugucaggaauaaacaauauagccuuuucaaauuaaggacuagugcaucacauuuaaaagcaucucagccuaccaugagaauaagagaaagaaaaugaagaucaauagcuuauucaucucuuuuucuuuuucguugguguaaagccaacacccugucuaaaaaacauaaauuucuuuaaucauuuugccucuuuucucugugcuucaauuaauaaaaaauggaaagaaccuagaucuaaaaaaaaaaaaaaaaaaaaaaaaaaaaaaaaaaaaaaaaaaaaaaaaaaaaaaaaaaaaaaaaugcaucccccccccccccccccccccccccccccccaaaggcucuuuucagagccaccagaauu

SEQ ID NO: 14300 - RNA, 1990 nt, Artificial Sequence
  mRNA product Design i-2 comprising derived and/or modified sequence from HRSV(Memphis-37)__AIY60640.1__F_DSCav1_mut1 (opt11)
ggggcgcugccuacggagguggcagccaucuccuucucggcaucaagcuuaccauggaacuccccauccucaaaacgaacgccaucacaaccauccucgccgccgucacccucugcuucgcgucaucccaaaacauaacugaagaguucuaucaaucaaccugcuccgcagucucaaaaggcuaccucggcgcccuacggaccggcugguacacaagcgucaucacaauagaacuuuccaacaucaaagaaaacaaauguaacggcaccgacgcaaaagucaaacucauaaaacaagaacuagacaaauauaaaaacgccguaacugaacuacaacuccucaugcaaucaacuccugcagccgguagcggcuccgcaaucugcucaggcaucgcagucugcaaagucuuacaccuagaaggcgaagucaacaaaaucaagaacgcccuacuauccacaaacaaagcaguagucucucuauccaacggagucuccguccucacauucaaaguacucgaccuaaagaacuacaucgacaaacaacuacuaccaaucuuaaacaaacaauccugcucaaucccuaacauugaaaccgucauagaguuccaacagaaaaacaaccgccuccucgaaauaaccagagaguucucagucaacgccggcgucaccaccccggucucaaccuacaugcuaaccaacucugaacuucucagccuaaucaacgacaugcccauuaccaacgaccaaaagaaacucauguccaauaacguccaaaucguucgacaacaauccuacucaaucaugugcaucauaaaagaagaaguccuagcauacgucguccaacucccacuauacggcguaaucgacacccccugcuggaaacuccacaccuccccucucuguaccaccaacaccaaagaaggguccaacaucugccucacgcgcaccgaccgaggcugguauugcgacaaugcaggcucugucuccuucuucccccaagccgaaaccugcaaaguccaaucuaaccgcgucuucugcgacaccaugaacagucuuacccucccgucagaagucaaccucugcaacauagauaucuucaacccaaaauacgacugcaaaaucaugaccucaaaaaccgacguuuccucauccguuaucaccucccucggcgcaaucgucagcugcuacggcaagacaaagugcacggcuucaaacaaaaaccgcggaaucaucaagacauucagcaacggcugcgacuacguauccaacaaaggaguggacacagucuccguuggaaacacccucuacugcguaaacaaacaagaaggccaaucacucuacgucaaaggcgaacccaucaucaacuucuacgacccacucgucuuccccuccgacgaguucgacgccucaaucagccaagucaacgagaaaauuaaccagucacucgccuucauacgcaaauccgacgaacuucuacacaacguaaacgucggaaaaucaaccacaaacaucaugauuaccacaauuaucauagucaucauaguaauccuccugcuacucauagcagucggacucuuccuauacugcaaagcccgcuccaccccugucacccuauccaaagaccaacuuuccggcaucaacaacauagccuuuuccaacuaaggacuagugcaucacauuuaaaagcaucucagccuaccaugagaauaagagaaagaaaaugaagaucaauagcuuauucaucucuuuuucuuuuucguugguguaaagccaacacccugucuaaaaaacauaaauuucuuuaaucauuuugccucuuuucucugugcuucaauuaauaaaaaauggaaagaaccuagaucuaaaaaaaaaaaaaaaaaaaaaaaaaaaaaaaaaaaaaaaaaaaaaaaaaaaaaaaaaaaaaaaaugcaucccccccccccccccccccccccccccccccaaaggcucuuuucagagccaccagaauu

SEQ ID NO: 14301 - RNA, 1825 nt, Artificial Sequence
  mRNA product Design i-3 comprising derived and/or modified sequence from HRSV(Memphis-37)__AIY60640.1__F_DSCav1_mut1 (opt1)
gggagaaagcuuaccauggagcugcccauccucaagaccaacgccaucaccacgauccuggccgcggugacccugugcuucgccagcucccagaacaucaccgaggaguucuaccagagcacgugcuccgccgucagcaagggcuaccucggcgcccugcgcaccgggugguacaccagcgugaucaccaucgagcuguccaacaucaaggagaacaagugcaacggcaccgacgccaaggugaagcucaucaagcaggagcuggacaaguacaagaacgcggucacggagcugcagcuccugaugcagagcaccccggccgccggcuccgggagcgcgaucugcuccggcaucgccgucugcaaggugcugcaccucgagggcgaggugaacaagaucaagaacgcccugcuguccaccaacaaggccgucgugagccucuccaacggggugagcguccugaccuucaaggugcuggaccucaagaacuacaucgacaagcagcugcugcccauccugaacaagcagagcugcuccauccccaacaucgagaccgucaucgaguuccagcagaagaacaaccgccuccuggagaucacgcgggaguucagcgugaacgcgggcgugaccacccccgucuccaccuacaugcugacgaacagcgagcuccugucccugaucaacgacaugccgaucaccaacgaccagaagaagcucaugagcaacaacgugcagaucgugcgccagcaguccuacagcaucaugugcaucaucaaggaggagguccuggccuacguggugcagcugccccucuacggggucaucgacacccccugcuggaagcugcacaccagcccccugugcacgaccaacaccaaggagggcuccaacaucugccucacccggacggaccgcgggugguacugcgacaacgccggcagcguguccuucuucccgcaggccgagaccugcaagguccagagcaaccggguguucugcgacaccaugaacucccugacccugcccagcgaggugaaccucugcaacaucgacaucuucaaccccaaguacgacugcaagaucaugacguccaagaccgacgucagcuccagcgugaucaccucccugggcgccaucgugagcugcuacgggaagaccaagugcacggcgagcaacaagaaccgcggcaucaucaagaccuucuccaacgggugcgacuacgucagcaacaagggcguggacaccguguccgucggcaacacccuguacugcgugaacaagcaggagggccagagccucuacgugaagggggagcccaucaucaacuucuacgacccgcuggucuuccccuccgacgaguucgacgccagcaucucccaggugaacgagaagaucaaccagagccuggccuucauccggaaguccgacgagcuccugcacaacgugaacgucggcaagagcaccacgaacaucaugaucaccaccaucaucaucgugaucaucgugauccugcugcuccugaucgccgucgggcuguuccucuacugcaaggcccgcuccacccccgugacgcugagcaaggaccagcuguccgggaucaacaacaucgcguucagcaacugaggacuaguuauaagacugacuagcccgaugggccucccaacgggcccuccuccccuccuugcaccgagauuaauaaaaaaaaaaaaaaaaaaaaaaaaaaaaaaaaaaaaaaaaaaaaaaaaaaaaaaaaaaaaaaaaugcaucccccccccccccccccccccccccccccccaaaggcucuuuucagagccaccagaauu

SEQ ID NO: 14302 - RNA, 1825 nt, Artificial Sequence
  mRNA product Design i-3 comprising derived and/or modified sequence from HRSV(Memphis-37)__AIY60640.1__F_DSCav1_mut1 (opt1)
gggagaaagcuuaccauggagcugcccauccucaagaccaacgccaucaccacgauccuggccgcggugacccugugcuucgccagcucccagaacaucaccgaggaguucuaccagagcacgugcuccgccgucagcaagggcuaccucggggcccugcgcaccggcugguacaccuccgugaucaccaucgagcugagcaacaucaaggagaacaagugcaacgggaccgacgccaaggugaagcucaucaagcaggagcuggacaaguacaagaacgcggucacggagcugcagcuccugaugcaguccaccccggccgccggcagcggguccgccaucugcagcggcaucgcggugugcaaggugcugcaccucgagggcgaggucaacaagaucaagaacgcccugcuguccaccaacaaggccguggugagccucuccaacggggucagcgugcugaccuucaaggugcuggaccucaagaacuacaucgacaagcagcugcugcccauccucaacaagcaguccugcagcauccccaacaucgagacggucaucgaguuccagcagaagaacaaccggcugcuggagaucacccgcgaguucuccgugaacgccggcgugaccacccccgucagcacguacaugcucaccaacuccgagcugcugagccucaucaacgacaugccgaucaccaacgaccagaagaagcugaugagcaacaacgugcagaucgugcggcagcaguccuacagcaucaugugcaucaucaaggaggagguccuggccuacguggugcagcucccccuguacggggucaucgacacccccugcuggaagcugcacacgagcccccucugcaccaccaacaccaaggagggcuccaacaucugccugacgcgcaccgaccgggggugguacugcgacaacgcgggcuccgugagcuucuucccgcaggccgagaccugcaaggugcaguccaaccgcgucuucugcgacaccaugaacagccugacgcuccccuccgaggugaaccugugcaacaucgacaucuucaaccccaaguacgacugcaagaucaugaccagcaagaccgacgucuccagcuccgugaucaccagccugggcgccaucguguccugcuacgggaagacgaagugcaccgccagcaacaagaaccggggcaucaucaagaccuucuccaacgggugcgacuacgucagcaacaagggcguggacaccguguccgucggcaacacgcucuacugcgugaacaagcaggaggggcagagccuguacgugaagggcgagcccaucaucaacuucuacgacccgcuggucuuccccagcgacgaguucgacgccuccaucagccaggugaacgagaagaucaaccagucccucgcguucauccgcaagagcgacgagcugcugcacaacgugaacgucgggaaguccaccaccaacaucaugaucaccaccaucaucaucgugaucaucgugauccuccugcugcucaucgccgucggccuguuccuguacugcaaggcccggagcacgcccgugacccuguccaaggaccagcucagcgggaucaacaacaucgccuucuccaacugaggacuaguuauaagacugacuagcccgaugggccucccaacgggcccuccuccccuccuugcaccgagauuaauaaaaaaaaaaaaaaaaaaaaaaaaaaaaaaaaaaaaaaaaaaaaaaaaaaaaaaaaaaaaaaaaugcaucccccccccccccccccccccccccccccccaaaggcucuuuucagagccaccagaauu

SEQ ID NO: 14303 - RNA, 1825 nt, Artificial Sequence
  mRNA product Design i-3 comprising derived and/or modified sequence from HRSV(Memphis-37)__AIY60640.1__F_DSCav1_mut1 (opt2)
gggagaaagcuuaccauggagcuccccauccucaagaccaacgccaucaccaccauccucgccgccgucacccucugcuucgccuccucccagaacaucaccgaggaguucuaccaguccaccugcuccgccgucuccaagggcuaccucggcgcccuccgcaccggcugguacaccuccgucaucaccaucgagcucuccaacaucaaggagaacaagugcaacggcaccgacgccaaggucaagcucaucaagcaggagcucgacaaguacaagaacgccgucaccgagcuccagcuccucaugcaguccacccccgccgccggcuccggcuccgccaucugcuccggcaucgccgucugcaagguccuccaccucgagggcgaggucaacaagaucaagaacgcccuccucuccaccaacaaggccgucgucucccucuccaacggcgucuccguccucaccuucaagguccucgaccucaagaacuacaucgacaagcagcuccuccccauccucaacaagcaguccugcuccauccccaacaucgagaccgucaucgaguuccagcagaagaacaaccgccuccucgagaucacccgcgaguucuccgucaacgccggcgucaccacccccgucuccaccuacaugcucaccaacuccgagcuccucucccucaucaacgacaugcccaucaccaacgaccagaagaagcucauguccaacaacguccagaucguccgccagcaguccuacuccaucaugugcaucaucaaggaggagguccucgccuacgucguccagcucccccucuacggcgucaucgacacccccugcuggaagcuccacaccuccccccucugcaccaccaacaccaaggagggcuccaacaucugccucacccgcaccgaccgcggcugguacugcgacaacgccggcuccgucuccuucuucccccaggccgagaccugcaagguccaguccaaccgcgucuucugcgacaccaugaacucccucacccuccccuccgaggucaaccucugcaacaucgacaucuucaaccccaaguacgacugcaagaucaugaccuccaagaccgacgucuccuccuccgucaucaccucccucggcgccaucgucuccugcuacggcaagaccaagugcaccgccuccaacaagaaccgcggcaucaucaagaccuucuccaacggcugcgacuacgucuccaacaagggcgucgacaccgucuccgucggcaacacccucuacugcgucaacaagcaggagggccagucccucuacgucaagggcgagcccaucaucaacuucuacgacccccucgucuuccccuccgacgaguucgacgccuccaucucccaggucaacgagaagaucaaccagucccucgccuucauccgcaaguccgacgagcuccuccacaacgucaacgucggcaaguccaccaccaacaucaugaucaccaccaucaucaucgucaucaucgucauccuccuccuccucaucgccgucggccucuuccucuacugcaaggcccgcuccacccccgucacccucuccaaggaccagcucuccggcaucaacaacaucgccuucuccaacugaggacuaguuauaagacugacuagcccgaugggccucccaacgggcccuccuccccuccuugcaccgagauuaauaaaaaaaaaaaaaaaaaaaaaaaaaaaaaaaaaaaaaaaaaaaaaaaaaaaaaaaaaaaaaaaaugcaucccccccccccccccccccccccccccccccaaaggcucuuuucagagccaccagaauu

SEQ ID NO: 14304 - RNA, 1825 nt, Artificial Sequence
  mRNA product Design i-3 comprising derived and/or modified sequence from HRSV(Memphis-37)__AIY60640.1__F_DSCav1_mut1 (opt3)
gggagaaagcuuaccauggagcugcccauccucaagaccaacgccauuacaacuauacuugcugcagugacgcugugcuucgccagcucccagaauaucaccgaagaguuuuaccaaucuacauguucagcggucaguaaaggcuauuugggggcuuuaagaacuggaugguacaccagcguuauuacaaucgaacuguccaacauuaaggagaauaaaugcaacgguaccgacgccaaggugaaacuaaucaagcaggaacucgauaaguauaaaaaugcaguaacugagcugcagcuucugaugcagucuacuccugccgcuggcucggggucagcaauauguagcggaaucgccgugugcaaggucuugcaccucgagggcgaagugaacaaaauuaagaaugcucugcugaguaccaacaaagccguugugucccucucuaauggugucagcguguuaacguucaagguacuggaccuuaagaacuacaucgauaaacaauugcugccaauucuaaauaagcaguccuguucaaucccgaacauagagacuguuauugaauuucagcagaaaaauaacaggcuccuggagaucacccgggaguucagugugaaugcgggggucacaacucccgugagcaccuauaugcuuacaaacucugaacuguugucccucauuaacgacaugccuaucaccaaugaucaaaagaaacugaugucaaacaaugugcagaucguccgccagcagagcuacaguauuaugugcauaaucaaggaggaaguuuuagcauaugugguacaacugccacucuacggagugauugacacgcccuguuggaaacuucauacuucuccucugugcacaaccaacacuaaggagggcuccaauaucuguuugacacgaaccgaucguggcugguacugcgacaacgccgggagcgucucguuuuucccacaggcugaaacguguaaggugcagucuaauagaguguuuugcgauaccaugaacucccuaacacugcccucagagguuaaucucugcaacauagacauuuucaauccuaaauaugauuguaagaucaugacaaguaaaaccgacgucagcuccucugugaucacaagccugggagccauuguaucaugcuacgguaagacuaaauguaccgcaaguaacaagaauaggggcaucauuaagacauuuuccaacgggugcgauuauguuagcaauaaaggaguggacaccgucucugugggcaacacucuuuacugugucaacaagcaagagggucagucacuguaugugaaaggggaaccaauaaucaauuucuacgacccguugguuuuucccagugaugaguucgacgcuagcauuucccaggugaacgaaaagaucaaucagucucucgccuuuauccggaaaucggaugagcuguuacacaacguaaaugucggaaagagcacgacaaacauuaugauaaccacuaucauuaucgugauuaucguuauacugcuacuccugaucgcggugggccuuuucuuguauugcaaggcccgcuccaccccugucacacugucaaaagaccaacucaguggcauuaauaacaucgcauucucuaauugaggacuaguuauaagacugacuagcccgaugggccucccaacgggcccuccuccccuccuugcaccgagauuaauaaaaaaaaaaaaaaaaaaaaaaaaaaaaaaaaaaaaaaaaaaaaaaaaaaaaaaaaaaaaaaaaugcaucccccccccccccccccccccccccccccccaaaggcucuuuucagagccaccagaauu

SEQ ID NO: 14305 - RNA, 1825 nt, Artificial Sequence
  mRNA product Design i-3 comprising derived and/or modified sequence from HRSV(Memphis-37)__AIY60640.1__F_DSCav1_mut1 (opt4)
gggagaaagcuuaccauggagcugcccauccugaagaccaacgccaucaccaccauccuggccgccgugacccugugcuucgccagcagccagaacaucaccgaggaguucuaccagagcaccugcagcgccgugagcaagggcuaccugggcgcccugagaaccggcugguacaccagcgugaucaccaucgagcugagcaacaucaaggagaacaagugcaacggcaccgacgccaaggugaagcugaucaagcaggagcuggacaaguacaagaacgccgugaccgagcugcagcugcugaugcagagcacccccgccgccggcagcggcagcgccaucugcagcggcaucgccgugugcaaggugcugcaccuggagggcgaggugaacaagaucaagaacgcccugcugagcaccaacaaggccguggugagccugagcaacggcgugagcgugcugaccuucaaggugcuggaccugaagaacuacaucgacaagcagcugcugcccauccugaacaagcagagcugcagcauccccaacaucgagaccgugaucgaguuccagcagaagaacaacagacugcuggagaucaccagagaguucagcgugaacgccggcgugaccacccccgugagcaccuacaugcugaccaacagcgagcugcugagccugaucaacgacaugcccaucaccaacgaccagaagaagcugaugagcaacaacgugcagaucgugagacagcagagcuacagcaucaugugcaucaucaaggaggaggugcuggccuacguggugcagcugccccuguacggcgugaucgacacccccugcuggaagcugcacaccagcccccugugcaccaccaacaccaaggagggcagcaacaucugccugaccagaaccgacagaggcugguacugcgacaacgccggcagcgugagcuucuucccccaggccgagaccugcaaggugcagagcaacagaguguucugcgacaccaugaacagccugacccugcccagcgaggugaaccugugcaacaucgacaucuucaaccccaaguacgacugcaagaucaugaccagcaagaccgacgugagcagcagcgugaucaccagccugggcgccaucgugagcugcuacggcaagaccaagugcaccgccagcaacaagaacagaggcaucaucaagaccuucagcaacggcugcgacuacgugagcaacaagggcguggacaccgugagcgugggcaacacccuguacugcgugaacaagcaggagggccagagccuguacgugaagggcgagcccaucaucaacuucuacgacccccugguguuccccagcgacgaguucgacgccagcaucagccaggugaacgagaagaucaaccagagccuggccuucaucagaaagagcgacgagcugcugcacaacgugaacgugggcaagagcaccaccaacaucaugaucaccaccaucaucaucgugaucaucgugauccugcugcugcugaucgccgugggccuguuccuguacugcaaggccagaagcacccccgugacccugagcaaggaccagcugagcggcaucaacaacaucgccuucagcaacugaggacuaguuauaagacugacuagcccgaugggccucccaacgggcccuccuccccuccuugcaccgagauuaauaaaaaaaaaaaaaaaaaaaaaaaaaaaaaaaaaaaaaaaaaaaaaaaaaaaaaaaaaaaaaaaaugcaucccccccccccccccccccccccccccccccaaaggcucuuuucagagccaccagaauu

SEQ ID NO: 14306 - RNA, 1825 nt, Artificial Sequence
  mRNA product Design i-3 comprising derived and/or modified sequence from HRSV(Memphis-37)__AIY60640.1__F_DSCav1_mut1 (opt5)
gggagaaagcuuaccauggagcugcccauccucaagaccaacgccauuacaacgauccuggcugccgugacccuuugcuucgcgagcucccagaauauuacagaagaguuuuaccaaucuaccuguagcgcugucuccaaaggcuaucugggggcccucagaacaggaugguacaccucuguuaucacaauugaacugagcaacaucaaggagaauaaaugcaacggcaccgacgccaaggugaaacuuaucaagcaggaacuggauaaguauaaaaaugcugugacggagcuccagcugcugaugcaguccaccccugccgcugggucuggaagcgccauuuguuccggcaucgcggucugcaaggugcuccaccuggagggggaaguuaacaaaauuaagaaugcccuucugagcacaaacaaagcuguggucucucucuccaauggagugagcguucugaccuucaaggugcuugaccugaagaacuacaucgauaaacaacuccugccgauucugaauaagcagucuuguuccauccccaacauugagacagucaucgaauuucagcagaaaaauaaccggcuccuggagaucacccgcgaguucagcgugaaugccggcgugacgacaccugucucuaccuauaugcuuacaaacuccgaacugcucagccugauuaacgacaugcccaucaccaaugaucaaaagaaacuuauguccaacaauguucagauugugagacagcagucuuacagcaucaugugcauuaucaaggaggaagugcuggcuuaugucgugcaacucccucuguacggcguuaucgacacccccuguuggaaacugcauacauccccucucugcacgaccaacacaaaggaggggagcaauauuugucugacccggacagaucgcggaugguacugcgacaacgccggcucuguguccuuuuucccgcaggcggaaaccuguaagguccagagcaauagaguguuuugcgauacgaugaacucucuuacacugcccagcgagguuaaucucugcaacaucgacauuuucaauccuaaauaugauuguaagaucaugaccuccaaaaccgacgugucuagcuccgucauuacaagccugggggccaucgugucuugcuacggaaagaccaaauguacagcuuccaacaagaaucggggcaucauuaagacguuuagcaacgggugcgauuaugucucuaauaaaggaguggacaccguuuccgugggcaacacacuuuacugugucaacaagcaagagggccagagccuguaugugaaaggggaacccaucauuaauuucuacgacccucucguuuuucccuccgaugaguucgacgccucuaucagccaggugaacgaaaagauuaaucagucccuggcuuuuauccgcaaaucugaugagcugcuccacaacgucaaugugggaaagagcaccacaaacauuaugaucaccacgaucauuaucgugauuaucguuauucugcuucugcucaucgccgucggccuguuccuguauugcaaggccagauccaccccggugacacuuagcaaagaccaacucucugggaucaauaacauugcuuucuccaauugaggacuaguuauaagacugacuagcccgaugggccucccaacgggcccuccuccccuccuugcaccgagauuaauaaaaaaaaaaaaaaaaaaaaaaaaaaaaaaaaaaaaaaaaaaaaaaaaaaaaaaaaaaaaaaaaugcaucccccccccccccccccccccccccccccccaaaggcucuuuucagagccaccagaauu

SEQ ID NO: 14307 - RNA, 1825 nt, Artificial Sequence
  mRNA product Design i-3 comprising derived and/or modified sequence from HRSV(Memphis-37)__AIY60640.1__F_DSCav1_mut1 (opt6)
gggagaaagcuuaccauggaacuuccaauucuaaaaaccaaugcuauaacaacaauauuagcagcaguuacauuaugcuucgccucaucacaaaauaucacagaagaauuuuaccaauccacaugcucagcaguaucuaaaggguaccuaggagcccuacgaacaggaugguacacaucaguaauaacaauagaacucucaaacaucaaagaaaacaaaugcaauggaacagacgcuaaaguaaaauuaauaaaacaagaacuagacaaauacaaaaacgccgucaccgaacuucaguuacucaugcaaagcacaccugcagcaggaucagguucagcaauaugcucaggaauagcaguuugcaaaguauuacaccuagaaggugaagucaacaaaauaaaaaacgcacuucuaaguacuaacaaagcuguaguaucauuaucaaacggaguauccguacuaaccuuuaaaguccuagaccuaaaaaacuacauagacaaacaacuacucccaauacucaauaaacaauccugcucaauucccaacaucgaaacaguaauagaauuucaacaaaaaaacaaucgccuucuagaaauaacaagagaauuuucagucaacgccggaguaacaacaccaguaucaacauauaugcuaacaaacagugaacuauuauccuuaauaaacgacaugccaauaacaaaugaccaaaaaaaacuaauguccaauaauguccaaauaguaagacaacaaagcuauucaauuauguguauaauaaaagaagaaguauuagcauacguaguucaacuaccacuauauggcguuauagacacaccaugcuggaaauuacacacaagcccacuaugcacaacaaauacaaaagaaggauccaacauuugcuuaacuagaacugacagaggaugguacugcgacaacgcuggaucagucucuuucuucccacaagcagaaaccuguaaaguacaaucaaauagagucuucugcgacacaaugaacucacuaacucucccaucugaaguaaacuuaugcaacaucgauauauuuaacccaaaauacgauuguaaaauaaugacauccaaaacagacguuucaucaagcguaaucaccucccucggagcaaucguaagcugcuacgguaaaacaaaaugcacagcauccaacaaaaacagaggcaucauaaaaacauucucaaacggaugugacuauguaucaaacaaaggaguagacacaguuucaguaggcaauaccuuauacugugucaauaaacaagaaggacaaucacuauauguaaaaggagaaccuauaauaaacuucuacgacccccucgucuucccuagcgaugaauuugacgcaucaauaucgcaaguaaacgaaaaaauaaaccaaucauuagccuuuauaagaaaaucagacgaauuauuacacaacguaaacguggggaaaagcacaacuaacaucaugauaacaacuaucauaauuguaaucaucgucauccuauuacuccuaaucgcaguaggacuauuccuauacugcaaagcuagaucaacaccagucacccuaucgaaagaucaauugucaggaauaaacaauauagccuuuucaaauuaaggacuaguuauaagacugacuagcccgaugggccucccaacgggcccuccuccccuccuugcaccgagauuaauaaaaaaaaaaaaaaaaaaaaaaaaaaaaaaaaaaaaaaaaaaaaaaaaaaaaaaaaaaaaaaaaugcaucccccccccccccccccccccccccccccccaaaggcucuuuucagagccaccagaauu

SEQ ID NO: 14308 - RNA, 1825 nt, Artificial Sequence
  mRNA product Design i-3 comprising derived and/or modified sequence from HRSV(Memphis-37)__AIY60640.1__F_DSCav1_mut1 (opt11)
gggagaaagcuuaccauggaacuccccauccucaaaacgaacgccaucacaaccauccucgccgccgucacccucugcuucgcgucaucccaaaacauaacugaagaguucuaucaaucaaccugcuccgcagucucaaaaggcuaccucggcgcccuacggaccggcugguacacaagcgucaucacaauagaacuuuccaacaucaaagaaaacaaauguaacggcaccgacgcaaaagucaaacucauaaaacaagaacuagacaaauauaaaaacgccguaacugaacuacaacuccucaugcaaucaacuccugcagccgguagcggcuccgcaaucugcucaggcaucgcagucugcaaagucuuacaccuagaaggcgaagucaacaaaaucaagaacgcccuacuauccacaaacaaagcaguagucucucuauccaacggagucuccguccucacauucaaaguacucgaccuaaagaacuacaucgacaaacaacuacuaccaaucuuaaacaaacaauccugcucaaucccuaacauugaaaccgucauagaguuccaacagaaaaacaaccgccuccucgaaauaaccagagaguucucagucaacgccggcgucaccaccccggucucaaccuacaugcuaaccaacucugaacuucucagccuaaucaacgacaugcccauuaccaacgaccaaaagaaacucauguccaauaacguccaaaucguucgacaacaauccuacucaaucaugugcaucauaaaagaagaaguccuagcauacgucguccaacucccacuauacggcguaaucgacacccccugcuggaaacuccacaccuccccucucuguaccaccaacaccaaagaaggguccaacaucugccucacgcgcaccgaccgaggcugguauugcgacaaugcaggcucugucuccuucuucccccaagccgaaaccugcaaaguccaaucuaaccgcgucuucugcgacaccaugaacagucuuacccucccgucagaagucaaccucugcaacauagauaucuucaacccaaaauacgacugcaaaaucaugaccucaaaaaccgacguuuccucauccguuaucaccucccucggcgcaaucgucagcugcuacggcaagacaaagugcacggcuucaaacaaaaaccgcggaaucaucaagacauucagcaacggcugcgacuacguauccaacaaaggaguggacacagucuccguuggaaacacccucuacugcguaaacaaacaagaaggccaaucacucuacgucaaaggcgaacccaucaucaacuucuacgacccacucgucuuccccuccgacgaguucgacgccucaaucagccaagucaacgagaaaauuaaccagucacucgccuucauacgcaaauccgacgaacuucuacacaacguaaacgucggaaaaucaaccacaaacaucaugauuaccacaauuaucauagucaucauaguaauccuccugcuacucauagcagucggacucuuccuauacugcaaagcccgcuccaccccugucacccuauccaaagaccaacuuuccggcaucaacaacauagccuuuuccaacuaaggacuaguuauaagacugacuagcccgaugggccucccaacgggcccuccuccccuccuugcaccgagauuaauaaaaaaaaaaaaaaaaaaaaaaaaaaaaaaaaaaaaaaaaaaaaaaaaaaaaaaaaaaaaaaaaugcaucccccccccccccccccccccccccccccccaaaggcucuuuucagagccaccagaauu

SEQ ID NO: 14309 - protein, 514 aa, Artificial Sequence
  derived and/or modified protein sequence (artificial) from HRSV(Memphis-37)__AIY60640.1__F-del_DSCav1_mut1
MELPILKTNAITTILAAVTLCFASSQNITEEFYQSTCSAVSKGYLGALRTGWYTSVITIELSNIKENKCNGTDAKVKLIKQELDKYKNAVTELQLLMQSTPAAGSGSAICSGIAVCKVLHLEGEVNKIKNALLSTNKAVVSLSNGVSVLTFKVLDLKNYIDKQLLPILNKQSCSIPNIETVIEFQQKNNRLLEITREFSVNAGVTTPVSTYMLTNSELLSLINDMPITNDQKKLMSNNVQIVRQQSYSIMCIIKEEVLAYVVQLPLYGVIDTPCWKLHTSPLCTTNTKEGSNICLTRTDRGWYCDNAGSVSFFPQAETCKVQSNRVFCDTMNSLTLPSEVNLCNIDIFNPKYDCKIMTSKTDVSSSVITSLGAIVSCYGKTKCTASNKNRGIIKTFSNGCDYVSNKGVDTVSVGNTLYCVNKQEGQSLYVKGEPIINFYDPLVFPSDEFDASISQVNEKINQSLAFIRKSDELLHNVNVGKSTTNIMITTIIIVIIVILLLLIAVGLFLYCKAR

SEQ ID NO: 14310 - RNA, 1545 nt, Artificial Sequence
  derived and/or modified CDS sequence (opt1) from HRSV(Memphis-37)__AIY60640.1__F-del_DSCav1_mut1
auggagcugcccauccucaagaccaacgccaucaccacgauccuggccgcggugacccugugcuucgccagcucccagaacaucaccgaggaguucuaccagagcacgugcuccgccgucagcaagggcuaccucggcgcccugcgcaccgggugguacaccagcgugaucaccaucgagcuguccaacaucaaggagaacaagugcaacggcaccgacgccaaggugaagcucaucaagcaggagcuggacaaguacaagaacgcggucacggagcugcagcuccugaugcagagcaccccggccgccggcuccgggagcgcgaucugcuccggcaucgccgucugcaaggugcugcaccucgagggcgaggugaacaagaucaagaacgcccugcuguccaccaacaaggccgucgugagccucuccaacggggugagcguccugaccuucaaggugcuggaccucaagaacuacaucgacaagcagcugcugcccauccugaacaagcagagcugcuccauccccaacaucgagaccgucaucgaguuccagcagaagaacaaccgccuccuggagaucacgcgggaguucagcgugaacgcgggcgugaccacccccgucuccaccuacaugcugacgaacagcgagcuccugucccugaucaacgacaugccgaucaccaacgaccagaagaagcucaugagcaacaacgugcagaucgugcgccagcaguccuacagcaucaugugcaucaucaaggaggagguccuggccuacguggugcagcugccccucuacggggucaucgacacccccugcuggaagcugcacaccagcccccugugcacgaccaacaccaaggagggcuccaacaucugccucacccggacggaccgcgggugguacugcgacaacgccggcagcguguccuucuucccgcaggccgagaccugcaagguccagagcaaccggguguucugcgacaccaugaacucccugacccugcccagcgaggugaaccucugcaacaucgacaucuucaaccccaaguacgacugcaagaucaugacguccaagaccgacgucagcuccagcgugaucaccucccugggcgccaucgugagcugcuacgggaagaccaagugcacggcgagcaacaagaaccgcggcaucaucaagaccuucuccaacgggugcgacuacgucagcaacaagggcguggacaccguguccgucggcaacacccuguacugcgugaacaagcaggagggccagagccucuacgugaagggggagcccaucaucaacuucuacgacccgcuggucuuccccuccgacgaguucgacgccagcaucucccaggugaacgagaagaucaaccagagccuggccuucauccggaaguccgacgagcuccugcacaacgugaacgucggcaagagcaccacgaacaucaugaucaccaccaucaucaucgugaucaucgugauccugcugcuccugaucgccgucgggcuguuccucuacugcaaggcccgcuga

SEQ ID NO: 14311 - RNA, 1545 nt, Artificial Sequence
  derived and/or modified CDS sequence (opt1) from HRSV(Memphis-37)__AIY60640.1__F-del_DSCav1_mut1
auggagcugcccauccucaagaccaacgccaucaccacgauccuggccgcggugacccugugcuucgccagcucccagaacaucaccgaggaguucuaccagagcacgugcuccgccgucagcaagggcuaccucggggcccugcgcaccggcugguacaccuccgugaucaccaucgagcugagcaacaucaaggagaacaagugcaacgggaccgacgccaaggugaagcucaucaagcaggagcuggacaaguacaagaacgcggucacggagcugcagcuccugaugcaguccaccccggccgccggcagcggguccgccaucugcagcggcaucgcggugugcaaggugcugcaccucgagggcgaggucaacaagaucaagaacgcccugcuguccaccaacaaggccguggugagccucuccaacggggucagcgugcugaccuucaaggugcuggaccucaagaacuacaucgacaagcagcugcugcccauccucaacaagcaguccugcagcauccccaacaucgagacggucaucgaguuccagcagaagaacaaccggcugcuggagaucacccgcgaguucuccgugaacgccggcgugaccacccccgucagcacguacaugcucaccaacuccgagcugcugagccucaucaacgacaugccgaucaccaacgaccagaagaagcugaugagcaacaacgugcagaucgugcggcagcaguccuacagcaucaugugcaucaucaaggaggagguccuggccuacguggugcagcucccccuguacggggucaucgacacccccugcuggaagcugcacacgagcccccucugcaccaccaacaccaaggagggcuccaacaucugccugacgcgcaccgaccgggggugguacugcgacaacgcgggcuccgugagcuucuucccgcaggccgagaccugcaaggugcaguccaaccgcgucuucugcgacaccaugaacagccugacgcuccccuccgaggugaaccugugcaacaucgacaucuucaaccccaaguacgacugcaagaucaugaccagcaagaccgacgucuccagcuccgugaucaccagccugggcgccaucguguccugcuacgggaagacgaagugcaccgccagcaacaagaaccggggcaucaucaagaccuucuccaacgggugcgacuacgucagcaacaagggcguggacaccguguccgucggcaacacgcucuacugcgugaacaagcaggaggggcagagccuguacgugaagggcgagcccaucaucaacuucuacgacccgcuggucuuccccagcgacgaguucgacgccuccaucagccaggugaacgagaagaucaaccagucccucgcguucauccgcaagagcgacgagcugcugcacaacgugaacgucgggaaguccaccaccaacaucaugaucaccaccaucaucaucgugaucaucgugauccuccugcugcucaucgccgucggccuguuccuguacugcaaggcccgguga

SEQ ID NO: 14312 - RNA, 1545 nt, Artificial Sequence
  derived and/or modified CDS sequence (opt2) from HRSV(Memphis-37)__AIY60640.1__F-del_DSCav1_mut1
auggagcuccccauccucaagaccaacgccaucaccaccauccucgccgccgucacccucugcuucgccuccucccagaacaucaccgaggaguucuaccaguccaccugcuccgccgucuccaagggcuaccucggcgcccuccgcaccggcugguacaccuccgucaucaccaucgagcucuccaacaucaaggagaacaagugcaacggcaccgacgccaaggucaagcucaucaagcaggagcucgacaaguacaagaacgccgucaccgagcuccagcuccucaugcaguccacccccgccgccggcuccggcuccgccaucugcuccggcaucgccgucugcaagguccuccaccucgagggcgaggucaacaagaucaagaacgcccuccucuccaccaacaaggccgucgucucccucuccaacggcgucuccguccucaccuucaagguccucgaccucaagaacuacaucgacaagcagcuccuccccauccucaacaagcaguccugcuccauccccaacaucgagaccgucaucgaguuccagcagaagaacaaccgccuccucgagaucacccgcgaguucuccgucaacgccggcgucaccacccccgucuccaccuacaugcucaccaacuccgagcuccucucccucaucaacgacaugcccaucaccaacgaccagaagaagcucauguccaacaacguccagaucguccgccagcaguccuacuccaucaugugcaucaucaaggaggagguccucgccuacgucguccagcucccccucuacggcgucaucgacacccccugcuggaagcuccacaccuccccccucugcaccaccaacaccaaggagggcuccaacaucugccucacccgcaccgaccgcggcugguacugcgacaacgccggcuccgucuccuucuucccccaggccgagaccugcaagguccaguccaaccgcgucuucugcgacaccaugaacucccucacccuccccuccgaggucaaccucugcaacaucgacaucuucaaccccaaguacgacugcaagaucaugaccuccaagaccgacgucuccuccuccgucaucaccucccucggcgccaucgucuccugcuacggcaagaccaagugcaccgccuccaacaagaaccgcggcaucaucaagaccuucuccaacggcugcgacuacgucuccaacaagggcgucgacaccgucuccgucggcaacacccucuacugcgucaacaagcaggagggccagucccucuacgucaagggcgagcccaucaucaacuucuacgacccccucgucuuccccuccgacgaguucgacgccuccaucucccaggucaacgagaagaucaaccagucccucgccuucauccgcaaguccgacgagcuccuccacaacgucaacgucggcaaguccaccaccaacaucaugaucaccaccaucaucaucgucaucaucgucauccuccuccuccucaucgccgucggccucuuccucuacugcaaggcccgcuga

SEQ ID NO: 14313 - RNA, 1545 nt, Artificial Sequence
  derived and/or modified CDS sequence (opt3) from HRSV(Memphis-37)__AIY60640.1__F-del_DSCav1_mut1
auggagcugcccauccucaagaccaacgccauuacaacuauacuugcugcagugacgcugugcuucgccagcucccagaauaucaccgaagaguuuuaccaaucuacauguucagcggucaguaaaggcuauuugggggcuuuaagaacuggaugguacaccagcguuauuacaaucgaacuguccaacauuaaggagaauaaaugcaacgguaccgacgccaaggugaaacuaaucaagcaggaacucgauaaguauaaaaaugcaguaacugagcugcagcuucugaugcagucuacuccugccgcuggcucggggucagcaauauguagcggaaucgccgugugcaaggucuugcaccucgagggcgaagugaacaaaauuaagaaugcucugcugaguaccaacaaagccguugugucccucucuaauggugucagcguguuaacguucaagguacuggaccuuaagaacuacaucgauaaacaauugcugccaauucuaaauaagcaguccuguucaaucccgaacauagagacuguuauugaauuucagcagaaaaauaacaggcuccuggagaucacccgggaguucagugugaaugcgggggucacaacucccgugagcaccuauaugcuuacaaacucugaacuguugucccucauuaacgacaugccuaucaccaaugaucaaaagaaacugaugucaaacaaugugcagaucguccgccagcagagcuacaguauuaugugcauaaucaaggaggaaguuuuagcauaugugguacaacugccacucuacggagugauugacacgcccuguuggaaacuucauacuucuccucugugcacaaccaacacuaaggagggcuccaauaucuguuugacacgaaccgaucguggcugguacugcgacaacgccgggagcgucucguuuuucccacaggcugaaacguguaaggugcagucuaauagaguguuuugcgauaccaugaacucccuaacacugcccucagagguuaaucucugcaacauagacauuuucaauccuaaauaugauuguaagaucaugacaaguaaaaccgacgucagcuccucugugaucacaagccugggagccauuguaucaugcuacgguaagacuaaauguaccgcaaguaacaagaauaggggcaucauuaagacauuuuccaacgggugcgauuauguuagcaauaaaggaguggacaccgucucugugggcaacacucuuuacugugucaacaagcaagagggucagucacuguaugugaaaggggaaccaauaaucaauuucuacgacccguugguuuuucccagugaugaguucgacgcuagcauuucccaggugaacgaaaagaucaaucagucucucgccuuuauccggaaaucggaugagcuguuacacaacguaaaugucggaaagagcacgacaaacauuaugauaaccacuaucauuaucgugauuaucguuauacugcuacuccugaucgcggugggccuuuucuuguauugcaaggcccgcuga

SEQ ID NO: 14314 - RNA, 1545 nt, Artificial Sequence
  derived and/or modified CDS sequence (opt4) from HRSV(Memphis-37)__AIY60640.1__F-del_DSCav1_mut1
auggagcugcccauccugaagaccaacgccaucaccaccauccuggccgccgugacccugugcuucgccagcagccagaacaucaccgaggaguucuaccagagcaccugcagcgccgugagcaagggcuaccugggcgcccugagaaccggcugguacaccagcgugaucaccaucgagcugagcaacaucaaggagaacaagugcaacggcaccgacgccaaggugaagcugaucaagcaggagcuggacaaguacaagaacgccgugaccgagcugcagcugcugaugcagagcacccccgccgccggcagcggcagcgccaucugcagcggcaucgccgugugcaaggugcugcaccuggagggcgaggugaacaagaucaagaacgcccugcugagcaccaacaaggccguggugagccugagcaacggcgugagcgugcugaccuucaaggugcuggaccugaagaacuacaucgacaagcagcugcugcccauccugaacaagcagagcugcagcauccccaacaucgagaccgugaucgaguuccagcagaagaacaacagacugcuggagaucaccagagaguucagcgugaacgccggcgugaccacccccgugagcaccuacaugcugaccaacagcgagcugcugagccugaucaacgacaugcccaucaccaacgaccagaagaagcugaugagcaacaacgugcagaucgugagacagcagagcuacagcaucaugugcaucaucaaggaggaggugcuggccuacguggugcagcugccccuguacggcgugaucgacacccccugcuggaagcugcacaccagcccccugugcaccaccaacaccaaggagggcagcaacaucugccugaccagaaccgacagaggcugguacugcgacaacgccggcagcgugagcuucuucccccaggccgagaccugcaaggugcagagcaacagaguguucugcgacaccaugaacagccugacccugcccagcgaggugaaccugugcaacaucgacaucuucaaccccaaguacgacugcaagaucaugaccagcaagaccgacgugagcagcagcgugaucaccagccugggcgccaucgugagcugcuacggcaagaccaagugcaccgccagcaacaagaacagaggcaucaucaagaccuucagcaacggcugcgacuacgugagcaacaagggcguggacaccgugagcgugggcaacacccuguacugcgugaacaagcaggagggccagagccuguacgugaagggcgagcccaucaucaacuucuacgacccccugguguuccccagcgacgaguucgacgccagcaucagccaggugaacgagaagaucaaccagagccuggccuucaucagaaagagcgacgagcugcugcacaacgugaacgugggcaagagcaccaccaacaucaugaucaccaccaucaucaucgugaucaucgugauccugcugcugcugaucgccgugggccuguuccuguacugcaaggccagauga

SEQ ID NO: 14315 - RNA, 1545 nt, Artificial Sequence
  derived and/or modified CDS sequence (opt5) from HRSV(Memphis-37)__AIY60640.1__F-del_DSCav1_mut1
auggagcugcccauccucaagaccaacgccauuacaacgauccuggcugccgugacccuuugcuucgcgagcucccagaauauuacagaagaguuuuaccaaucuaccuguagcgcugucuccaaaggcuaucugggggcccucagaacaggaugguacaccucuguuaucacaauugaacugagcaacaucaaggagaauaaaugcaacggcaccgacgccaaggugaaacuuaucaagcaggaacuggauaaguauaaaaaugcugugacggagcuccagcugcugaugcaguccaccccugccgcugggucuggaagcgccauuuguuccggcaucgcggucugcaaggugcuccaccuggagggggaaguuaacaaaauuaagaaugcccuucugagcacaaacaaagcuguggucucucucuccaauggagugagcguucugaccuucaaggugcuugaccugaagaacuacaucgauaaacaacuccugccgauucugaauaagcagucuuguuccauccccaacauugagacagucaucgaauuucagcagaaaaauaaccggcuccuggagaucacccgcgaguucagcgugaaugccggcgugacgacaccugucucuaccuauaugcuuacaaacuccgaacugcucagccugauuaacgacaugcccaucaccaaugaucaaaagaaacuuauguccaacaauguucagauugugagacagcagucuuacagcaucaugugcauuaucaaggaggaagugcuggcuuaugucgugcaacucccucuguacggcguuaucgacacccccuguuggaaacugcauacauccccucucugcacgaccaacacaaaggaggggagcaauauuugucugacccggacagaucgcggaugguacugcgacaacgccggcucuguguccuuuuucccgcaggcggaaaccuguaagguccagagcaauagaguguuuugcgauacgaugaacucucuuacacugcccagcgagguuaaucucugcaacaucgacauuuucaauccuaaauaugauuguaagaucaugaccuccaaaaccgacgugucuagcuccgucauuacaagccugggggccaucgugucuugcuacggaaagaccaaauguacagcuuccaacaagaaucggggcaucauuaagacguuuagcaacgggugcgauuaugucucuaauaaaggaguggacaccguuuccgugggcaacacacuuuacugugucaacaagcaagagggccagagccuguaugugaaaggggaacccaucauuaauuucuacgacccucucguuuuucccuccgaugaguucgacgccucuaucagccaggugaacgaaaagauuaaucagucccuggcuuuuauccgcaaaucugaugagcugcuccacaacgucaaugugggaaagagcaccacaaacauuaugaucaccacgaucauuaucgugauuaucguuauucugcuucugcucaucgccgucggccuguuccuguauugcaaggccagauga

SEQ ID NO: 14316 - RNA, 1545 nt, Artificial Sequence
  derived and/or modified CDS sequence (opt6) from HRSV(Memphis-37)__AIY60640.1__F-del_DSCav1_mut1
auggaauuaccaauacuaaaaacaaacgcaauaacaacaauucuagcagcaguaacauuaugcuuugcaucaucccaaaacaucacagaagaauuuuaucaaucaaccugcucagcaguuuccaaaggauacuuaggagcauuaagaacugguugguacacuucaguaaucaccaucgaacucucaaacaucaaggaaaacaaaugcaacggaacagacgcaaaaguuaaacucauaaaacaagaacuugacaaauacaaaaacgccguaacagaacuacaacuucucaugcaaucaacacccgcagcaggauccggaucagccauaugcucaggcauagcaguauguaaaguauuacaucuugaaggugaaguaaacaaaauaaaaaacgcacuucuaucaaccaacaaagcaguaguaucacuaucaaacggaguauccgucuuaacauuuaaaguucuagaccucaaaaacuauauagacaaacaauuacugccaauccucaauaaacaaucaugcucaauaccaaacaucgaaacaguaauagaauuucaacaaaaaaacaacagacuacuagaaauaacaagagaauuuuccgucaacgccggcguaacuacuccaguaucaacauauaugcuaaccaacucagaacuccuaucccucauaaacgacaugccaauaacuaaugaucaaaaaaaacuaaugucaaacaauguacaaauaguuagacaacaaucauacucaaucaugugcauaauaaaagaagaaguacuagcauacgucguccaacuaccccuauacggaguaauagacacaccuugcuggaaacuacacacaucaccccuaugcacaacaaauacaaaagaagguuccaacaucugccuaacaagaacugauagaggaugguacugcgacaacgccggaucaguaucauucuucccucaagcugaaaccugcaaaguacaaucaaacagaguauuuugcgauacaaugaacucccuaacacuucccucagaaguuaaucuuuguaauauagauauauucaacccaaaauacgacugcaaaauaaugacaaguaaaacagacguauccucaucuguaauuacaucacuaggagccauaguaucuugcuacggcaaaaccaaaugcacagcaucaaacaaaaacagagguauuaucaaaaccuucucaaacggaugugacuacguuucaaacaaaggaguagacacaguaucagucggaaacacccuauacuguguuaacaaacaagaaggacaaucacuguacguaaaaggagaacccauaauaaauuucuacgacccacuuguauuuccaucagacgaauuugaugcaucaaucucacaaguaaaugaaaaaauaaaccaaucauuagcauucauaagaaaaucugacgaguuacuacacaacguaaauguuggcaaaucaacaaccaauauaaugauaacaacaauaauaauaguaauaauagucauauuacuccuccucauagccgucggauuauucuuauacugcaaagcaagauaa

SEQ ID NO: 14317 - RNA, 1545 nt, Artificial Sequence
  derived and/or modified CDS sequence (opt11) from HRSV(Memphis-37)__AIY60640.1__F-del_DSCav1_mut1
auggaacuccccauacuaaaaaccaacgccaucacaacaauccucgccgccgucacacucugcuucgccagcucccaaaacaucaccgaagaguucuaucaaucaaccugcuccgcagucucaaagggauaccucggagcccuccgcaccggaugguacacuuccgucaucacaauagaacucuccaacaucaaagaaaacaaaugcaacggcaccgacgcaaaagucaagcucaucaaacaagaacucgacaaauauaaaaacgccgucaccgaacuccaacuacucaugcaauccacacccgcggccggcucaggcagcgccaucugcucaggcaucgccgucugcaaaguccuccaccucgaaggcgaagucaacaaaaucaaaaacgcccuucuuucaaccaacaaggcaguaguaucccucucaaacggcgucagcguccugaccuucaaaguccuagaccucaaaaacuacauagauaaacaacuccuccccauacugaacaaacaaucgugcuccauccccaauaucgaaaccgucauagaguuccagcagaaaaacaacagacuucucgaaauaacccgagaguucucaguaaacgccggagucaccacacccguaagcaccuacaugcucacaaacucagaacuccuaucccucaucaacgacaugcccaucaccaacgaccagaaaaagcuaauguccaacaacguccaaauaguacgccaacaaagcuacucgauaaugugcaucaucaaggaagaaguacucgccuacgucguccaacucccccucuacggcguaaucgacacacccugcuggaaacuccacacguccccacucugcacaacaaacacaaaagaaggauccaacauaugccuaacccgcaccgacaggggcugguacugcgacaacgcaggcucagucagcuucuuuccccaagccgaaacaugcaaaguccaauccaaccgugucuucugcgacaccaugaacucgcucacccuacccucggaagucaaucucugcaacaucgacaucuucaacccaaaauacgacuguaaaaucaugaccagcaaaacagacguuucuuccagcgucaucacaucacucggcgcgaucguaucaugcuauggcaaaacaaagugcaccgcuagcaauaaaaaccgaggaaucauaaaaaccuucagcaacggcugcgacuacguauccaacaaaggcgucgacaccguauccgucggaaacacccucuacugcgucaacaagcaagaaggacaaucacucuacgucaaaggcgaaccaaucauaaacuucuacgacccacucguauuccccucagacgaguucgacgcauccaucucccaagucaacgaaaagaucaaccaaucucucgccuuuauacgcaaaagcgacgaacuccuucacaacguaaacgucggcaaaagcaccacuaacauaaugaucaccacaaucauaauaguaaucaucguaauacuccuccuacucaucgccgugggccuauuccucuauugcaaagcccgauaa

SEQ ID NO: 14318 - RNA, 1821 nt, Artificial Sequence
  mRNA product Design a-1 comprising derived and/or modified sequence from HRSV(Memphis-37)__AIY60640.1__F-del_DSCav1_mut1 (opt1)
gggagagucccgcagucggcguccagcggcucugcuuguucgugugugugucguugcaggccuuauucaagcuuaccauggagcugcccauccucaagaccaacgccaucaccacgauccuggccgcggugacccugugcuucgccagcucccagaacaucaccgaggaguucuaccagagcacgugcuccgccgucagcaagggcuaccucggcgcccugcgcaccgggugguacaccagcgugaucaccaucgagcuguccaacaucaaggagaacaagugcaacggcaccgacgccaaggugaagcucaucaagcaggagcuggacaaguacaagaacgcggucacggagcugcagcuccugaugcagagcaccccggccgccggcuccgggagcgcgaucugcuccggcaucgccgucugcaaggugcugcaccucgagggcgaggugaacaagaucaagaacgcccugcuguccaccaacaaggccgucgugagccucuccaacggggugagcguccugaccuucaaggugcuggaccucaagaacuacaucgacaagcagcugcugcccauccugaacaagcagagcugcuccauccccaacaucgagaccgucaucgaguuccagcagaagaacaaccgccuccuggagaucacgcgggaguucagcgugaacgcgggcgugaccacccccgucuccaccuacaugcugacgaacagcgagcuccugucccugaucaacgacaugccgaucaccaacgaccagaagaagcucaugagcaacaacgugcagaucgugcgccagcaguccuacagcaucaugugcaucaucaaggaggagguccuggccuacguggugcagcugccccucuacggggucaucgacacccccugcuggaagcugcacaccagcccccugugcacgaccaacaccaaggagggcuccaacaucugccucacccggacggaccgcgggugguacugcgacaacgccggcagcguguccuucuucccgcaggccgagaccugcaagguccagagcaaccggguguucugcgacaccaugaacucccugacccugcccagcgaggugaaccucugcaacaucgacaucuucaaccccaaguacgacugcaagaucaugacguccaagaccgacgucagcuccagcgugaucaccucccugggcgccaucgugagcugcuacgggaagaccaagugcacggcgagcaacaagaaccgcggcaucaucaagaccuucuccaacgggugcgacuacgucagcaacaagggcguggacaccguguccgucggcaacacccuguacugcgugaacaagcaggagggccagagccucuacgugaagggggagcccaucaucaacuucuacgacccgcuggucuuccccuccgacgaguucgacgccagcaucucccaggugaacgagaagaucaaccagagccuggccuucauccggaaguccgacgagcuccugcacaacgugaacgucggcaagagcaccacgaacaucaugaucaccaccaucaucaucgugaucaucgugauccugcugcuccugaucgccgucgggcuguuccucuacugcaaggcccgcugaggacuagucccuguucccagagcccacuuuuuuuucuuuuuuugaaauaaaauagccugucuuucagaucuaaaaaaaaaaaaaaaaaaaaaaaaaaaaaaaaaaaaaaaaaaaaaaaaaaaaaaaaaaaaaaaaugcaucccccccccccccccccccccccccccccccaaaggcucuuuucagagccaccagaauu

SEQ ID NO: 14319 - RNA, 1821 nt, Artificial Sequence
  mRNA product Design a-1 comprising derived and/or modified sequence from HRSV(Memphis-37)__AIY60640.1__F-del_DSCav1_mut1 (opt1)
gggagagucccgcagucggcguccagcggcucugcuuguucgugugugugucguugcaggccuuauucaagcuuaccauggagcugcccauccucaagaccaacgccaucaccacgauccuggccgcggugacccugugcuucgccagcucccagaacaucaccgaggaguucuaccagagcacgugcuccgccgucagcaagggcuaccucggggcccugcgcaccggcugguacaccuccgugaucaccaucgagcugagcaacaucaaggagaacaagugcaacgggaccgacgccaaggugaagcucaucaagcaggagcuggacaaguacaagaacgcggucacggagcugcagcuccugaugcaguccaccccggccgccggcagcggguccgccaucugcagcggcaucgcggugugcaaggugcugcaccucgagggcgaggucaacaagaucaagaacgcccugcuguccaccaacaaggccguggugagccucuccaacggggucagcgugcugaccuucaaggugcuggaccucaagaacuacaucgacaagcagcugcugcccauccucaacaagcaguccugcagcauccccaacaucgagacggucaucgaguuccagcagaagaacaaccggcugcuggagaucacccgcgaguucuccgugaacgccggcgugaccacccccgucagcacguacaugcucaccaacuccgagcugcugagccucaucaacgacaugccgaucaccaacgaccagaagaagcugaugagcaacaacgugcagaucgugcggcagcaguccuacagcaucaugugcaucaucaaggaggagguccuggccuacguggugcagcucccccuguacggggucaucgacacccccugcuggaagcugcacacgagcccccucugcaccaccaacaccaaggagggcuccaacaucugccugacgcgcaccgaccgggggugguacugcgacaacgcgggcuccgugagcuucuucccgcaggccgagaccugcaaggugcaguccaaccgcgucuucugcgacaccaugaacagccugacgcuccccuccgaggugaaccugugcaacaucgacaucuucaaccccaaguacgacugcaagaucaugaccagcaagaccgacgucuccagcuccgugaucaccagccugggcgccaucguguccugcuacgggaagacgaagugcaccgccagcaacaagaaccggggcaucaucaagaccuucuccaacgggugcgacuacgucagcaacaagggcguggacaccguguccgucggcaacacgcucuacugcgugaacaagcaggaggggcagagccuguacgugaagggcgagcccaucaucaacuucuacgacccgcuggucuuccccagcgacgaguucgacgccuccaucagccaggugaacgagaagaucaaccagucccucgcguucauccgcaagagcgacgagcugcugcacaacgugaacgucgggaaguccaccaccaacaucaugaucaccaccaucaucaucgugaucaucgugauccuccugcugcucaucgccgucggccuguuccuguacugcaaggcccggugaggacuagucccuguucccagagcccacuuuuuuuucuuuuuuugaaauaaaauagccugucuuucagaucuaaaaaaaaaaaaaaaaaaaaaaaaaaaaaaaaaaaaaaaaaaaaaaaaaaaaaaaaaaaaaaaaugcaucccccccccccccccccccccccccccccccaaaggcucuuuucagagccaccagaauu

SEQ ID NO: 14320 - RNA, 1821 nt, Artificial Sequence
  mRNA product Design a-1 comprising derived and/or modified sequence from HRSV(Memphis-37)__AIY60640.1__F-del_DSCav1_mut1 (opt2)
gggagagucccgcagucggcguccagcggcucugcuuguucgugugugugucguugcaggccuuauucaagcuuaccauggagcuccccauccucaagaccaacgccaucaccaccauccucgccgccgucacccucugcuucgccuccucccagaacaucaccgaggaguucuaccaguccaccugcuccgccgucuccaagggcuaccucggcgcccuccgcaccggcugguacaccuccgucaucaccaucgagcucuccaacaucaaggagaacaagugcaacggcaccgacgccaaggucaagcucaucaagcaggagcucgacaaguacaagaacgccgucaccgagcuccagcuccucaugcaguccacccccgccgccggcuccggcuccgccaucugcuccggcaucgccgucugcaagguccuccaccucgagggcgaggucaacaagaucaagaacgcccuccucuccaccaacaaggccgucgucucccucuccaacggcgucuccguccucaccuucaagguccucgaccucaagaacuacaucgacaagcagcuccuccccauccucaacaagcaguccugcuccauccccaacaucgagaccgucaucgaguuccagcagaagaacaaccgccuccucgagaucacccgcgaguucuccgucaacgccggcgucaccacccccgucuccaccuacaugcucaccaacuccgagcuccucucccucaucaacgacaugcccaucaccaacgaccagaagaagcucauguccaacaacguccagaucguccgccagcaguccuacuccaucaugugcaucaucaaggaggagguccucgccuacgucguccagcucccccucuacggcgucaucgacacccccugcuggaagcuccacaccuccccccucugcaccaccaacaccaaggagggcuccaacaucugccucacccgcaccgaccgcggcugguacugcgacaacgccggcuccgucuccuucuucccccaggccgagaccugcaagguccaguccaaccgcgucuucugcgacaccaugaacucccucacccuccccuccgaggucaaccucugcaacaucgacaucuucaaccccaaguacgacugcaagaucaugaccuccaagaccgacgucuccuccuccgucaucaccucccucggcgccaucgucuccugcuacggcaagaccaagugcaccgccuccaacaagaaccgcggcaucaucaagaccuucuccaacggcugcgacuacgucuccaacaagggcgucgacaccgucuccgucggcaacacccucuacugcgucaacaagcaggagggccagucccucuacgucaagggcgagcccaucaucaacuucuacgacccccucgucuuccccuccgacgaguucgacgccuccaucucccaggucaacgagaagaucaaccagucccucgccuucauccgcaaguccgacgagcuccuccacaacgucaacgucggcaaguccaccaccaacaucaugaucaccaccaucaucaucgucaucaucgucauccuccuccuccucaucgccgucggccucuuccucuacugcaaggcccgcugaggacuagucccuguucccagagcccacuuuuuuuucuuuuuuugaaauaaaauagccugucuuucagaucuaaaaaaaaaaaaaaaaaaaaaaaaaaaaaaaaaaaaaaaaaaaaaaaaaaaaaaaaaaaaaaaaugcaucccccccccccccccccccccccccccccccaaaggcucuuuucagagccaccagaauu

SEQ ID NO: 14321 - RNA, 1821 nt, Artificial Sequence
  mRNA product Design a-1 comprising derived and/or modified sequence from HRSV(Memphis-37)__AIY60640.1__F-del_DSCav1_mut1 (opt3)
gggagagucccgcagucggcguccagcggcucugcuuguucgugugugugucguugcaggccuuauucaagcuuaccauggagcugcccauccucaagaccaacgccauuacaacuauacuugcugcagugacgcugugcuucgccagcucccagaauaucaccgaagaguuuuaccaaucuacauguucagcggucaguaaaggcuauuugggggcuuuaagaacuggaugguacaccagcguuauuacaaucgaacuguccaacauuaaggagaauaaaugcaacgguaccgacgccaaggugaaacuaaucaagcaggaacucgauaaguauaaaaaugcaguaacugagcugcagcuucugaugcagucuacuccugccgcuggcucggggucagcaauauguagcggaaucgccgugugcaaggucuugcaccucgagggcgaagugaacaaaauuaagaaugcucugcugaguaccaacaaagccguugugucccucucuaauggugucagcguguuaacguucaagguacuggaccuuaagaacuacaucgauaaacaauugcugccaauucuaaauaagcaguccuguucaaucccgaacauagagacuguuauugaauuucagcagaaaaauaacaggcuccuggagaucacccgggaguucagugugaaugcgggggucacaacucccgugagcaccuauaugcuuacaaacucugaacuguugucccucauuaacgacaugccuaucaccaaugaucaaaagaaacugaugucaaacaaugugcagaucguccgccagcagagcuacaguauuaugugcauaaucaaggaggaaguuuuagcauaugugguacaacugccacucuacggagugauugacacgcccuguuggaaacuucauacuucuccucugugcacaaccaacacuaaggagggcuccaauaucuguuugacacgaaccgaucguggcugguacugcgacaacgccgggagcgucucguuuuucccacaggcugaaacguguaaggugcagucuaauagaguguuuugcgauaccaugaacucccuaacacugcccucagagguuaaucucugcaacauagacauuuucaauccuaaauaugauuguaagaucaugacaaguaaaaccgacgucagcuccucugugaucacaagccugggagccauuguaucaugcuacgguaagacuaaauguaccgcaaguaacaagaauaggggcaucauuaagacauuuuccaacgggugcgauuauguuagcaauaaaggaguggacaccgucucugugggcaacacucuuuacugugucaacaagcaagagggucagucacuguaugugaaaggggaaccaauaaucaauuucuacgacccguugguuuuucccagugaugaguucgacgcuagcauuucccaggugaacgaaaagaucaaucagucucucgccuuuauccggaaaucggaugagcuguuacacaacguaaaugucggaaagagcacgacaaacauuaugauaaccacuaucauuaucgugauuaucguuauacugcuacuccugaucgcggugggccuuuucuuguauugcaaggcccgcugaggacuagucccuguucccagagcccacuuuuuuuucuuuuuuugaaauaaaauagccugucuuucagaucuaaaaaaaaaaaaaaaaaaaaaaaaaaaaaaaaaaaaaaaaaaaaaaaaaaaaaaaaaaaaaaaaugcaucccccccccccccccccccccccccccccccaaaggcucuuuucagagccaccagaauu

SEQ ID NO: 14322 - RNA, 1821 nt, Artificial Sequence
  mRNA product Design a-1 comprising derived and/or modified sequence from HRSV(Memphis-37)__AIY60640.1__F-del_DSCav1_mut1 (opt4)
gggagagucccgcagucggcguccagcggcucugcuuguucgugugugugucguugcaggccuuauucaagcuuaccauggagcugcccauccugaagaccaacgccaucaccaccauccuggccgccgugacccugugcuucgccagcagccagaacaucaccgaggaguucuaccagagcaccugcagcgccgugagcaagggcuaccugggcgcccugagaaccggcugguacaccagcgugaucaccaucgagcugagcaacaucaaggagaacaagugcaacggcaccgacgccaaggugaagcugaucaagcaggagcuggacaaguacaagaacgccgugaccgagcugcagcugcugaugcagagcacccccgccgccggcagcggcagcgccaucugcagcggcaucgccgugugcaaggugcugcaccuggagggcgaggugaacaagaucaagaacgcccugcugagcaccaacaaggccguggugagccugagcaacggcgugagcgugcugaccuucaaggugcuggaccugaagaacuacaucgacaagcagcugcugcccauccugaacaagcagagcugcagcauccccaacaucgagaccgugaucgaguuccagcagaagaacaacagacugcuggagaucaccagagaguucagcgugaacgccggcgugaccacccccgugagcaccuacaugcugaccaacagcgagcugcugagccugaucaacgacaugcccaucaccaacgaccagaagaagcugaugagcaacaacgugcagaucgugagacagcagagcuacagcaucaugugcaucaucaaggaggaggugcuggccuacguggugcagcugccccuguacggcgugaucgacacccccugcuggaagcugcacaccagcccccugugcaccaccaacaccaaggagggcagcaacaucugccugaccagaaccgacagaggcugguacugcgacaacgccggcagcgugagcuucuucccccaggccgagaccugcaaggugcagagcaacagaguguucugcgacaccaugaacagccugacccugcccagcgaggugaaccugugcaacaucgacaucuucaaccccaaguacgacugcaagaucaugaccagcaagaccgacgugagcagcagcgugaucaccagccugggcgccaucgugagcugcuacggcaagaccaagugcaccgccagcaacaagaacagaggcaucaucaagaccuucagcaacggcugcgacuacgugagcaacaagggcguggacaccgugagcgugggcaacacccuguacugcgugaacaagcaggagggccagagccuguacgugaagggcgagcccaucaucaacuucuacgacccccugguguuccccagcgacgaguucgacgccagcaucagccaggugaacgagaagaucaaccagagccuggccuucaucagaaagagcgacgagcugcugcacaacgugaacgugggcaagagcaccaccaacaucaugaucaccaccaucaucaucgugaucaucgugauccugcugcugcugaucgccgugggccuguuccuguacugcaaggccagaugaggacuagucccuguucccagagcccacuuuuuuuucuuuuuuugaaauaaaauagccugucuuucagaucuaaaaaaaaaaaaaaaaaaaaaaaaaaaaaaaaaaaaaaaaaaaaaaaaaaaaaaaaaaaaaaaaugcaucccccccccccccccccccccccccccccccaaaggcucuuuucagagccaccagaauu

SEQ ID NO: 14323 - RNA, 1821 nt, Artificial Sequence
  mRNA product Design a-1 comprising derived and/or modified sequence from HRSV(Memphis-37)__AIY60640.1__F-del_DSCav1_mut1 (opt5)
gggagagucccgcagucggcguccagcggcucugcuuguucgugugugugucguugcaggccuuauucaagcuuaccauggagcugcccauccucaagaccaacgccauuacaacgauccuggcugccgugacccuuugcuucgcgagcucccagaauauuacagaagaguuuuaccaaucuaccuguagcgcugucuccaaaggcuaucugggggcccucagaacaggaugguacaccucuguuaucacaauugaacugagcaacaucaaggagaauaaaugcaacggcaccgacgccaaggugaaacuuaucaagcaggaacuggauaaguauaaaaaugcugugacggagcuccagcugcugaugcaguccaccccugccgcugggucuggaagcgccauuuguuccggcaucgcggucugcaaggugcuccaccuggagggggaaguuaacaaaauuaagaaugcccuucugagcacaaacaaagcuguggucucucucuccaauggagugagcguucugaccuucaaggugcuugaccugaagaacuacaucgauaaacaacuccugccgauucugaauaagcagucuuguuccauccccaacauugagacagucaucgaauuucagcagaaaaauaaccggcuccuggagaucacccgcgaguucagcgugaaugccggcgugacgacaccugucucuaccuauaugcuuacaaacuccgaacugcucagccugauuaacgacaugcccaucaccaaugaucaaaagaaacuuauguccaacaauguucagauugugagacagcagucuuacagcaucaugugcauuaucaaggaggaagugcuggcuuaugucgugcaacucccucuguacggcguuaucgacacccccuguuggaaacugcauacauccccucucugcacgaccaacacaaaggaggggagcaauauuugucugacccggacagaucgcggaugguacugcgacaacgccggcucuguguccuuuuucccgcaggcggaaaccuguaagguccagagcaauagaguguuuugcgauacgaugaacucucuuacacugcccagcgagguuaaucucugcaacaucgacauuuucaauccuaaauaugauuguaagaucaugaccuccaaaaccgacgugucuagcuccgucauuacaagccugggggccaucgugucuugcuacggaaagaccaaauguacagcuuccaacaagaaucggggcaucauuaagacguuuagcaacgggugcgauuaugucucuaauaaaggaguggacaccguuuccgugggcaacacacuuuacugugucaacaagcaagagggccagagccuguaugugaaaggggaacccaucauuaauuucuacgacccucucguuuuucccuccgaugaguucgacgccucuaucagccaggugaacgaaaagauuaaucagucccuggcuuuuauccgcaaaucugaugagcugcuccacaacgucaaugugggaaagagcaccacaaacauuaugaucaccacgaucauuaucgugauuaucguuauucugcuucugcucaucgccgucggccuguuccuguauugcaaggccagaugaggacuagucccuguucccagagcccacuuuuuuuucuuuuuuugaaauaaaauagccugucuuucagaucuaaaaaaaaaaaaaaaaaaaaaaaaaaaaaaaaaaaaaaaaaaaaaaaaaaaaaaaaaaaaaaaaugcaucccccccccccccccccccccccccccccccaaaggcucuuuucagagccaccagaauu

SEQ ID NO: 14324 - RNA, 1821 nt, Artificial Sequence
  mRNA product Design a-1 comprising derived and/or modified sequence from HRSV(Memphis-37)__AIY60640.1__F-del_DSCav1_mut1 (opt6)
gggagagucccgcagucggcguccagcggcucugcuuguucgugugugugucguugcaggccuuauucaagcuuaccauggaauuaccaauacuaaaaacaaacgcaauaacaacaauucuagcagcaguaacauuaugcuuugcaucaucccaaaacaucacagaagaauuuuaucaaucaaccugcucagcaguuuccaaaggauacuuaggagcauuaagaacugguugguacacuucaguaaucaccaucgaacucucaaacaucaaggaaaacaaaugcaacggaacagacgcaaaaguuaaacucauaaaacaagaacuugacaaauacaaaaacgccguaacagaacuacaacuucucaugcaaucaacacccgcagcaggauccggaucagccauaugcucaggcauagcaguauguaaaguauuacaucuugaaggugaaguaaacaaaauaaaaaacgcacuucuaucaaccaacaaagcaguaguaucacuaucaaacggaguauccgucuuaacauuuaaaguucuagaccucaaaaacuauauagacaaacaauuacugccaauccucaauaaacaaucaugcucaauaccaaacaucgaaacaguaauagaauuucaacaaaaaaacaacagacuacuagaaauaacaagagaauuuuccgucaacgccggcguaacuacuccaguaucaacauauaugcuaaccaacucagaacuccuaucccucauaaacgacaugccaauaacuaaugaucaaaaaaaacuaaugucaaacaauguacaaauaguuagacaacaaucauacucaaucaugugcauaauaaaagaagaaguacuagcauacgucguccaacuaccccuauacggaguaauagacacaccuugcuggaaacuacacacaucaccccuaugcacaacaaauacaaaagaagguuccaacaucugccuaacaagaacugauagaggaugguacugcgacaacgccggaucaguaucauucuucccucaagcugaaaccugcaaaguacaaucaaacagaguauuuugcgauacaaugaacucccuaacacuucccucagaaguuaaucuuuguaauauagauauauucaacccaaaauacgacugcaaaauaaugacaaguaaaacagacguauccucaucuguaauuacaucacuaggagccauaguaucuugcuacggcaaaaccaaaugcacagcaucaaacaaaaacagagguauuaucaaaaccuucucaaacggaugugacuacguuucaaacaaaggaguagacacaguaucagucggaaacacccuauacuguguuaacaaacaagaaggacaaucacuguacguaaaaggagaacccauaauaaauuucuacgacccacuuguauuuccaucagacgaauuugaugcaucaaucucacaaguaaaugaaaaaauaaaccaaucauuagcauucauaagaaaaucugacgaguuacuacacaacguaaauguuggcaaaucaacaaccaauauaaugauaacaacaauaauaauaguaauaauagucauauuacuccuccucauagccgucggauuauucuuauacugcaaagcaagauaaggacuagucccuguucccagagcccacuuuuuuuucuuuuuuugaaauaaaauagccugucuuucagaucuaaaaaaaaaaaaaaaaaaaaaaaaaaaaaaaaaaaaaaaaaaaaaaaaaaaaaaaaaaaaaaaaugcaucccccccccccccccccccccccccccccccaaaggcucuuuucagagccaccagaauu

SEQ ID NO: 14325 - RNA, 1821 nt, Artificial Sequence
  mRNA product Design a-1 comprising derived and/or modified sequence from HRSV(Memphis-37)__AIY60640.1__F-del_DSCav1_mut1 (opt11)
gggagagucccgcagucggcguccagcggcucugcuuguucgugugugugucguugcaggccuuauucaagcuuaccauggaacuccccauacuaaaaaccaacgccaucacaacaauccucgccgccgucacacucugcuucgccagcucccaaaacaucaccgaagaguucuaucaaucaaccugcuccgcagucucaaagggauaccucggagcccuccgcaccggaugguacacuuccgucaucacaauagaacucuccaacaucaaagaaaacaaaugcaacggcaccgacgcaaaagucaagcucaucaaacaagaacucgacaaauauaaaaacgccgucaccgaacuccaacuacucaugcaauccacacccgcggccggcucaggcagcgccaucugcucaggcaucgccgucugcaaaguccuccaccucgaaggcgaagucaacaaaaucaaaaacgcccuucuuucaaccaacaaggcaguaguaucccucucaaacggcgucagcguccugaccuucaaaguccuagaccucaaaaacuacauagauaaacaacuccuccccauacugaacaaacaaucgugcuccauccccaauaucgaaaccgucauagaguuccagcagaaaaacaacagacuucucgaaauaacccgagaguucucaguaaacgccggagucaccacacccguaagcaccuacaugcucacaaacucagaacuccuaucccucaucaacgacaugcccaucaccaacgaccagaaaaagcuaauguccaacaacguccaaauaguacgccaacaaagcuacucgauaaugugcaucaucaaggaagaaguacucgccuacgucguccaacucccccucuacggcguaaucgacacacccugcuggaaacuccacacguccccacucugcacaacaaacacaaaagaaggauccaacauaugccuaacccgcaccgacaggggcugguacugcgacaacgcaggcucagucagcuucuuuccccaagccgaaacaugcaaaguccaauccaaccgugucuucugcgacaccaugaacucgcucacccuacccucggaagucaaucucugcaacaucgacaucuucaacccaaaauacgacuguaaaaucaugaccagcaaaacagacguuucuuccagcgucaucacaucacucggcgcgaucguaucaugcuauggcaaaacaaagugcaccgcuagcaauaaaaaccgaggaaucauaaaaaccuucagcaacggcugcgacuacguauccaacaaaggcgucgacaccguauccgucggaaacacccucuacugcgucaacaagcaagaaggacaaucacucuacgucaaaggcgaaccaaucauaaacuucuacgacccacucguauuccccucagacgaguucgacgcauccaucucccaagucaacgaaaagaucaaccaaucucucgccuuuauacgcaaaagcgacgaacuccuucacaacguaaacgucggcaaaagcaccacuaacauaaugaucaccacaaucauaauaguaaucaucguaauacuccuccuacucaucgccgugggccuauuccucuauugcaaagcccgauaaggacuagucccuguucccagagcccacuuuuuuuucuuuuuuugaaauaaaauagccugucuuucagaucuaaaaaaaaaaaaaaaaaaaaaaaaaaaaaaaaaaaaaaaaaaaaaaaaaaaaaaaaaaaaaaaaugcaucccccccccccccccccccccccccccccccaaaggcucuuuucagagccaccagaauu

SEQ ID NO: 14326 - RNA, 1840 nt, Artificial Sequence
  mRNA product Design a-2 comprising derived and/or modified sequence from HRSV(Memphis-37)__AIY60640.1__F-del_DSCav1_mut1 (opt1)
gggagaguccgcucagccagguugcagaagcggcuuagcguguguccuaaucuucucucugcguguagguaggccugugccgcaaacaagcuuaccauggagcugcccauccucaagaccaacgccaucaccacgauccuggccgcggugacccugugcuucgccagcucccagaacaucaccgaggaguucuaccagagcacgugcuccgccgucagcaagggcuaccucggcgcccugcgcaccgggugguacaccagcgugaucaccaucgagcuguccaacaucaaggagaacaagugcaacggcaccgacgccaaggugaagcucaucaagcaggagcuggacaaguacaagaacgcggucacggagcugcagcuccugaugcagagcaccccggccgccggcuccgggagcgcgaucugcuccggcaucgccgucugcaaggugcugcaccucgagggcgaggugaacaagaucaagaacgcccugcuguccaccaacaaggccgucgugagccucuccaacggggugagcguccugaccuucaaggugcuggaccucaagaacuacaucgacaagcagcugcugcccauccugaacaagcagagcugcuccauccccaacaucgagaccgucaucgaguuccagcagaagaacaaccgccuccuggagaucacgcgggaguucagcgugaacgcgggcgugaccacccccgucuccaccuacaugcugacgaacagcgagcuccugucccugaucaacgacaugccgaucaccaacgaccagaagaagcucaugagcaacaacgugcagaucgugcgccagcaguccuacagcaucaugugcaucaucaaggaggagguccuggccuacguggugcagcugccccucuacggggucaucgacacccccugcuggaagcugcacaccagcccccugugcacgaccaacaccaaggagggcuccaacaucugccucacccggacggaccgcgggugguacugcgacaacgccggcagcguguccuucuucccgcaggccgagaccugcaagguccagagcaaccggguguucugcgacaccaugaacucccugacccugcccagcgaggugaaccucugcaacaucgacaucuucaaccccaaguacgacugcaagaucaugacguccaagaccgacgucagcuccagcgugaucaccucccugggcgccaucgugagcugcuacgggaagaccaagugcacggcgagcaacaagaaccgcggcaucaucaagaccuucuccaacgggugcgacuacgucagcaacaagggcguggacaccguguccgucggcaacacccuguacugcgugaacaagcaggagggccagagccucuacgugaagggggagcccaucaucaacuucuacgacccgcuggucuuccccuccgacgaguucgacgccagcaucucccaggugaacgagaagaucaaccagagccuggccuucauccggaaguccgacgagcuccugcacaacgugaacgucggcaagagcaccacgaacaucaugaucaccaccaucaucaucgugaucaucgugauccugcugcuccugaucgccgucgggcuguuccucuacugcaaggcccgcugaggacuagucccuguucccagagcccacuuuuuuuucuuuuuuugaaauaaaauagccugucuuucagaucuaaaaaaaaaaaaaaaaaaaaaaaaaaaaaaaaaaaaaaaaaaaaaaaaaaaaaaaaaaaaaaaaugcaucccccccccccccccccccccccccccccccaaaggcucuuuucagagccaccagaauu

SEQ ID NO: 14327 - RNA, 1840 nt, Artificial Sequence
  mRNA product Design a-2 comprising derived and/or modified sequence from HRSV(Memphis-37)__AIY60640.1__F-del_DSCav1_mut1 (opt1)
gggagaguccgcucagccagguugcagaagcggcuuagcguguguccuaaucuucucucugcguguagguaggccugugccgcaaacaagcuuaccauggagcugcccauccucaagaccaacgccaucaccacgauccuggccgcggugacccugugcuucgccagcucccagaacaucaccgaggaguucuaccagagcacgugcuccgccgucagcaagggcuaccucggggcccugcgcaccggcugguacaccuccgugaucaccaucgagcugagcaacaucaaggagaacaagugcaacgggaccgacgccaaggugaagcucaucaagcaggagcuggacaaguacaagaacgcggucacggagcugcagcuccugaugcaguccaccccggccgccggcagcggguccgccaucugcagcggcaucgcggugugcaaggugcugcaccucgagggcgaggucaacaagaucaagaacgcccugcuguccaccaacaaggccguggugagccucuccaacggggucagcgugcugaccuucaaggugcuggaccucaagaacuacaucgacaagcagcugcugcccauccucaacaagcaguccugcagcauccccaacaucgagacggucaucgaguuccagcagaagaacaaccggcugcuggagaucacccgcgaguucuccgugaacgccggcgugaccacccccgucagcacguacaugcucaccaacuccgagcugcugagccucaucaacgacaugccgaucaccaacgaccagaagaagcugaugagcaacaacgugcagaucgugcggcagcaguccuacagcaucaugugcaucaucaaggaggagguccuggccuacguggugcagcucccccuguacggggucaucgacacccccugcuggaagcugcacacgagcccccucugcaccaccaacaccaaggagggcuccaacaucugccugacgcgcaccgaccgggggugguacugcgacaacgcgggcuccgugagcuucuucccgcaggccgagaccugcaaggugcaguccaaccgcgucuucugcgacaccaugaacagccugacgcuccccuccgaggugaaccugugcaacaucgacaucuucaaccccaaguacgacugcaagaucaugaccagcaagaccgacgucuccagcuccgugaucaccagccugggcgccaucguguccugcuacgggaagacgaagugcaccgccagcaacaagaaccggggcaucaucaagaccuucuccaacgggugcgacuacgucagcaacaagggcguggacaccguguccgucggcaacacgcucuacugcgugaacaagcaggaggggcagagccuguacgugaagggcgagcccaucaucaacuucuacgacccgcuggucuuccccagcgacgaguucgacgccuccaucagccaggugaacgagaagaucaaccagucccucgcguucauccgcaagagcgacgagcugcugcacaacgugaacgucgggaaguccaccaccaacaucaugaucaccaccaucaucaucgugaucaucgugauccuccugcugcucaucgccgucggccuguuccuguacugcaaggcccggugaggacuagucccuguucccagagcccacuuuuuuuucuuuuuuugaaauaaaauagccugucuuucagaucuaaaaaaaaaaaaaaaaaaaaaaaaaaaaaaaaaaaaaaaaaaaaaaaaaaaaaaaaaaaaaaaaugcaucccccccccccccccccccccccccccccccaaaggcucuuuucagagccaccagaauu

SEQ ID NO: 14328 - RNA, 1840 nt, Artificial Sequence
  mRNA product Design a-2 comprising derived and/or modified sequence from HRSV(Memphis-37)__AIY60640.1__F-del_DSCav1_mut1 (opt2)
gggagaguccgcucagccagguugcagaagcggcuuagcguguguccuaaucuucucucugcguguagguaggccugugccgcaaacaagcuuaccauggagcuccccauccucaagaccaacgccaucaccaccauccucgccgccgucacccucugcuucgccuccucccagaacaucaccgaggaguucuaccaguccaccugcuccgccgucuccaagggcuaccucggcgcccuccgcaccggcugguacaccuccgucaucaccaucgagcucuccaacaucaaggagaacaagugcaacggcaccgacgccaaggucaagcucaucaagcaggagcucgacaaguacaagaacgccgucaccgagcuccagcuccucaugcaguccacccccgccgccggcuccggcuccgccaucugcuccggcaucgccgucugcaagguccuccaccucgagggcgaggucaacaagaucaagaacgcccuccucuccaccaacaaggccgucgucucccucuccaacggcgucuccguccucaccuucaagguccucgaccucaagaacuacaucgacaagcagcuccuccccauccucaacaagcaguccugcuccauccccaacaucgagaccgucaucgaguuccagcagaagaacaaccgccuccucgagaucacccgcgaguucuccgucaacgccggcgucaccacccccgucuccaccuacaugcucaccaacuccgagcuccucucccucaucaacgacaugcccaucaccaacgaccagaagaagcucauguccaacaacguccagaucguccgccagcaguccuacuccaucaugugcaucaucaaggaggagguccucgccuacgucguccagcucccccucuacggcgucaucgacacccccugcuggaagcuccacaccuccccccucugcaccaccaacaccaaggagggcuccaacaucugccucacccgcaccgaccgcggcugguacugcgacaacgccggcuccgucuccuucuucccccaggccgagaccugcaagguccaguccaaccgcgucuucugcgacaccaugaacucccucacccuccccuccgaggucaaccucugcaacaucgacaucuucaaccccaaguacgacugcaagaucaugaccuccaagaccgacgucuccuccuccgucaucaccucccucggcgccaucgucuccugcuacggcaagaccaagugcaccgccuccaacaagaaccgcggcaucaucaagaccuucuccaacggcugcgacuacgucuccaacaagggcgucgacaccgucuccgucggcaacacccucuacugcgucaacaagcaggagggccagucccucuacgucaagggcgagcccaucaucaacuucuacgacccccucgucuuccccuccgacgaguucgacgccuccaucucccaggucaacgagaagaucaaccagucccucgccuucauccgcaaguccgacgagcuccuccacaacgucaacgucggcaaguccaccaccaacaucaugaucaccaccaucaucaucgucaucaucgucauccuccuccuccucaucgccgucggccucuuccucuacugcaaggcccgcugaggacuagucccuguucccagagcccacuuuuuuuucuuuuuuugaaauaaaauagccugucuuucagaucuaaaaaaaaaaaaaaaaaaaaaaaaaaaaaaaaaaaaaaaaaaaaaaaaaaaaaaaaaaaaaaaaugcaucccccccccccccccccccccccccccccccaaaggcucuuuucagagccaccagaauu

SEQ ID NO: 14329 - RNA, 1840 nt, Artificial Sequence
  mRNA product Design a-2 comprising derived and/or modified sequence from HRSV(Memphis-37)__AIY60640.1__F-del_DSCav1_mut1 (opt3)
gggagaguccgcucagccagguugcagaagcggcuuagcguguguccuaaucuucucucugcguguagguaggccugugccgcaaacaagcuuaccauggagcugcccauccucaagaccaacgccauuacaacuauacuugcugcagugacgcugugcuucgccagcucccagaauaucaccgaagaguuuuaccaaucuacauguucagcggucaguaaaggcuauuugggggcuuuaagaacuggaugguacaccagcguuauuacaaucgaacuguccaacauuaaggagaauaaaugcaacgguaccgacgccaaggugaaacuaaucaagcaggaacucgauaaguauaaaaaugcaguaacugagcugcagcuucugaugcagucuacuccugccgcuggcucggggucagcaauauguagcggaaucgccgugugcaaggucuugcaccucgagggcgaagugaacaaaauuaagaaugcucugcugaguaccaacaaagccguugugucccucucuaauggugucagcguguuaacguucaagguacuggaccuuaagaacuacaucgauaaacaauugcugccaauucuaaauaagcaguccuguucaaucccgaacauagagacuguuauugaauuucagcagaaaaauaacaggcuccuggagaucacccgggaguucagugugaaugcgggggucacaacucccgugagcaccuauaugcuuacaaacucugaacuguugucccucauuaacgacaugccuaucaccaaugaucaaaagaaacugaugucaaacaaugugcagaucguccgccagcagagcuacaguauuaugugcauaaucaaggaggaaguuuuagcauaugugguacaacugccacucuacggagugauugacacgcccuguuggaaacuucauacuucuccucugugcacaaccaacacuaaggagggcuccaauaucuguuugacacgaaccgaucguggcugguacugcgacaacgccgggagcgucucguuuuucccacaggcugaaacguguaaggugcagucuaauagaguguuuugcgauaccaugaacucccuaacacugcccucagagguuaaucucugcaacauagacauuuucaauccuaaauaugauuguaagaucaugacaaguaaaaccgacgucagcuccucugugaucacaagccugggagccauuguaucaugcuacgguaagacuaaauguaccgcaaguaacaagaauaggggcaucauuaagacauuuuccaacgggugcgauuauguuagcaauaaaggaguggacaccgucucugugggcaacacucuuuacugugucaacaagcaagagggucagucacuguaugugaaaggggaaccaauaaucaauuucuacgacccguugguuuuucccagugaugaguucgacgcuagcauuucccaggugaacgaaaagaucaaucagucucucgccuuuauccggaaaucggaugagcuguuacacaacguaaaugucggaaagagcacgacaaacauuaugauaaccacuaucauuaucgugauuaucguuauacugcuacuccugaucgcggugggccuuuucuuguauugcaaggcccgcugaggacuagucccuguucccagagcccacuuuuuuuucuuuuuuugaaauaaaauagccugucuuucagaucuaaaaaaaaaaaaaaaaaaaaaaaaaaaaaaaaaaaaaaaaaaaaaaaaaaaaaaaaaaaaaaaaugcaucccccccccccccccccccccccccccccccaaaggcucuuuucagagccaccagaauu

SEQ ID NO: 14330 - RNA, 1840 nt, Artificial Sequence
  mRNA product Design a-2 comprising derived and/or modified sequence from HRSV(Memphis-37)__AIY60640.1__F-del_DSCav1_mut1 (opt4)
gggagaguccgcucagccagguugcagaagcggcuuagcguguguccuaaucuucucucugcguguagguaggccugugccgcaaacaagcuuaccauggagcugcccauccugaagaccaacgccaucaccaccauccuggccgccgugacccugugcuucgccagcagccagaacaucaccgaggaguucuaccagagcaccugcagcgccgugagcaagggcuaccugggcgcccugagaaccggcugguacaccagcgugaucaccaucgagcugagcaacaucaaggagaacaagugcaacggcaccgacgccaaggugaagcugaucaagcaggagcuggacaaguacaagaacgccgugaccgagcugcagcugcugaugcagagcacccccgccgccggcagcggcagcgccaucugcagcggcaucgccgugugcaaggugcugcaccuggagggcgaggugaacaagaucaagaacgcccugcugagcaccaacaaggccguggugagccugagcaacggcgugagcgugcugaccuucaaggugcuggaccugaagaacuacaucgacaagcagcugcugcccauccugaacaagcagagcugcagcauccccaacaucgagaccgugaucgaguuccagcagaagaacaacagacugcuggagaucaccagagaguucagcgugaacgccggcgugaccacccccgugagcaccuacaugcugaccaacagcgagcugcugagccugaucaacgacaugcccaucaccaacgaccagaagaagcugaugagcaacaacgugcagaucgugagacagcagagcuacagcaucaugugcaucaucaaggaggaggugcuggccuacguggugcagcugccccuguacggcgugaucgacacccccugcuggaagcugcacaccagcccccugugcaccaccaacaccaaggagggcagcaacaucugccugaccagaaccgacagaggcugguacugcgacaacgccggcagcgugagcuucuucccccaggccgagaccugcaaggugcagagcaacagaguguucugcgacaccaugaacagccugacccugcccagcgaggugaaccugugcaacaucgacaucuucaaccccaaguacgacugcaagaucaugaccagcaagaccgacgugagcagcagcgugaucaccagccugggcgccaucgugagcugcuacggcaagaccaagugcaccgccagcaacaagaacagaggcaucaucaagaccuucagcaacggcugcgacuacgugagcaacaagggcguggacaccgugagcgugggcaacacccuguacugcgugaacaagcaggagggccagagccuguacgugaagggcgagcccaucaucaacuucuacgacccccugguguuccccagcgacgaguucgacgccagcaucagccaggugaacgagaagaucaaccagagccuggccuucaucagaaagagcgacgagcugcugcacaacgugaacgugggcaagagcaccaccaacaucaugaucaccaccaucaucaucgugaucaucgugauccugcugcugcugaucgccgugggccuguuccuguacugcaaggccagaugaggacuagucccuguucccagagcccacuuuuuuuucuuuuuuugaaauaaaauagccugucuuucagaucuaaaaaaaaaaaaaaaaaaaaaaaaaaaaaaaaaaaaaaaaaaaaaaaaaaaaaaaaaaaaaaaaugcaucccccccccccccccccccccccccccccccaaaggcucuuuucagagccaccagaauu

SEQ ID NO: 14331 - RNA, 1840 nt, Artificial Sequence
  mRNA product Design a-2 comprising derived and/or modified sequence from HRSV(Memphis-37)__AIY60640.1__F-del_DSCav1_mut1 (opt5)
gggagaguccgcucagccagguugcagaagcggcuuagcguguguccuaaucuucucucugcguguagguaggccugugccgcaaacaagcuuaccauggagcugcccauccucaagaccaacgccauuacaacgauccuggcugccgugacccuuugcuucgcgagcucccagaauauuacagaagaguuuuaccaaucuaccuguagcgcugucuccaaaggcuaucugggggcccucagaacaggaugguacaccucuguuaucacaauugaacugagcaacaucaaggagaauaaaugcaacggcaccgacgccaaggugaaacuuaucaagcaggaacuggauaaguauaaaaaugcugugacggagcuccagcugcugaugcaguccaccccugccgcugggucuggaagcgccauuuguuccggcaucgcggucugcaaggugcuccaccuggagggggaaguuaacaaaauuaagaaugcccuucugagcacaaacaaagcuguggucucucucuccaauggagugagcguucugaccuucaaggugcuugaccugaagaacuacaucgauaaacaacuccugccgauucugaauaagcagucuuguuccauccccaacauugagacagucaucgaauuucagcagaaaaauaaccggcuccuggagaucacccgcgaguucagcgugaaugccggcgugacgacaccugucucuaccuauaugcuuacaaacuccgaacugcucagccugauuaacgacaugcccaucaccaaugaucaaaagaaacuuauguccaacaauguucagauugugagacagcagucuuacagcaucaugugcauuaucaaggaggaagugcuggcuuaugucgugcaacucccucuguacggcguuaucgacacccccuguuggaaacugcauacauccccucucugcacgaccaacacaaaggaggggagcaauauuugucugacccggacagaucgcggaugguacugcgacaacgccggcucuguguccuuuuucccgcaggcggaaaccuguaagguccagagcaauagaguguuuugcgauacgaugaacucucuuacacugcccagcgagguuaaucucugcaacaucgacauuuucaauccuaaauaugauuguaagaucaugaccuccaaaaccgacgugucuagcuccgucauuacaagccugggggccaucgugucuugcuacggaaagaccaaauguacagcuuccaacaagaaucggggcaucauuaagacguuuagcaacgggugcgauuaugucucuaauaaaggaguggacaccguuuccgugggcaacacacuuuacugugucaacaagcaagagggccagagccuguaugugaaaggggaacccaucauuaauuucuacgacccucucguuuuucccuccgaugaguucgacgccucuaucagccaggugaacgaaaagauuaaucagucccuggcuuuuauccgcaaaucugaugagcugcuccacaacgucaaugugggaaagagcaccacaaacauuaugaucaccacgaucauuaucgugauuaucguuauucugcuucugcucaucgccgucggccuguuccuguauugcaaggccagaugaggacuagucccuguucccagagcccacuuuuuuuucuuuuuuugaaauaaaauagccugucuuucagaucuaaaaaaaaaaaaaaaaaaaaaaaaaaaaaaaaaaaaaaaaaaaaaaaaaaaaaaaaaaaaaaaaugcaucccccccccccccccccccccccccccccccaaaggcucuuuucagagccaccagaauu

SEQ ID NO: 14332 - RNA, 1840 nt, Artificial Sequence
  mRNA product Design a-2 comprising derived and/or modified sequence from HRSV(Memphis-37)__AIY60640.1__F-del_DSCav1_mut1 (opt6)
gggagaguccgcucagccagguugcagaagcggcuuagcguguguccuaaucuucucucugcguguagguaggccugugccgcaaacaagcuuaccauggaauuaccaauacuaaaaacaaacgcaauaacaacaauucuagcagcaguaacauuaugcuuugcaucaucccaaaacaucacagaagaauuuuaucaaucaaccugcucagcaguuuccaaaggauacuuaggagcauuaagaacugguugguacacuucaguaaucaccaucgaacucucaaacaucaaggaaaacaaaugcaacggaacagacgcaaaaguuaaacucauaaaacaagaacuugacaaauacaaaaacgccguaacagaacuacaacuucucaugcaaucaacacccgcagcaggauccggaucagccauaugcucaggcauagcaguauguaaaguauuacaucuugaaggugaaguaaacaaaauaaaaaacgcacuucuaucaaccaacaaagcaguaguaucacuaucaaacggaguauccgucuuaacauuuaaaguucuagaccucaaaaacuauauagacaaacaauuacugccaauccucaauaaacaaucaugcucaauaccaaacaucgaaacaguaauagaauuucaacaaaaaaacaacagacuacuagaaauaacaagagaauuuuccgucaacgccggcguaacuacuccaguaucaacauauaugcuaaccaacucagaacuccuaucccucauaaacgacaugccaauaacuaaugaucaaaaaaaacuaaugucaaacaauguacaaauaguuagacaacaaucauacucaaucaugugcauaauaaaagaagaaguacuagcauacgucguccaacuaccccuauacggaguaauagacacaccuugcuggaaacuacacacaucaccccuaugcacaacaaauacaaaagaagguuccaacaucugccuaacaagaacugauagaggaugguacugcgacaacgccggaucaguaucauucuucccucaagcugaaaccugcaaaguacaaucaaacagaguauuuugcgauacaaugaacucccuaacacuucccucagaaguuaaucuuuguaauauagauauauucaacccaaaauacgacugcaaaauaaugacaaguaaaacagacguauccucaucuguaauuacaucacuaggagccauaguaucuugcuacggcaaaaccaaaugcacagcaucaaacaaaaacagagguauuaucaaaaccuucucaaacggaugugacuacguuucaaacaaaggaguagacacaguaucagucggaaacacccuauacuguguuaacaaacaagaaggacaaucacuguacguaaaaggagaacccauaauaaauuucuacgacccacuuguauuuccaucagacgaauuugaugcaucaaucucacaaguaaaugaaaaaauaaaccaaucauuagcauucauaagaaaaucugacgaguuacuacacaacguaaauguuggcaaaucaacaaccaauauaaugauaacaacaauaauaauaguaauaauagucauauuacuccuccucauagccgucggauuauucuuauacugcaaagcaagauaaggacuagucccuguucccagagcccacuuuuuuuucuuuuuuugaaauaaaauagccugucuuucagaucuaaaaaaaaaaaaaaaaaaaaaaaaaaaaaaaaaaaaaaaaaaaaaaaaaaaaaaaaaaaaaaaaugcaucccccccccccccccccccccccccccccccaaaggcucuuuucagagccaccagaauu

SEQ ID NO: 14333 - RNA, 1840 nt, Artificial Sequence
  mRNA product Design a-2 comprising derived and/or modified sequence from HRSV(Memphis-37)__AIY60640.1__F-del_DSCav1_mut1 (opt11)
gggagaguccgcucagccagguugcagaagcggcuuagcguguguccuaaucuucucucugcguguagguaggccugugccgcaaacaagcuuaccauggaacuccccauacuaaaaaccaacgccaucacaacaauccucgccgccgucacacucugcuucgccagcucccaaaacaucaccgaagaguucuaucaaucaaccugcuccgcagucucaaagggauaccucggagcccuccgcaccggaugguacacuuccgucaucacaauagaacucuccaacaucaaagaaaacaaaugcaacggcaccgacgcaaaagucaagcucaucaaacaagaacucgacaaauauaaaaacgccgucaccgaacuccaacuacucaugcaauccacacccgcggccggcucaggcagcgccaucugcucaggcaucgccgucugcaaaguccuccaccucgaaggcgaagucaacaaaaucaaaaacgcccuucuuucaaccaacaaggcaguaguaucccucucaaacggcgucagcguccugaccuucaaaguccuagaccucaaaaacuacauagauaaacaacuccuccccauacugaacaaacaaucgugcuccauccccaauaucgaaaccgucauagaguuccagcagaaaaacaacagacuucucgaaauaacccgagaguucucaguaaacgccggagucaccacacccguaagcaccuacaugcucacaaacucagaacuccuaucccucaucaacgacaugcccaucaccaacgaccagaaaaagcuaauguccaacaacguccaaauaguacgccaacaaagcuacucgauaaugugcaucaucaaggaagaaguacucgccuacgucguccaacucccccucuacggcguaaucgacacacccugcuggaaacuccacacguccccacucugcacaacaaacacaaaagaaggauccaacauaugccuaacccgcaccgacaggggcugguacugcgacaacgcaggcucagucagcuucuuuccccaagccgaaacaugcaaaguccaauccaaccgugucuucugcgacaccaugaacucgcucacccuacccucggaagucaaucucugcaacaucgacaucuucaacccaaaauacgacuguaaaaucaugaccagcaaaacagacguuucuuccagcgucaucacaucacucggcgcgaucguaucaugcuauggcaaaacaaagugcaccgcuagcaauaaaaaccgaggaaucauaaaaaccuucagcaacggcugcgacuacguauccaacaaaggcgucgacaccguauccgucggaaacacccucuacugcgucaacaagcaagaaggacaaucacucuacgucaaaggcgaaccaaucauaaacuucuacgacccacucguauuccccucagacgaguucgacgcauccaucucccaagucaacgaaaagaucaaccaaucucucgccuuuauacgcaaaagcgacgaacuccuucacaacguaaacgucggcaaaagcaccacuaacauaaugaucaccacaaucauaauaguaaucaucguaauacuccuccuacucaucgccgugggccuauuccucuauugcaaagcccgauaaggacuagucccuguucccagagcccacuuuuuuuucuuuuuuugaaauaaaauagccugucuuucagaucuaaaaaaaaaaaaaaaaaaaaaaaaaaaaaaaaaaaaaaaaaaaaaaaaaaaaaaaaaaaaaaaaugcaucccccccccccccccccccccccccccccccaaaggcucuuuucagagccaccagaauu

SEQ ID NO: 14334 - RNA, 1918 nt, Artificial Sequence
  mRNA product Design a-3 comprising derived and/or modified sequence from HRSV(Memphis-37)__AIY60640.1__F-del_DSCav1_mut1 (opt1)
gggagagggcgcuuggcuugcaaggacccugagcugcggcauugaagcacacccaacccaacucgacugaagucagccucacugaaccggaucugagaaucuucucucucugggcuugccagggcucuccgaaccuagcuagcauccucuucaauuccaacuagaaagcuuaccauggagcugcccauccucaagaccaacgccaucaccacgauccuggccgcggugacccugugcuucgccagcucccagaacaucaccgaggaguucuaccagagcacgugcuccgccgucagcaagggcuaccucggcgcccugcgcaccgggugguacaccagcgugaucaccaucgagcuguccaacaucaaggagaacaagugcaacggcaccgacgccaaggugaagcucaucaagcaggagcuggacaaguacaagaacgcggucacggagcugcagcuccugaugcagagcaccccggccgccggcuccgggagcgcgaucugcuccggcaucgccgucugcaaggugcugcaccucgagggcgaggugaacaagaucaagaacgcccugcuguccaccaacaaggccgucgugagccucuccaacggggugagcguccugaccuucaaggugcuggaccucaagaacuacaucgacaagcagcugcugcccauccugaacaagcagagcugcuccauccccaacaucgagaccgucaucgaguuccagcagaagaacaaccgccuccuggagaucacgcgggaguucagcgugaacgcgggcgugaccacccccgucuccaccuacaugcugacgaacagcgagcuccugucccugaucaacgacaugccgaucaccaacgaccagaagaagcucaugagcaacaacgugcagaucgugcgccagcaguccuacagcaucaugugcaucaucaaggaggagguccuggccuacguggugcagcugccccucuacggggucaucgacacccccugcuggaagcugcacaccagcccccugugcacgaccaacaccaaggagggcuccaacaucugccucacccggacggaccgcgggugguacugcgacaacgccggcagcguguccuucuucccgcaggccgagaccugcaagguccagagcaaccggguguucugcgacaccaugaacucccugacccugcccagcgaggugaaccucugcaacaucgacaucuucaaccccaaguacgacugcaagaucaugacguccaagaccgacgucagcuccagcgugaucaccucccugggcgccaucgugagcugcuacgggaagaccaagugcacggcgagcaacaagaaccgcggcaucaucaagaccuucuccaacgggugcgacuacgucagcaacaagggcguggacaccguguccgucggcaacacccuguacugcgugaacaagcaggagggccagagccucuacgugaagggggagcccaucaucaacuucuacgacccgcuggucuuccccuccgacgaguucgacgccagcaucucccaggugaacgagaagaucaaccagagccuggccuucauccggaaguccgacgagcuccugcacaacgugaacgucggcaagagcaccacgaacaucaugaucaccaccaucaucaucgugaucaucgugauccugcugcuccugaucgccgucgggcuguuccucuacugcaaggcccgcugaggacuagucccuguucccagagcccacuuuuuuuucuuuuuuugaaauaaaauagccugucuuucagaucuaaaaaaaaaaaaaaaaaaaaaaaaaaaaaaaaaaaaaaaaaaaaaaaaaaaaaaaaaaaaaaaaugcaucccccccccccccccccccccccccccccccaaaggcucuuuucagagccaccagaauu

SEQ ID NO: 14335 - RNA, 1918 nt, Artificial Sequence
  mRNA product Design a-3 comprising derived and/or modified sequence from HRSV(Memphis-37)__AIY60640.1__F-del_DSCav1_mut1 (opt1)
gggagagggcgcuuggcuugcaaggacccugagcugcggcauugaagcacacccaacccaacucgacugaagucagccucacugaaccggaucugagaaucuucucucucugggcuugccagggcucuccgaaccuagcuagcauccucuucaauuccaacuagaaagcuuaccauggagcugcccauccucaagaccaacgccaucaccacgauccuggccgcggugacccugugcuucgccagcucccagaacaucaccgaggaguucuaccagagcacgugcuccgccgucagcaagggcuaccucggggcccugcgcaccggcugguacaccuccgugaucaccaucgagcugagcaacaucaaggagaacaagugcaacgggaccgacgccaaggugaagcucaucaagcaggagcuggacaaguacaagaacgcggucacggagcugcagcuccugaugcaguccaccccggccgccggcagcggguccgccaucugcagcggcaucgcggugugcaaggugcugcaccucgagggcgaggucaacaagaucaagaacgcccugcuguccaccaacaaggccguggugagccucuccaacggggucagcgugcugaccuucaaggugcuggaccucaagaacuacaucgacaagcagcugcugcccauccucaacaagcaguccugcagcauccccaacaucgagacggucaucgaguuccagcagaagaacaaccggcugcuggagaucacccgcgaguucuccgugaacgccggcgugaccacccccgucagcacguacaugcucaccaacuccgagcugcugagccucaucaacgacaugccgaucaccaacgaccagaagaagcugaugagcaacaacgugcagaucgugcggcagcaguccuacagcaucaugugcaucaucaaggaggagguccuggccuacguggugcagcucccccuguacggggucaucgacacccccugcuggaagcugcacacgagcccccucugcaccaccaacaccaaggagggcuccaacaucugccugacgcgcaccgaccgggggugguacugcgacaacgcgggcuccgugagcuucuucccgcaggccgagaccugcaaggugcaguccaaccgcgucuucugcgacaccaugaacagccugacgcuccccuccgaggugaaccugugcaacaucgacaucuucaaccccaaguacgacugcaagaucaugaccagcaagaccgacgucuccagcuccgugaucaccagccugggcgccaucguguccugcuacgggaagacgaagugcaccgccagcaacaagaaccggggcaucaucaagaccuucuccaacgggugcgacuacgucagcaacaagggcguggacaccguguccgucggcaacacgcucuacugcgugaacaagcaggaggggcagagccuguacgugaagggcgagcccaucaucaacuucuacgacccgcuggucuuccccagcgacgaguucgacgccuccaucagccaggugaacgagaagaucaaccagucccucgcguucauccgcaagagcgacgagcugcugcacaacgugaacgucgggaaguccaccaccaacaucaugaucaccaccaucaucaucgugaucaucgugauccuccugcugcucaucgccgucggccuguuccuguacugcaaggcccggugaggacuagucccuguucccagagcccacuuuuuuuucuuuuuuugaaauaaaauagccugucuuucagaucuaaaaaaaaaaaaaaaaaaaaaaaaaaaaaaaaaaaaaaaaaaaaaaaaaaaaaaaaaaaaaaaaugcaucccccccccccccccccccccccccccccccaaaggcucuuuucagagccaccagaauu

SEQ ID NO: 14336 - RNA, 1918 nt, Artificial Sequence
  mRNA product Design a-3 comprising derived and/or modified sequence from HRSV(Memphis-37)__AIY60640.1__F-del_DSCav1_mut1 (opt2)
gggagagggcgcuuggcuugcaaggacccugagcugcggcauugaagcacacccaacccaacucgacugaagucagccucacugaaccggaucugagaaucuucucucucugggcuugccagggcucuccgaaccuagcuagcauccucuucaauuccaacuagaaagcuuaccauggagcuccccauccucaagaccaacgccaucaccaccauccucgccgccgucacccucugcuucgccuccucccagaacaucaccgaggaguucuaccaguccaccugcuccgccgucuccaagggcuaccucggcgcccuccgcaccggcugguacaccuccgucaucaccaucgagcucuccaacaucaaggagaacaagugcaacggcaccgacgccaaggucaagcucaucaagcaggagcucgacaaguacaagaacgccgucaccgagcuccagcuccucaugcaguccacccccgccgccggcuccggcuccgccaucugcuccggcaucgccgucugcaagguccuccaccucgagggcgaggucaacaagaucaagaacgcccuccucuccaccaacaaggccgucgucucccucuccaacggcgucuccguccucaccuucaagguccucgaccucaagaacuacaucgacaagcagcuccuccccauccucaacaagcaguccugcuccauccccaacaucgagaccgucaucgaguuccagcagaagaacaaccgccuccucgagaucacccgcgaguucuccgucaacgccggcgucaccacccccgucuccaccuacaugcucaccaacuccgagcuccucucccucaucaacgacaugcccaucaccaacgaccagaagaagcucauguccaacaacguccagaucguccgccagcaguccuacuccaucaugugcaucaucaaggaggagguccucgccuacgucguccagcucccccucuacggcgucaucgacacccccugcuggaagcuccacaccuccccccucugcaccaccaacaccaaggagggcuccaacaucugccucacccgcaccgaccgcggcugguacugcgacaacgccggcuccgucuccuucuucccccaggccgagaccugcaagguccaguccaaccgcgucuucugcgacaccaugaacucccucacccuccccuccgaggucaaccucugcaacaucgacaucuucaaccccaaguacgacugcaagaucaugaccuccaagaccgacgucuccuccuccgucaucaccucccucggcgccaucgucuccugcuacggcaagaccaagugcaccgccuccaacaagaaccgcggcaucaucaagaccuucuccaacggcugcgacuacgucuccaacaagggcgucgacaccgucuccgucggcaacacccucuacugcgucaacaagcaggagggccagucccucuacgucaagggcgagcccaucaucaacuucuacgacccccucgucuuccccuccgacgaguucgacgccuccaucucccaggucaacgagaagaucaaccagucccucgccuucauccgcaaguccgacgagcuccuccacaacgucaacgucggcaaguccaccaccaacaucaugaucaccaccaucaucaucgucaucaucgucauccuccuccuccucaucgccgucggccucuuccucuacugcaaggcccgcugaggacuagucccuguucccagagcccacuuuuuuuucuuuuuuugaaauaaaauagccugucuuucagaucuaaaaaaaaaaaaaaaaaaaaaaaaaaaaaaaaaaaaaaaaaaaaaaaaaaaaaaaaaaaaaaaaugcaucccccccccccccccccccccccccccccccaaaggcucuuuucagagccaccagaauu

SEQ ID NO: 14337 - RNA, 1918 nt, Artificial Sequence
  mRNA product Design a-3 comprising derived and/or modified sequence from HRSV(Memphis-37)__AIY60640.1__F-del_DSCav1_mut1 (opt3)
gggagagggcgcuuggcuugcaaggacccugagcugcggcauugaagcacacccaacccaacucgacugaagucagccucacugaaccggaucugagaaucuucucucucugggcuugccagggcucuccgaaccuagcuagcauccucuucaauuccaacuagaaagcuuaccauggagcugcccauccucaagaccaacgccauuacaacuauacuugcugcagugacgcugugcuucgccagcucccagaauaucaccgaagaguuuuaccaaucuacauguucagcggucaguaaaggcuauuugggggcuuuaagaacuggaugguacaccagcguuauuacaaucgaacuguccaacauuaaggagaauaaaugcaacgguaccgacgccaaggugaaacuaaucaagcaggaacucgauaaguauaaaaaugcaguaacugagcugcagcuucugaugcagucuacuccugccgcuggcucggggucagcaauauguagcggaaucgccgugugcaaggucuugcaccucgagggcgaagugaacaaaauuaagaaugcucugcugaguaccaacaaagccguugugucccucucuaauggugucagcguguuaacguucaagguacuggaccuuaagaacuacaucgauaaacaauugcugccaauucuaaauaagcaguccuguucaaucccgaacauagagacuguuauugaauuucagcagaaaaauaacaggcuccuggagaucacccgggaguucagugugaaugcgggggucacaacucccgugagcaccuauaugcuuacaaacucugaacuguugucccucauuaacgacaugccuaucaccaaugaucaaaagaaacugaugucaaacaaugugcagaucguccgccagcagagcuacaguauuaugugcauaaucaaggaggaaguuuuagcauaugugguacaacugccacucuacggagugauugacacgcccuguuggaaacuucauacuucuccucugugcacaaccaacacuaaggagggcuccaauaucuguuugacacgaaccgaucguggcugguacugcgacaacgccgggagcgucucguuuuucccacaggcugaaacguguaaggugcagucuaauagaguguuuugcgauaccaugaacucccuaacacugcccucagagguuaaucucugcaacauagacauuuucaauccuaaauaugauuguaagaucaugacaaguaaaaccgacgucagcuccucugugaucacaagccugggagccauuguaucaugcuacgguaagacuaaauguaccgcaaguaacaagaauaggggcaucauuaagacauuuuccaacgggugcgauuauguuagcaauaaaggaguggacaccgucucugugggcaacacucuuuacugugucaacaagcaagagggucagucacuguaugugaaaggggaaccaauaaucaauuucuacgacccguugguuuuucccagugaugaguucgacgcuagcauuucccaggugaacgaaaagaucaaucagucucucgccuuuauccggaaaucggaugagcuguuacacaacguaaaugucggaaagagcacgacaaacauuaugauaaccacuaucauuaucgugauuaucguuauacugcuacuccugaucgcggugggccuuuucuuguauugcaaggcccgcugaggacuagucccuguucccagagcccacuuuuuuuucuuuuuuugaaauaaaauagccugucuuucagaucuaaaaaaaaaaaaaaaaaaaaaaaaaaaaaaaaaaaaaaaaaaaaaaaaaaaaaaaaaaaaaaaaugcaucccccccccccccccccccccccccccccccaaaggcucuuuucagagccaccagaauu

SEQ ID NO: 14338 - RNA, 1918 nt, Artificial Sequence
  mRNA product Design a-3 comprising derived and/or modified sequence from HRSV(Memphis-37)__AIY60640.1__F-del_DSCav1_mut1 (opt4)
gggagagggcgcuuggcuugcaaggacccugagcugcggcauugaagcacacccaacccaacucgacugaagucagccucacugaaccggaucugagaaucuucucucucugggcuugccagggcucuccgaaccuagcuagcauccucuucaauuccaacuagaaagcuuaccauggagcugcccauccugaagaccaacgccaucaccaccauccuggccgccgugacccugugcuucgccagcagccagaacaucaccgaggaguucuaccagagcaccugcagcgccgugagcaagggcuaccugggcgcccugagaaccggcugguacaccagcgugaucaccaucgagcugagcaacaucaaggagaacaagugcaacggcaccgacgccaaggugaagcugaucaagcaggagcuggacaaguacaagaacgccgugaccgagcugcagcugcugaugcagagcacccccgccgccggcagcggcagcgccaucugcagcggcaucgccgugugcaaggugcugcaccuggagggcgaggugaacaagaucaagaacgcccugcugagcaccaacaaggccguggugagccugagcaacggcgugagcgugcugaccuucaaggugcuggaccugaagaacuacaucgacaagcagcugcugcccauccugaacaagcagagcugcagcauccccaacaucgagaccgugaucgaguuccagcagaagaacaacagacugcuggagaucaccagagaguucagcgugaacgccggcgugaccacccccgugagcaccuacaugcugaccaacagcgagcugcugagccugaucaacgacaugcccaucaccaacgaccagaagaagcugaugagcaacaacgugcagaucgugagacagcagagcuacagcaucaugugcaucaucaaggaggaggugcuggccuacguggugcagcugccccuguacggcgugaucgacacccccugcuggaagcugcacaccagcccccugugcaccaccaacaccaaggagggcagcaacaucugccugaccagaaccgacagaggcugguacugcgacaacgccggcagcgugagcuucuucccccaggccgagaccugcaaggugcagagcaacagaguguucugcgacaccaugaacagccugacccugcccagcgaggugaaccugugcaacaucgacaucuucaaccccaaguacgacugcaagaucaugaccagcaagaccgacgugagcagcagcgugaucaccagccugggcgccaucgugagcugcuacggcaagaccaagugcaccgccagcaacaagaacagaggcaucaucaagaccuucagcaacggcugcgacuacgugagcaacaagggcguggacaccgugagcgugggcaacacccuguacugcgugaacaagcaggagggccagagccuguacgugaagggcgagcccaucaucaacuucuacgacccccugguguuccccagcgacgaguucgacgccagcaucagccaggugaacgagaagaucaaccagagccuggccuucaucagaaagagcgacgagcugcugcacaacgugaacgugggcaagagcaccaccaacaucaugaucaccaccaucaucaucgugaucaucgugauccugcugcugcugaucgccgugggccuguuccuguacugcaaggccagaugaggacuagucccuguucccagagcccacuuuuuuuucuuuuuuugaaauaaaauagccugucuuucagaucuaaaaaaaaaaaaaaaaaaaaaaaaaaaaaaaaaaaaaaaaaaaaaaaaaaaaaaaaaaaaaaaaugcaucccccccccccccccccccccccccccccccaaaggcucuuuucagagccaccagaauu

SEQ ID NO: 14339 - RNA, 1918 nt, Artificial Sequence
  mRNA product Design a-3 comprising derived and/or modified sequence from HRSV(Memphis-37)__AIY60640.1__F-del_DSCav1_mut1 (opt5)
gggagagggcgcuuggcuugcaaggacccugagcugcggcauugaagcacacccaacccaacucgacugaagucagccucacugaaccggaucugagaaucuucucucucugggcuugccagggcucuccgaaccuagcuagcauccucuucaauuccaacuagaaagcuuaccauggagcugcccauccucaagaccaacgccauuacaacgauccuggcugccgugacccuuugcuucgcgagcucccagaauauuacagaagaguuuuaccaaucuaccuguagcgcugucuccaaaggcuaucugggggcccucagaacaggaugguacaccucuguuaucacaauugaacugagcaacaucaaggagaauaaaugcaacggcaccgacgccaaggugaaacuuaucaagcaggaacuggauaaguauaaaaaugcugugacggagcuccagcugcugaugcaguccaccccugccgcugggucuggaagcgccauuuguuccggcaucgcggucugcaaggugcuccaccuggagggggaaguuaacaaaauuaagaaugcccuucugagcacaaacaaagcuguggucucucucuccaauggagugagcguucugaccuucaaggugcuugaccugaagaacuacaucgauaaacaacuccugccgauucugaauaagcagucuuguuccauccccaacauugagacagucaucgaauuucagcagaaaaauaaccggcuccuggagaucacccgcgaguucagcgugaaugccggcgugacgacaccugucucuaccuauaugcuuacaaacuccgaacugcucagccugauuaacgacaugcccaucaccaaugaucaaaagaaacuuauguccaacaauguucagauugugagacagcagucuuacagcaucaugugcauuaucaaggaggaagugcuggcuuaugucgugcaacucccucuguacggcguuaucgacacccccuguuggaaacugcauacauccccucucugcacgaccaacacaaaggaggggagcaauauuugucugacccggacagaucgcggaugguacugcgacaacgccggcucuguguccuuuuucccgcaggcggaaaccuguaagguccagagcaauagaguguuuugcgauacgaugaacucucuuacacugcccagcgagguuaaucucugcaacaucgacauuuucaauccuaaauaugauuguaagaucaugaccuccaaaaccgacgugucuagcuccgucauuacaagccugggggccaucgugucuugcuacggaaagaccaaauguacagcuuccaacaagaaucggggcaucauuaagacguuuagcaacgggugcgauuaugucucuaauaaaggaguggacaccguuuccgugggcaacacacuuuacugugucaacaagcaagagggccagagccuguaugugaaaggggaacccaucauuaauuucuacgacccucucguuuuucccuccgaugaguucgacgccucuaucagccaggugaacgaaaagauuaaucagucccuggcuuuuauccgcaaaucugaugagcugcuccacaacgucaaugugggaaagagcaccacaaacauuaugaucaccacgaucauuaucgugauuaucguuauucugcuucugcucaucgccgucggccuguuccuguauugcaaggccagaugaggacuagucccuguucccagagcccacuuuuuuuucuuuuuuugaaauaaaauagccugucuuucagaucuaaaaaaaaaaaaaaaaaaaaaaaaaaaaaaaaaaaaaaaaaaaaaaaaaaaaaaaaaaaaaaaaugcaucccccccccccccccccccccccccccccccaaaggcucuuuucagagccaccagaauu

SEQ ID NO: 14340 - RNA, 1918 nt, Artificial Sequence
  mRNA product Design a-3 comprising derived and/or modified sequence from HRSV(Memphis-37)__AIY60640.1__F-del_DSCav1_mut1 (opt6)
gggagagggcgcuuggcuugcaaggacccugagcugcggcauugaagcacacccaacccaacucgacugaagucagccucacugaaccggaucugagaaucuucucucucugggcuugccagggcucuccgaaccuagcuagcauccucuucaauuccaacuagaaagcuuaccauggaauuaccaauacuaaaaacaaacgcaauaacaacaauucuagcagcaguaacauuaugcuuugcaucaucccaaaacaucacagaagaauuuuaucaaucaaccugcucagcaguuuccaaaggauacuuaggagcauuaagaacugguugguacacuucaguaaucaccaucgaacucucaaacaucaaggaaaacaaaugcaacggaacagacgcaaaaguuaaacucauaaaacaagaacuugacaaauacaaaaacgccguaacagaacuacaacuucucaugcaaucaacacccgcagcaggauccggaucagccauaugcucaggcauagcaguauguaaaguauuacaucuugaaggugaaguaaacaaaauaaaaaacgcacuucuaucaaccaacaaagcaguaguaucacuaucaaacggaguauccgucuuaacauuuaaaguucuagaccucaaaaacuauauagacaaacaauuacugccaauccucaauaaacaaucaugcucaauaccaaacaucgaaacaguaauagaauuucaacaaaaaaacaacagacuacuagaaauaacaagagaauuuuccgucaacgccggcguaacuacuccaguaucaacauauaugcuaaccaacucagaacuccuaucccucauaaacgacaugccaauaacuaaugaucaaaaaaaacuaaugucaaacaauguacaaauaguuagacaacaaucauacucaaucaugugcauaauaaaagaagaaguacuagcauacgucguccaacuaccccuauacggaguaauagacacaccuugcuggaaacuacacacaucaccccuaugcacaacaaauacaaaagaagguuccaacaucugccuaacaagaacugauagaggaugguacugcgacaacgccggaucaguaucauucuucccucaagcugaaaccugcaaaguacaaucaaacagaguauuuugcgauacaaugaacucccuaacacuucccucagaaguuaaucuuuguaauauagauauauucaacccaaaauacgacugcaaaauaaugacaaguaaaacagacguauccucaucuguaauuacaucacuaggagccauaguaucuugcuacggcaaaaccaaaugcacagcaucaaacaaaaacagagguauuaucaaaaccuucucaaacggaugugacuacguuucaaacaaaggaguagacacaguaucagucggaaacacccuauacuguguuaacaaacaagaaggacaaucacuguacguaaaaggagaacccauaauaaauuucuacgacccacuuguauuuccaucagacgaauuugaugcaucaaucucacaaguaaaugaaaaaauaaaccaaucauuagcauucauaagaaaaucugacgaguuacuacacaacguaaauguuggcaaaucaacaaccaauauaaugauaacaacaauaauaauaguaauaauagucauauuacuccuccucauagccgucggauuauucuuauacugcaaagcaagauaaggacuagucccuguucccagagcccacuuuuuuuucuuuuuuugaaauaaaauagccugucuuucagaucuaaaaaaaaaaaaaaaaaaaaaaaaaaaaaaaaaaaaaaaaaaaaaaaaaaaaaaaaaaaaaaaaugcaucccccccccccccccccccccccccccccccaaaggcucuuuucagagccaccagaauu

SEQ ID NO: 14341 - RNA, 1918 nt, Artificial Sequence
  mRNA product Design a-3 comprising derived and/or modified sequence from HRSV(Memphis-37)__AIY60640.1__F-del_DSCav1_mut1 (opt11)
gggagagggcgcuuggcuugcaaggacccugagcugcggcauugaagcacacccaacccaacucgacugaagucagccucacugaaccggaucugagaaucuucucucucugggcuugccagggcucuccgaaccuagcuagcauccucuucaauuccaacuagaaagcuuaccauggaacuccccauacuaaaaaccaacgccaucacaacaauccucgccgccgucacacucugcuucgccagcucccaaaacaucaccgaagaguucuaucaaucaaccugcuccgcagucucaaagggauaccucggagcccuccgcaccggaugguacacuuccgucaucacaauagaacucuccaacaucaaagaaaacaaaugcaacggcaccgacgcaaaagucaagcucaucaaacaagaacucgacaaauauaaaaacgccgucaccgaacuccaacuacucaugcaauccacacccgcggccggcucaggcagcgccaucugcucaggcaucgccgucugcaaaguccuccaccucgaaggcgaagucaacaaaaucaaaaacgcccuucuuucaaccaacaaggcaguaguaucccucucaaacggcgucagcguccugaccuucaaaguccuagaccucaaaaacuacauagauaaacaacuccuccccauacugaacaaacaaucgugcuccauccccaauaucgaaaccgucauagaguuccagcagaaaaacaacagacuucucgaaauaacccgagaguucucaguaaacgccggagucaccacacccguaagcaccuacaugcucacaaacucagaacuccuaucccucaucaacgacaugcccaucaccaacgaccagaaaaagcuaauguccaacaacguccaaauaguacgccaacaaagcuacucgauaaugugcaucaucaaggaagaaguacucgccuacgucguccaacucccccucuacggcguaaucgacacacccugcuggaaacuccacacguccccacucugcacaacaaacacaaaagaaggauccaacauaugccuaacccgcaccgacaggggcugguacugcgacaacgcaggcucagucagcuucuuuccccaagccgaaacaugcaaaguccaauccaaccgugucuucugcgacaccaugaacucgcucacccuacccucggaagucaaucucugcaacaucgacaucuucaacccaaaauacgacuguaaaaucaugaccagcaaaacagacguuucuuccagcgucaucacaucacucggcgcgaucguaucaugcuauggcaaaacaaagugcaccgcuagcaauaaaaaccgaggaaucauaaaaaccuucagcaacggcugcgacuacguauccaacaaaggcgucgacaccguauccgucggaaacacccucuacugcgucaacaagcaagaaggacaaucacucuacgucaaaggcgaaccaaucauaaacuucuacgacccacucguauuccccucagacgaguucgacgcauccaucucccaagucaacgaaaagaucaaccaaucucucgccuuuauacgcaaaagcgacgaacuccuucacaacguaaacgucggcaaaagcaccacuaacauaaugaucaccacaaucauaauaguaaucaucguaauacuccuccuacucaucgccgugggccuauuccucuauugcaaagcccgauaaggacuagucccuguucccagagcccacuuuuuuuucuuuuuuugaaauaaaauagccugucuuucagaucuaaaaaaaaaaaaaaaaaaaaaaaaaaaaaaaaaaaaaaaaaaaaaaaaaaaaaaaaaaaaaaaaugcaucccccccccccccccccccccccccccccccaaaggcucuuuucagagccaccagaauu

SEQ ID NO: 14342 - RNA, 1867 nt, Artificial Sequence
  mRNA product Design a-4 comprising derived and/or modified sequence from HRSV(Memphis-37)__AIY60640.1__F-del_DSCav1_mut1 (opt1)
gggagacuccugucgggcggaaguaggaggaguagaguuuaaaaacaguacucuuuuuccgguucgggacguaguugaagcaacgacaagccggauaaccgcucuugagacaggaagcuuaccauggagcugcccauccucaagaccaacgccaucaccacgauccuggccgcggugacccugugcuucgccagcucccagaacaucaccgaggaguucuaccagagcacgugcuccgccgucagcaagggcuaccucggcgcccugcgcaccgggugguacaccagcgugaucaccaucgagcuguccaacaucaaggagaacaagugcaacggcaccgacgccaaggugaagcucaucaagcaggagcuggacaaguacaagaacgcggucacggagcugcagcuccugaugcagagcaccccggccgccggcuccgggagcgcgaucugcuccggcaucgccgucugcaaggugcugcaccucgagggcgaggugaacaagaucaagaacgcccugcuguccaccaacaaggccgucgugagccucuccaacggggugagcguccugaccuucaaggugcuggaccucaagaacuacaucgacaagcagcugcugcccauccugaacaagcagagcugcuccauccccaacaucgagaccgucaucgaguuccagcagaagaacaaccgccuccuggagaucacgcgggaguucagcgugaacgcgggcgugaccacccccgucuccaccuacaugcugacgaacagcgagcuccugucccugaucaacgacaugccgaucaccaacgaccagaagaagcucaugagcaacaacgugcagaucgugcgccagcaguccuacagcaucaugugcaucaucaaggaggagguccuggccuacguggugcagcugccccucuacggggucaucgacacccccugcuggaagcugcacaccagcccccugugcacgaccaacaccaaggagggcuccaacaucugccucacccggacggaccgcgggugguacugcgacaacgccggcagcguguccuucuucccgcaggccgagaccugcaagguccagagcaaccggguguucugcgacaccaugaacucccugacccugcccagcgaggugaaccucugcaacaucgacaucuucaaccccaaguacgacugcaagaucaugacguccaagaccgacgucagcuccagcgugaucaccucccugggcgccaucgugagcugcuacgggaagaccaagugcacggcgagcaacaagaaccgcggcaucaucaagaccuucuccaacgggugcgacuacgucagcaacaagggcguggacaccguguccgucggcaacacccuguacugcgugaacaagcaggagggccagagccucuacgugaagggggagcccaucaucaacuucuacgacccgcuggucuuccccuccgacgaguucgacgccagcaucucccaggugaacgagaagaucaaccagagccuggccuucauccggaaguccgacgagcuccugcacaacgugaacgucggcaagagcaccacgaacaucaugaucaccaccaucaucaucgugaucaucgugauccugcugcuccugaucgccgucgggcuguuccucuacugcaaggcccgcugaggacuagucccuguucccagagcccacuuuuuuuucuuuuuuugaaauaaaauagccugucuuucagaucuaaaaaaaaaaaaaaaaaaaaaaaaaaaaaaaaaaaaaaaaaaaaaaaaaaaaaaaaaaaaaaaaugcaucccccccccccccccccccccccccccccccaaaggcucuuuucagagccaccagaauu

SEQ ID NO: 14343 - RNA, 1867 nt, Artificial Sequence
  mRNA product Design a-4 comprising derived and/or modified sequence from HRSV(Memphis-37)__AIY60640.1__F-del_DSCav1_mut1 (opt1)
gggagacuccugucgggcggaaguaggaggaguagaguuuaaaaacaguacucuuuuuccgguucgggacguaguugaagcaacgacaagccggauaaccgcucuugagacaggaagcuuaccauggagcugcccauccucaagaccaacgccaucaccacgauccuggccgcggugacccugugcuucgccagcucccagaacaucaccgaggaguucuaccagagcacgugcuccgccgucagcaagggcuaccucggggcccugcgcaccggcugguacaccuccgugaucaccaucgagcugagcaacaucaaggagaacaagugcaacgggaccgacgccaaggugaagcucaucaagcaggagcuggacaaguacaagaacgcggucacggagcugcagcuccugaugcaguccaccccggccgccggcagcggguccgccaucugcagcggcaucgcggugugcaaggugcugcaccucgagggcgaggucaacaagaucaagaacgcccugcuguccaccaacaaggccguggugagccucuccaacggggucagcgugcugaccuucaaggugcuggaccucaagaacuacaucgacaagcagcugcugcccauccucaacaagcaguccugcagcauccccaacaucgagacggucaucgaguuccagcagaagaacaaccggcugcuggagaucacccgcgaguucuccgugaacgccggcgugaccacccccgucagcacguacaugcucaccaacuccgagcugcugagccucaucaacgacaugccgaucaccaacgaccagaagaagcugaugagcaacaacgugcagaucgugcggcagcaguccuacagcaucaugugcaucaucaaggaggagguccuggccuacguggugcagcucccccuguacggggucaucgacacccccugcuggaagcugcacacgagcccccucugcaccaccaacaccaaggagggcuccaacaucugccugacgcgcaccgaccgggggugguacugcgacaacgcgggcuccgugagcuucuucccgcaggccgagaccugcaaggugcaguccaaccgcgucuucugcgacaccaugaacagccugacgcuccccuccgaggugaaccugugcaacaucgacaucuucaaccccaaguacgacugcaagaucaugaccagcaagaccgacgucuccagcuccgugaucaccagccugggcgccaucguguccugcuacgggaagacgaagugcaccgccagcaacaagaaccggggcaucaucaagaccuucuccaacgggugcgacuacgucagcaacaagggcguggacaccguguccgucggcaacacgcucuacugcgugaacaagcaggaggggcagagccuguacgugaagggcgagcccaucaucaacuucuacgacccgcuggucuuccccagcgacgaguucgacgccuccaucagccaggugaacgagaagaucaaccagucccucgcguucauccgcaagagcgacgagcugcugcacaacgugaacgucgggaaguccaccaccaacaucaugaucaccaccaucaucaucgugaucaucgugauccuccugcugcucaucgccgucggccuguuccuguacugcaaggcccggugaggacuagucccuguucccagagcccacuuuuuuuucuuuuuuugaaauaaaauagccugucuuucagaucuaaaaaaaaaaaaaaaaaaaaaaaaaaaaaaaaaaaaaaaaaaaaaaaaaaaaaaaaaaaaaaaaugcaucccccccccccccccccccccccccccccccaaaggcucuuuucagagccaccagaauu

SEQ ID NO: 14344 - RNA, 1867 nt, Artificial Sequence
  mRNA product Design a-4 comprising derived and/or modified sequence from HRSV(Memphis-37)__AIY60640.1__F-del_DSCav1_mut1 (opt2)
gggagacuccugucgggcggaaguaggaggaguagaguuuaaaaacaguacucuuuuuccgguucgggacguaguugaagcaacgacaagccggauaaccgcucuugagacaggaagcuuaccauggagcuccccauccucaagaccaacgccaucaccaccauccucgccgccgucacccucugcuucgccuccucccagaacaucaccgaggaguucuaccaguccaccugcuccgccgucuccaagggcuaccucggcgcccuccgcaccggcugguacaccuccgucaucaccaucgagcucuccaacaucaaggagaacaagugcaacggcaccgacgccaaggucaagcucaucaagcaggagcucgacaaguacaagaacgccgucaccgagcuccagcuccucaugcaguccacccccgccgccggcuccggcuccgccaucugcuccggcaucgccgucugcaagguccuccaccucgagggcgaggucaacaagaucaagaacgcccuccucuccaccaacaaggccgucgucucccucuccaacggcgucuccguccucaccuucaagguccucgaccucaagaacuacaucgacaagcagcuccuccccauccucaacaagcaguccugcuccauccccaacaucgagaccgucaucgaguuccagcagaagaacaaccgccuccucgagaucacccgcgaguucuccgucaacgccggcgucaccacccccgucuccaccuacaugcucaccaacuccgagcuccucucccucaucaacgacaugcccaucaccaacgaccagaagaagcucauguccaacaacguccagaucguccgccagcaguccuacuccaucaugugcaucaucaaggaggagguccucgccuacgucguccagcucccccucuacggcgucaucgacacccccugcuggaagcuccacaccuccccccucugcaccaccaacaccaaggagggcuccaacaucugccucacccgcaccgaccgcggcugguacugcgacaacgccggcuccgucuccuucuucccccaggccgagaccugcaagguccaguccaaccgcgucuucugcgacaccaugaacucccucacccuccccuccgaggucaaccucugcaacaucgacaucuucaaccccaaguacgacugcaagaucaugaccuccaagaccgacgucuccuccuccgucaucaccucccucggcgccaucgucuccugcuacggcaagaccaagugcaccgccuccaacaagaaccgcggcaucaucaagaccuucuccaacggcugcgacuacgucuccaacaagggcgucgacaccgucuccgucggcaacacccucuacugcgucaacaagcaggagggccagucccucuacgucaagggcgagcccaucaucaacuucuacgacccccucgucuuccccuccgacgaguucgacgccuccaucucccaggucaacgagaagaucaaccagucccucgccuucauccgcaaguccgacgagcuccuccacaacgucaacgucggcaaguccaccaccaacaucaugaucaccaccaucaucaucgucaucaucgucauccuccuccuccucaucgccgucggccucuuccucuacugcaaggcccgcugaggacuagucccuguucccagagcccacuuuuuuuucuuuuuuugaaauaaaauagccugucuuucagaucuaaaaaaaaaaaaaaaaaaaaaaaaaaaaaaaaaaaaaaaaaaaaaaaaaaaaaaaaaaaaaaaaugcaucccccccccccccccccccccccccccccccaaaggcucuuuucagagccaccagaauu

SEQ ID NO: 14345 - RNA, 1867 nt, Artificial Sequence
  mRNA product Design a-4 comprising derived and/or modified sequence from HRSV(Memphis-37)__AIY60640.1__F-del_DSCav1_mut1 (opt3)
gggagacuccugucgggcggaaguaggaggaguagaguuuaaaaacaguacucuuuuuccgguucgggacguaguugaagcaacgacaagccggauaaccgcucuugagacaggaagcuuaccauggagcugcccauccucaagaccaacgccauuacaacuauacuugcugcagugacgcugugcuucgccagcucccagaauaucaccgaagaguuuuaccaaucuacauguucagcggucaguaaaggcuauuugggggcuuuaagaacuggaugguacaccagcguuauuacaaucgaacuguccaacauuaaggagaauaaaugcaacgguaccgacgccaaggugaaacuaaucaagcaggaacucgauaaguauaaaaaugcaguaacugagcugcagcuucugaugcagucuacuccugccgcuggcucggggucagcaauauguagcggaaucgccgugugcaaggucuugcaccucgagggcgaagugaacaaaauuaagaaugcucugcugaguaccaacaaagccguugugucccucucuaauggugucagcguguuaacguucaagguacuggaccuuaagaacuacaucgauaaacaauugcugccaauucuaaauaagcaguccuguucaaucccgaacauagagacuguuauugaauuucagcagaaaaauaacaggcuccuggagaucacccgggaguucagugugaaugcgggggucacaacucccgugagcaccuauaugcuuacaaacucugaacuguugucccucauuaacgacaugccuaucaccaaugaucaaaagaaacugaugucaaacaaugugcagaucguccgccagcagagcuacaguauuaugugcauaaucaaggaggaaguuuuagcauaugugguacaacugccacucuacggagugauugacacgcccuguuggaaacuucauacuucuccucugugcacaaccaacacuaaggagggcuccaauaucuguuugacacgaaccgaucguggcugguacugcgacaacgccgggagcgucucguuuuucccacaggcugaaacguguaaggugcagucuaauagaguguuuugcgauaccaugaacucccuaacacugcccucagagguuaaucucugcaacauagacauuuucaauccuaaauaugauuguaagaucaugacaaguaaaaccgacgucagcuccucugugaucacaagccugggagccauuguaucaugcuacgguaagacuaaauguaccgcaaguaacaagaauaggggcaucauuaagacauuuuccaacgggugcgauuauguuagcaauaaaggaguggacaccgucucugugggcaacacucuuuacugugucaacaagcaagagggucagucacuguaugugaaaggggaaccaauaaucaauuucuacgacccguugguuuuucccagugaugaguucgacgcuagcauuucccaggugaacgaaaagaucaaucagucucucgccuuuauccggaaaucggaugagcuguuacacaacguaaaugucggaaagagcacgacaaacauuaugauaaccacuaucauuaucgugauuaucguuauacugcuacuccugaucgcggugggccuuuucuuguauugcaaggcccgcugaggacuagucccuguucccagagcccacuuuuuuuucuuuuuuugaaauaaaauagccugucuuucagaucuaaaaaaaaaaaaaaaaaaaaaaaaaaaaaaaaaaaaaaaaaaaaaaaaaaaaaaaaaaaaaaaaugcaucccccccccccccccccccccccccccccccaaaggcucuuuucagagccaccagaauu

SEQ ID NO: 14346 - RNA, 1867 nt, Artificial Sequence
  mRNA product Design a-4 comprising derived and/or modified sequence from HRSV(Memphis-37)__AIY60640.1__F-del_DSCav1_mut1 (opt4)
gggagacuccugucgggcggaaguaggaggaguagaguuuaaaaacaguacucuuuuuccgguucgggacguaguugaagcaacgacaagccggauaaccgcucuugagacaggaagcuuaccauggagcugcccauccugaagaccaacgccaucaccaccauccuggccgccgugacccugugcuucgccagcagccagaacaucaccgaggaguucuaccagagcaccugcagcgccgugagcaagggcuaccugggcgcccugagaaccggcugguacaccagcgugaucaccaucgagcugagcaacaucaaggagaacaagugcaacggcaccgacgccaaggugaagcugaucaagcaggagcuggacaaguacaagaacgccgugaccgagcugcagcugcugaugcagagcacccccgccgccggcagcggcagcgccaucugcagcggcaucgccgugugcaaggugcugcaccuggagggcgaggugaacaagaucaagaacgcccugcugagcaccaacaaggccguggugagccugagcaacggcgugagcgugcugaccuucaaggugcuggaccugaagaacuacaucgacaagcagcugcugcccauccugaacaagcagagcugcagcauccccaacaucgagaccgugaucgaguuccagcagaagaacaacagacugcuggagaucaccagagaguucagcgugaacgccggcgugaccacccccgugagcaccuacaugcugaccaacagcgagcugcugagccugaucaacgacaugcccaucaccaacgaccagaagaagcugaugagcaacaacgugcagaucgugagacagcagagcuacagcaucaugugcaucaucaaggaggaggugcuggccuacguggugcagcugccccuguacggcgugaucgacacccccugcuggaagcugcacaccagcccccugugcaccaccaacaccaaggagggcagcaacaucugccugaccagaaccgacagaggcugguacugcgacaacgccggcagcgugagcuucuucccccaggccgagaccugcaaggugcagagcaacagaguguucugcgacaccaugaacagccugacccugcccagcgaggugaaccugugcaacaucgacaucuucaaccccaaguacgacugcaagaucaugaccagcaagaccgacgugagcagcagcgugaucaccagccugggcgccaucgugagcugcuacggcaagaccaagugcaccgccagcaacaagaacagaggcaucaucaagaccuucagcaacggcugcgacuacgugagcaacaagggcguggacaccgugagcgugggcaacacccuguacugcgugaacaagcaggagggccagagccuguacgugaagggcgagcccaucaucaacuucuacgacccccugguguuccccagcgacgaguucgacgccagcaucagccaggugaacgagaagaucaaccagagccuggccuucaucagaaagagcgacgagcugcugcacaacgugaacgugggcaagagcaccaccaacaucaugaucaccaccaucaucaucgugaucaucgugauccugcugcugcugaucgccgugggccuguuccuguacugcaaggccagaugaggacuagucccuguucccagagcccacuuuuuuuucuuuuuuugaaauaaaauagccugucuuucagaucuaaaaaaaaaaaaaaaaaaaaaaaaaaaaaaaaaaaaaaaaaaaaaaaaaaaaaaaaaaaaaaaaugcaucccccccccccccccccccccccccccccccaaaggcucuuuucagagccaccagaauu

SEQ ID NO: 14347 - RNA, 1867 nt, Artificial Sequence
  mRNA product Design a-4 comprising derived and/or modified sequence from HRSV(Memphis-37)__AIY60640.1__F-del_DSCav1_mut1 (opt5)
gggagacuccugucgggcggaaguaggaggaguagaguuuaaaaacaguacucuuuuuccgguucgggacguaguugaagcaacgacaagccggauaaccgcucuugagacaggaagcuuaccauggagcugcccauccucaagaccaacgccauuacaacgauccuggcugccgugacccuuugcuucgcgagcucccagaauauuacagaagaguuuuaccaaucuaccuguagcgcugucuccaaaggcuaucugggggcccucagaacaggaugguacaccucuguuaucacaauugaacugagcaacaucaaggagaauaaaugcaacggcaccgacgccaaggugaaacuuaucaagcaggaacuggauaaguauaaaaaugcugugacggagcuccagcugcugaugcaguccaccccugccgcugggucuggaagcgccauuuguuccggcaucgcggucugcaaggugcuccaccuggagggggaaguuaacaaaauuaagaaugcccuucugagcacaaacaaagcuguggucucucucuccaauggagugagcguucugaccuucaaggugcuugaccugaagaacuacaucgauaaacaacuccugccgauucugaauaagcagucuuguuccauccccaacauugagacagucaucgaauuucagcagaaaaauaaccggcuccuggagaucacccgcgaguucagcgugaaugccggcgugacgacaccugucucuaccuauaugcuuacaaacuccgaacugcucagccugauuaacgacaugcccaucaccaaugaucaaaagaaacuuauguccaacaauguucagauugugagacagcagucuuacagcaucaugugcauuaucaaggaggaagugcuggcuuaugucgugcaacucccucuguacggcguuaucgacacccccuguuggaaacugcauacauccccucucugcacgaccaacacaaaggaggggagcaauauuugucugacccggacagaucgcggaugguacugcgacaacgccggcucuguguccuuuuucccgcaggcggaaaccuguaagguccagagcaauagaguguuuugcgauacgaugaacucucuuacacugcccagcgagguuaaucucugcaacaucgacauuuucaauccuaaauaugauuguaagaucaugaccuccaaaaccgacgugucuagcuccgucauuacaagccugggggccaucgugucuugcuacggaaagaccaaauguacagcuuccaacaagaaucggggcaucauuaagacguuuagcaacgggugcgauuaugucucuaauaaaggaguggacaccguuuccgugggcaacacacuuuacugugucaacaagcaagagggccagagccuguaugugaaaggggaacccaucauuaauuucuacgacccucucguuuuucccuccgaugaguucgacgccucuaucagccaggugaacgaaaagauuaaucagucccuggcuuuuauccgcaaaucugaugagcugcuccacaacgucaaugugggaaagagcaccacaaacauuaugaucaccacgaucauuaucgugauuaucguuauucugcuucugcucaucgccgucggccuguuccuguauugcaaggccagaugaggacuagucccuguucccagagcccacuuuuuuuucuuuuuuugaaauaaaauagccugucuuucagaucuaaaaaaaaaaaaaaaaaaaaaaaaaaaaaaaaaaaaaaaaaaaaaaaaaaaaaaaaaaaaaaaaugcaucccccccccccccccccccccccccccccccaaaggcucuuuucagagccaccagaauu

SEQ ID NO: 14348 - RNA, 1867 nt, Artificial Sequence
  mRNA product Design a-4 comprising derived and/or modified sequence from HRSV(Memphis-37)__AIY60640.1__F-del_DSCav1_mut1 (opt6)
gggagacuccugucgggcggaaguaggaggaguagaguuuaaaaacaguacucuuuuuccgguucgggacguaguugaagcaacgacaagccggauaaccgcucuugagacaggaagcuuaccauggaauuaccaauacuaaaaacaaacgcaauaacaacaauucuagcagcaguaacauuaugcuuugcaucaucccaaaacaucacagaagaauuuuaucaaucaaccugcucagcaguuuccaaaggauacuuaggagcauuaagaacugguugguacacuucaguaaucaccaucgaacucucaaacaucaaggaaaacaaaugcaacggaacagacgcaaaaguuaaacucauaaaacaagaacuugacaaauacaaaaacgccguaacagaacuacaacuucucaugcaaucaacacccgcagcaggauccggaucagccauaugcucaggcauagcaguauguaaaguauuacaucuugaaggugaaguaaacaaaauaaaaaacgcacuucuaucaaccaacaaagcaguaguaucacuaucaaacggaguauccgucuuaacauuuaaaguucuagaccucaaaaacuauauagacaaacaauuacugccaauccucaauaaacaaucaugcucaauaccaaacaucgaaacaguaauagaauuucaacaaaaaaacaacagacuacuagaaauaacaagagaauuuuccgucaacgccggcguaacuacuccaguaucaacauauaugcuaaccaacucagaacuccuaucccucauaaacgacaugccaauaacuaaugaucaaaaaaaacuaaugucaaacaauguacaaauaguuagacaacaaucauacucaaucaugugcauaauaaaagaagaaguacuagcauacgucguccaacuaccccuauacggaguaauagacacaccuugcuggaaacuacacacaucaccccuaugcacaacaaauacaaaagaagguuccaacaucugccuaacaagaacugauagaggaugguacugcgacaacgccggaucaguaucauucuucccucaagcugaaaccugcaaaguacaaucaaacagaguauuuugcgauacaaugaacucccuaacacuucccucagaaguuaaucuuuguaauauagauauauucaacccaaaauacgacugcaaaauaaugacaaguaaaacagacguauccucaucuguaauuacaucacuaggagccauaguaucuugcuacggcaaaaccaaaugcacagcaucaaacaaaaacagagguauuaucaaaaccuucucaaacggaugugacuacguuucaaacaaaggaguagacacaguaucagucggaaacacccuauacuguguuaacaaacaagaaggacaaucacuguacguaaaaggagaacccauaauaaauuucuacgacccacuuguauuuccaucagacgaauuugaugcaucaaucucacaaguaaaugaaaaaauaaaccaaucauuagcauucauaagaaaaucugacgaguuacuacacaacguaaauguuggcaaaucaacaaccaauauaaugauaacaacaauaauaauaguaauaauagucauauuacuccuccucauagccgucggauuauucuuauacugcaaagcaagauaaggacuagucccuguucccagagcccacuuuuuuuucuuuuuuugaaauaaaauagccugucuuucagaucuaaaaaaaaaaaaaaaaaaaaaaaaaaaaaaaaaaaaaaaaaaaaaaaaaaaaaaaaaaaaaaaaugcaucccccccccccccccccccccccccccccccaaaggcucuuuucagagccaccagaauu

SEQ ID NO: 14349 - RNA, 1867 nt, Artificial Sequence
  mRNA product Design a-4 comprising derived and/or modified sequence from HRSV(Memphis-37)__AIY60640.1__F-del_DSCav1_mut1 (opt11)
gggagacuccugucgggcggaaguaggaggaguagaguuuaaaaacaguacucuuuuuccgguucgggacguaguugaagcaacgacaagccggauaaccgcucuugagacaggaagcuuaccauggaacuccccauacuaaaaaccaacgccaucacaacaauccucgccgccgucacacucugcuucgccagcucccaaaacaucaccgaagaguucuaucaaucaaccugcuccgcagucucaaagggauaccucggagcccuccgcaccggaugguacacuuccgucaucacaauagaacucuccaacaucaaagaaaacaaaugcaacggcaccgacgcaaaagucaagcucaucaaacaagaacucgacaaauauaaaaacgccgucaccgaacuccaacuacucaugcaauccacacccgcggccggcucaggcagcgccaucugcucaggcaucgccgucugcaaaguccuccaccucgaaggcgaagucaacaaaaucaaaaacgcccuucuuucaaccaacaaggcaguaguaucccucucaaacggcgucagcguccugaccuucaaaguccuagaccucaaaaacuacauagauaaacaacuccuccccauacugaacaaacaaucgugcuccauccccaauaucgaaaccgucauagaguuccagcagaaaaacaacagacuucucgaaauaacccgagaguucucaguaaacgccggagucaccacacccguaagcaccuacaugcucacaaacucagaacuccuaucccucaucaacgacaugcccaucaccaacgaccagaaaaagcuaauguccaacaacguccaaauaguacgccaacaaagcuacucgauaaugugcaucaucaaggaagaaguacucgccuacgucguccaacucccccucuacggcguaaucgacacacccugcuggaaacuccacacguccccacucugcacaacaaacacaaaagaaggauccaacauaugccuaacccgcaccgacaggggcugguacugcgacaacgcaggcucagucagcuucuuuccccaagccgaaacaugcaaaguccaauccaaccgugucuucugcgacaccaugaacucgcucacccuacccucggaagucaaucucugcaacaucgacaucuucaacccaaaauacgacuguaaaaucaugaccagcaaaacagacguuucuuccagcgucaucacaucacucggcgcgaucguaucaugcuauggcaaaacaaagugcaccgcuagcaauaaaaaccgaggaaucauaaaaaccuucagcaacggcugcgacuacguauccaacaaaggcgucgacaccguauccgucggaaacacccucuacugcgucaacaagcaagaaggacaaucacucuacgucaaaggcgaaccaaucauaaacuucuacgacccacucguauuccccucagacgaguucgacgcauccaucucccaagucaacgaaaagaucaaccaaucucucgccuuuauacgcaaaagcgacgaacuccuucacaacguaaacgucggcaaaagcaccacuaacauaaugaucaccacaaucauaauaguaaucaucguaauacuccuccuacucaucgccgugggccuauuccucuauugcaaagcccgauaaggacuagucccuguucccagagcccacuuuuuuuucuuuuuuugaaauaaaauagccugucuuucagaucuaaaaaaaaaaaaaaaaaaaaaaaaaaaaaaaaaaaaaaaaaaaaaaaaaaaaaaaaaaaaaaaaugcaucccccccccccccccccccccccccccccccaaaggcucuuuucagagccaccagaauu

SEQ ID NO: 14350 - RNA, 1813 nt, Artificial Sequence
  mRNA product Design a-5 comprising derived and/or modified sequence from HRSV(Memphis-37)__AIY60640.1__F-del_DSCav1_mut1 (opt1)
gggagacuuucccauucuguagcagaauuugguguugccuguggucuuggucccgcggagaagcuuaccauggagcugcccauccucaagaccaacgccaucaccacgauccuggccgcggugacccugugcuucgccagcucccagaacaucaccgaggaguucuaccagagcacgugcuccgccgucagcaagggcuaccucggcgcccugcgcaccgggugguacaccagcgugaucaccaucgagcuguccaacaucaaggagaacaagugcaacggcaccgacgccaaggugaagcucaucaagcaggagcuggacaaguacaagaacgcggucacggagcugcagcuccugaugcagagcaccccggccgccggcuccgggagcgcgaucugcuccggcaucgccgucugcaaggugcugcaccucgagggcgaggugaacaagaucaagaacgcccugcuguccaccaacaaggccgucgugagccucuccaacggggugagcguccugaccuucaaggugcuggaccucaagaacuacaucgacaagcagcugcugcccauccugaacaagcagagcugcuccauccccaacaucgagaccgucaucgaguuccagcagaagaacaaccgccuccuggagaucacgcgggaguucagcgugaacgcgggcgugaccacccccgucuccaccuacaugcugacgaacagcgagcuccugucccugaucaacgacaugccgaucaccaacgaccagaagaagcucaugagcaacaacgugcagaucgugcgccagcaguccuacagcaucaugugcaucaucaaggaggagguccuggccuacguggugcagcugccccucuacggggucaucgacacccccugcuggaagcugcacaccagcccccugugcacgaccaacaccaaggagggcuccaacaucugccucacccggacggaccgcgggugguacugcgacaacgccggcagcguguccuucuucccgcaggccgagaccugcaagguccagagcaaccggguguucugcgacaccaugaacucccugacccugcccagcgaggugaaccucugcaacaucgacaucuucaaccccaaguacgacugcaagaucaugacguccaagaccgacgucagcuccagcgugaucaccucccugggcgccaucgugagcugcuacgggaagaccaagugcacggcgagcaacaagaaccgcggcaucaucaagaccuucuccaacgggugcgacuacgucagcaacaagggcguggacaccguguccgucggcaacacccuguacugcgugaacaagcaggagggccagagccucuacgugaagggggagcccaucaucaacuucuacgacccgcuggucuuccccuccgacgaguucgacgccagcaucucccaggugaacgagaagaucaaccagagccuggccuucauccggaaguccgacgagcuccugcacaacgugaacgucggcaagagcaccacgaacaucaugaucaccaccaucaucaucgugaucaucgugauccugcugcuccugaucgccgucgggcuguuccucuacugcaaggcccgcugaggacuagucccuguucccagagcccacuuuuuuuucuuuuuuugaaauaaaauagccugucuuucagaucuaaaaaaaaaaaaaaaaaaaaaaaaaaaaaaaaaaaaaaaaaaaaaaaaaaaaaaaaaaaaaaaaugcaucccccccccccccccccccccccccccccccaaaggcucuuuucagagccaccagaauu

SEQ ID NO: 14351 - RNA, 1813 nt, Artificial Sequence
  mRNA product Design a-5 comprising derived and/or modified sequence from HRSV(Memphis-37)__AIY60640.1__F-del_DSCav1_mut1 (opt1)
gggagacuuucccauucuguagcagaauuugguguugccuguggucuuggucccgcggagaagcuuaccauggagcugcccauccucaagaccaacgccaucaccacgauccuggccgcggugacccugugcuucgccagcucccagaacaucaccgaggaguucuaccagagcacgugcuccgccgucagcaagggcuaccucggggcccugcgcaccggcugguacaccuccgugaucaccaucgagcugagcaacaucaaggagaacaagugcaacgggaccgacgccaaggugaagcucaucaagcaggagcuggacaaguacaagaacgcggucacggagcugcagcuccugaugcaguccaccccggccgccggcagcggguccgccaucugcagcggcaucgcggugugcaaggugcugcaccucgagggcgaggucaacaagaucaagaacgcccugcuguccaccaacaaggccguggugagccucuccaacggggucagcgugcugaccuucaaggugcuggaccucaagaacuacaucgacaagcagcugcugcccauccucaacaagcaguccugcagcauccccaacaucgagacggucaucgaguuccagcagaagaacaaccggcugcuggagaucacccgcgaguucuccgugaacgccggcgugaccacccccgucagcacguacaugcucaccaacuccgagcugcugagccucaucaacgacaugccgaucaccaacgaccagaagaagcugaugagcaacaacgugcagaucgugcggcagcaguccuacagcaucaugugcaucaucaaggaggagguccuggccuacguggugcagcucccccuguacggggucaucgacacccccugcuggaagcugcacacgagcccccucugcaccaccaacaccaaggagggcuccaacaucugccugacgcgcaccgaccgggggugguacugcgacaacgcgggcuccgugagcuucuucccgcaggccgagaccugcaaggugcaguccaaccgcgucuucugcgacaccaugaacagccugacgcuccccuccgaggugaaccugugcaacaucgacaucuucaaccccaaguacgacugcaagaucaugaccagcaagaccgacgucuccagcuccgugaucaccagccugggcgccaucguguccugcuacgggaagacgaagugcaccgccagcaacaagaaccggggcaucaucaagaccuucuccaacgggugcgacuacgucagcaacaagggcguggacaccguguccgucggcaacacgcucuacugcgugaacaagcaggaggggcagagccuguacgugaagggcgagcccaucaucaacuucuacgacccgcuggucuuccccagcgacgaguucgacgccuccaucagccaggugaacgagaagaucaaccagucccucgcguucauccgcaagagcgacgagcugcugcacaacgugaacgucgggaaguccaccaccaacaucaugaucaccaccaucaucaucgugaucaucgugauccuccugcugcucaucgccgucggccuguuccuguacugcaaggcccggugaggacuagucccuguucccagagcccacuuuuuuuucuuuuuuugaaauaaaauagccugucuuucagaucuaaaaaaaaaaaaaaaaaaaaaaaaaaaaaaaaaaaaaaaaaaaaaaaaaaaaaaaaaaaaaaaaugcaucccccccccccccccccccccccccccccccaaaggcucuuuucagagccaccagaauu

SEQ ID NO: 14352 - RNA, 1813 nt, Artificial Sequence
  mRNA product Design a-5 comprising derived and/or modified sequence from HRSV(Memphis-37)__AIY60640.1__F-del_DSCav1_mut1 (opt2)
gggagacuuucccauucuguagcagaauuugguguugccuguggucuuggucccgcggagaagcuuaccauggagcuccccauccucaagaccaacgccaucaccaccauccucgccgccgucacccucugcuucgccuccucccagaacaucaccgaggaguucuaccaguccaccugcuccgccgucuccaagggcuaccucggcgcccuccgcaccggcugguacaccuccgucaucaccaucgagcucuccaacaucaaggagaacaagugcaacggcaccgacgccaaggucaagcucaucaagcaggagcucgacaaguacaagaacgccgucaccgagcuccagcuccucaugcaguccacccccgccgccggcuccggcuccgccaucugcuccggcaucgccgucugcaagguccuccaccucgagggcgaggucaacaagaucaagaacgcccuccucuccaccaacaaggccgucgucucccucuccaacggcgucuccguccucaccuucaagguccucgaccucaagaacuacaucgacaagcagcuccuccccauccucaacaagcaguccugcuccauccccaacaucgagaccgucaucgaguuccagcagaagaacaaccgccuccucgagaucacccgcgaguucuccgucaacgccggcgucaccacccccgucuccaccuacaugcucaccaacuccgagcuccucucccucaucaacgacaugcccaucaccaacgaccagaagaagcucauguccaacaacguccagaucguccgccagcaguccuacuccaucaugugcaucaucaaggaggagguccucgccuacgucguccagcucccccucuacggcgucaucgacacccccugcuggaagcuccacaccuccccccucugcaccaccaacaccaaggagggcuccaacaucugccucacccgcaccgaccgcggcugguacugcgacaacgccggcuccgucuccuucuucccccaggccgagaccugcaagguccaguccaaccgcgucuucugcgacaccaugaacucccucacccuccccuccgaggucaaccucugcaacaucgacaucuucaaccccaaguacgacugcaagaucaugaccuccaagaccgacgucuccuccuccgucaucaccucccucggcgccaucgucuccugcuacggcaagaccaagugcaccgccuccaacaagaaccgcggcaucaucaagaccuucuccaacggcugcgacuacgucuccaacaagggcgucgacaccgucuccgucggcaacacccucuacugcgucaacaagcaggagggccagucccucuacgucaagggcgagcccaucaucaacuucuacgacccccucgucuuccccuccgacgaguucgacgccuccaucucccaggucaacgagaagaucaaccagucccucgccuucauccgcaaguccgacgagcuccuccacaacgucaacgucggcaaguccaccaccaacaucaugaucaccaccaucaucaucgucaucaucgucauccuccuccuccucaucgccgucggccucuuccucuacugcaaggcccgcugaggacuagucccuguucccagagcccacuuuuuuuucuuuuuuugaaauaaaauagccugucuuucagaucuaaaaaaaaaaaaaaaaaaaaaaaaaaaaaaaaaaaaaaaaaaaaaaaaaaaaaaaaaaaaaaaaugcaucccccccccccccccccccccccccccccccaaaggcucuuuucagagccaccagaauu

SEQ ID NO: 14353 - RNA, 1813 nt, Artificial Sequence
  mRNA product Design a-5 comprising derived and/or modified sequence from HRSV(Memphis-37)__AIY60640.1__F-del_DSCav1_mut1 (opt3)
gggagacuuucccauucuguagcagaauuugguguugccuguggucuuggucccgcggagaagcuuaccauggagcugcccauccucaagaccaacgccauuacaacuauacuugcugcagugacgcugugcuucgccagcucccagaauaucaccgaagaguuuuaccaaucuacauguucagcggucaguaaaggcuauuugggggcuuuaagaacuggaugguacaccagcguuauuacaaucgaacuguccaacauuaaggagaauaaaugcaacgguaccgacgccaaggugaaacuaaucaagcaggaacucgauaaguauaaaaaugcaguaacugagcugcagcuucugaugcagucuacuccugccgcuggcucggggucagcaauauguagcggaaucgccgugugcaaggucuugcaccucgagggcgaagugaacaaaauuaagaaugcucugcugaguaccaacaaagccguugugucccucucuaauggugucagcguguuaacguucaagguacuggaccuuaagaacuacaucgauaaacaauugcugccaauucuaaauaagcaguccuguucaaucccgaacauagagacuguuauugaauuucagcagaaaaauaacaggcuccuggagaucacccgggaguucagugugaaugcgggggucacaacucccgugagcaccuauaugcuuacaaacucugaacuguugucccucauuaacgacaugccuaucaccaaugaucaaaagaaacugaugucaaacaaugugcagaucguccgccagcagagcuacaguauuaugugcauaaucaaggaggaaguuuuagcauaugugguacaacugccacucuacggagugauugacacgcccuguuggaaacuucauacuucuccucugugcacaaccaacacuaaggagggcuccaauaucuguuugacacgaaccgaucguggcugguacugcgacaacgccgggagcgucucguuuuucccacaggcugaaacguguaaggugcagucuaauagaguguuuugcgauaccaugaacucccuaacacugcccucagagguuaaucucugcaacauagacauuuucaauccuaaauaugauuguaagaucaugacaaguaaaaccgacgucagcuccucugugaucacaagccugggagccauuguaucaugcuacgguaagacuaaauguaccgcaaguaacaagaauaggggcaucauuaagacauuuuccaacgggugcgauuauguuagcaauaaaggaguggacaccgucucugugggcaacacucuuuacugugucaacaagcaagagggucagucacuguaugugaaaggggaaccaauaaucaauuucuacgacccguugguuuuucccagugaugaguucgacgcuagcauuucccaggugaacgaaaagaucaaucagucucucgccuuuauccggaaaucggaugagcuguuacacaacguaaaugucggaaagagcacgacaaacauuaugauaaccacuaucauuaucgugauuaucguuauacugcuacuccugaucgcggugggccuuuucuuguauugcaaggcccgcugaggacuagucccuguucccagagcccacuuuuuuuucuuuuuuugaaauaaaauagccugucuuucagaucuaaaaaaaaaaaaaaaaaaaaaaaaaaaaaaaaaaaaaaaaaaaaaaaaaaaaaaaaaaaaaaaaugcaucccccccccccccccccccccccccccccccaaaggcucuuuucagagccaccagaauu

SEQ ID NO: 14354 - RNA, 1813 nt, Artificial Sequence
  mRNA product Design a-5 comprising derived and/or modified sequence from HRSV(Memphis-37)__AIY60640.1__F-del_DSCav1_mut1 (opt4)
gggagacuuucccauucuguagcagaauuugguguugccuguggucuuggucccgcggagaagcuuaccauggagcugcccauccugaagaccaacgccaucaccaccauccuggccgccgugacccugugcuucgccagcagccagaacaucaccgaggaguucuaccagagcaccugcagcgccgugagcaagggcuaccugggcgcccugagaaccggcugguacaccagcgugaucaccaucgagcugagcaacaucaaggagaacaagugcaacggcaccgacgccaaggugaagcugaucaagcaggagcuggacaaguacaagaacgccgugaccgagcugcagcugcugaugcagagcacccccgccgccggcagcggcagcgccaucugcagcggcaucgccgugugcaaggugcugcaccuggagggcgaggugaacaagaucaagaacgcccugcugagcaccaacaaggccguggugagccugagcaacggcgugagcgugcugaccuucaaggugcuggaccugaagaacuacaucgacaagcagcugcugcccauccugaacaagcagagcugcagcauccccaacaucgagaccgugaucgaguuccagcagaagaacaacagacugcuggagaucaccagagaguucagcgugaacgccggcgugaccacccccgugagcaccuacaugcugaccaacagcgagcugcugagccugaucaacgacaugcccaucaccaacgaccagaagaagcugaugagcaacaacgugcagaucgugagacagcagagcuacagcaucaugugcaucaucaaggaggaggugcuggccuacguggugcagcugccccuguacggcgugaucgacacccccugcuggaagcugcacaccagcccccugugcaccaccaacaccaaggagggcagcaacaucugccugaccagaaccgacagaggcugguacugcgacaacgccggcagcgugagcuucuucccccaggccgagaccugcaaggugcagagcaacagaguguucugcgacaccaugaacagccugacccugcccagcgaggugaaccugugcaacaucgacaucuucaaccccaaguacgacugcaagaucaugaccagcaagaccgacgugagcagcagcgugaucaccagccugggcgccaucgugagcugcuacggcaagaccaagugcaccgccagcaacaagaacagaggcaucaucaagaccuucagcaacggcugcgacuacgugagcaacaagggcguggacaccgugagcgugggcaacacccuguacugcgugaacaagcaggagggccagagccuguacgugaagggcgagcccaucaucaacuucuacgacccccugguguuccccagcgacgaguucgacgccagcaucagccaggugaacgagaagaucaaccagagccuggccuucaucagaaagagcgacgagcugcugcacaacgugaacgugggcaagagcaccaccaacaucaugaucaccaccaucaucaucgugaucaucgugauccugcugcugcugaucgccgugggccuguuccuguacugcaaggccagaugaggacuagucccuguucccagagcccacuuuuuuuucuuuuuuugaaauaaaauagccugucuuucagaucuaaaaaaaaaaaaaaaaaaaaaaaaaaaaaaaaaaaaaaaaaaaaaaaaaaaaaaaaaaaaaaaaugcaucccccccccccccccccccccccccccccccaaaggcucuuuucagagccaccagaauu

SEQ ID NO: 14355 - RNA, 1813 nt, Artificial Sequence
  mRNA product Design a-5 comprising derived and/or modified sequence from HRSV(Memphis-37)__AIY60640.1__F-del_DSCav1_mut1 (opt5)
gggagacuuucccauucuguagcagaauuugguguugccuguggucuuggucccgcggagaagcuuaccauggagcugcccauccucaagaccaacgccauuacaacgauccuggcugccgugacccuuugcuucgcgagcucccagaauauuacagaagaguuuuaccaaucuaccuguagcgcugucuccaaaggcuaucugggggcccucagaacaggaugguacaccucuguuaucacaauugaacugagcaacaucaaggagaauaaaugcaacggcaccgacgccaaggugaaacuuaucaagcaggaacuggauaaguauaaaaaugcugugacggagcuccagcugcugaugcaguccaccccugccgcugggucuggaagcgccauuuguuccggcaucgcggucugcaaggugcuccaccuggagggggaaguuaacaaaauuaagaaugcccuucugagcacaaacaaagcuguggucucucucuccaauggagugagcguucugaccuucaaggugcuugaccugaagaacuacaucgauaaacaacuccugccgauucugaauaagcagucuuguuccauccccaacauugagacagucaucgaauuucagcagaaaaauaaccggcuccuggagaucacccgcgaguucagcgugaaugccggcgugacgacaccugucucuaccuauaugcuuacaaacuccgaacugcucagccugauuaacgacaugcccaucaccaaugaucaaaagaaacuuauguccaacaauguucagauugugagacagcagucuuacagcaucaugugcauuaucaaggaggaagugcuggcuuaugucgugcaacucccucuguacggcguuaucgacacccccuguuggaaacugcauacauccccucucugcacgaccaacacaaaggaggggagcaauauuugucugacccggacagaucgcggaugguacugcgacaacgccggcucuguguccuuuuucccgcaggcggaaaccuguaagguccagagcaauagaguguuuugcgauacgaugaacucucuuacacugcccagcgagguuaaucucugcaacaucgacauuuucaauccuaaauaugauuguaagaucaugaccuccaaaaccgacgugucuagcuccgucauuacaagccugggggccaucgugucuugcuacggaaagaccaaauguacagcuuccaacaagaaucggggcaucauuaagacguuuagcaacgggugcgauuaugucucuaauaaaggaguggacaccguuuccgugggcaacacacuuuacugugucaacaagcaagagggccagagccuguaugugaaaggggaacccaucauuaauuucuacgacccucucguuuuucccuccgaugaguucgacgccucuaucagccaggugaacgaaaagauuaaucagucccuggcuuuuauccgcaaaucugaugagcugcuccacaacgucaaugugggaaagagcaccacaaacauuaugaucaccacgaucauuaucgugauuaucguuauucugcuucugcucaucgccgucggccuguuccuguauugcaaggccagaugaggacuagucccuguucccagagcccacuuuuuuuucuuuuuuugaaauaaaauagccugucuuucagaucuaaaaaaaaaaaaaaaaaaaaaaaaaaaaaaaaaaaaaaaaaaaaaaaaaaaaaaaaaaaaaaaaugcaucccccccccccccccccccccccccccccccaaaggcucuuuucagagccaccagaauu

SEQ ID NO: 14356 - RNA, 1813 nt, Artificial Sequence
  mRNA product Design a-5 comprising derived and/or modified sequence from HRSV(Memphis-37)__AIY60640.1__F-del_DSCav1_mut1 (opt6)
gggagacuuucccauucuguagcagaauuugguguugccuguggucuuggucccgcggagaagcuuaccauggaauuaccaauacuaaaaacaaacgcaauaacaacaauucuagcagcaguaacauuaugcuuugcaucaucccaaaacaucacagaagaauuuuaucaaucaaccugcucagcaguuuccaaaggauacuuaggagcauuaagaacugguugguacacuucaguaaucaccaucgaacucucaaacaucaaggaaaacaaaugcaacggaacagacgcaaaaguuaaacucauaaaacaagaacuugacaaauacaaaaacgccguaacagaacuacaacuucucaugcaaucaacacccgcagcaggauccggaucagccauaugcucaggcauagcaguauguaaaguauuacaucuugaaggugaaguaaacaaaauaaaaaacgcacuucuaucaaccaacaaagcaguaguaucacuaucaaacggaguauccgucuuaacauuuaaaguucuagaccucaaaaacuauauagacaaacaauuacugccaauccucaauaaacaaucaugcucaauaccaaacaucgaaacaguaauagaauuucaacaaaaaaacaacagacuacuagaaauaacaagagaauuuuccgucaacgccggcguaacuacuccaguaucaacauauaugcuaaccaacucagaacuccuaucccucauaaacgacaugccaauaacuaaugaucaaaaaaaacuaaugucaaacaauguacaaauaguuagacaacaaucauacucaaucaugugcauaauaaaagaagaaguacuagcauacgucguccaacuaccccuauacggaguaauagacacaccuugcuggaaacuacacacaucaccccuaugcacaacaaauacaaaagaagguuccaacaucugccuaacaagaacugauagaggaugguacugcgacaacgccggaucaguaucauucuucccucaagcugaaaccugcaaaguacaaucaaacagaguauuuugcgauacaaugaacucccuaacacuucccucagaaguuaaucuuuguaauauagauauauucaacccaaaauacgacugcaaaauaaugacaaguaaaacagacguauccucaucuguaauuacaucacuaggagccauaguaucuugcuacggcaaaaccaaaugcacagcaucaaacaaaaacagagguauuaucaaaaccuucucaaacggaugugacuacguuucaaacaaaggaguagacacaguaucagucggaaacacccuauacuguguuaacaaacaagaaggacaaucacuguacguaaaaggagaacccauaauaaauuucuacgacccacuuguauuuccaucagacgaauuugaugcaucaaucucacaaguaaaugaaaaaauaaaccaaucauuagcauucauaagaaaaucugacgaguuacuacacaacguaaauguuggcaaaucaacaaccaauauaaugauaacaacaauaauaauaguaauaauagucauauuacuccuccucauagccgucggauuauucuuauacugcaaagcaagauaaggacuagucccuguucccagagcccacuuuuuuuucuuuuuuugaaauaaaauagccugucuuucagaucuaaaaaaaaaaaaaaaaaaaaaaaaaaaaaaaaaaaaaaaaaaaaaaaaaaaaaaaaaaaaaaaaugcaucccccccccccccccccccccccccccccccaaaggcucuuuucagagccaccagaauu

SEQ ID NO: 14357 - RNA, 1813 nt, Artificial Sequence
  mRNA product Design a-5 comprising derived and/or modified sequence from HRSV(Memphis-37)__AIY60640.1__F-del_DSCav1_mut1 (opt11)
gggagacuuucccauucuguagcagaauuugguguugccuguggucuuggucccgcggagaagcuuaccauggaacuccccauacuaaaaaccaacgccaucacaacaauccucgccgccgucacacucugcuucgccagcucccaaaacaucaccgaagaguucuaucaaucaaccugcuccgcagucucaaagggauaccucggagcccuccgcaccggaugguacacuuccgucaucacaauagaacucuccaacaucaaagaaaacaaaugcaacggcaccgacgcaaaagucaagcucaucaaacaagaacucgacaaauauaaaaacgccgucaccgaacuccaacuacucaugcaauccacacccgcggccggcucaggcagcgccaucugcucaggcaucgccgucugcaaaguccuccaccucgaaggcgaagucaacaaaaucaaaaacgcccuucuuucaaccaacaaggcaguaguaucccucucaaacggcgucagcguccugaccuucaaaguccuagaccucaaaaacuacauagauaaacaacuccuccccauacugaacaaacaaucgugcuccauccccaauaucgaaaccgucauagaguuccagcagaaaaacaacagacuucucgaaauaacccgagaguucucaguaaacgccggagucaccacacccguaagcaccuacaugcucacaaacucagaacuccuaucccucaucaacgacaugcccaucaccaacgaccagaaaaagcuaauguccaacaacguccaaauaguacgccaacaaagcuacucgauaaugugcaucaucaaggaagaaguacucgccuacgucguccaacucccccucuacggcguaaucgacacacccugcuggaaacuccacacguccccacucugcacaacaaacacaaaagaaggauccaacauaugccuaacccgcaccgacaggggcugguacugcgacaacgcaggcucagucagcuucuuuccccaagccgaaacaugcaaaguccaauccaaccgugucuucugcgacaccaugaacucgcucacccuacccucggaagucaaucucugcaacaucgacaucuucaacccaaaauacgacuguaaaaucaugaccagcaaaacagacguuucuuccagcgucaucacaucacucggcgcgaucguaucaugcuauggcaaaacaaagugcaccgcuagcaauaaaaaccgaggaaucauaaaaaccuucagcaacggcugcgacuacguauccaacaaaggcgucgacaccguauccgucggaaacacccucuacugcgucaacaagcaagaaggacaaucacucuacgucaaaggcgaaccaaucauaaacuucuacgacccacucguauuccccucagacgaguucgacgcauccaucucccaagucaacgaaaagaucaaccaaucucucgccuuuauacgcaaaagcgacgaacuccuucacaacguaaacgucggcaaaagcaccacuaacauaaugaucaccacaaucauaauaguaaucaucguaauacuccuccuacucaucgccgugggccuauuccucuauugcaaagcccgauaaggacuagucccuguucccagagcccacuuuuuuuucuuuuuuugaaauaaaauagccugucuuucagaucuaaaaaaaaaaaaaaaaaaaaaaaaaaaaaaaaaaaaaaaaaaaaaaaaaaaaaaaaaaaaaaaaugcaucccccccccccccccccccccccccccccccaaaggcucuuuucagagccaccagaauu

SEQ ID NO: 14358 - RNA, 1994 nt, Artificial Sequence
  mRNA product Design b-1 comprising derived and/or modified sequence from HRSV(Memphis-37)__AIY60640.1__F-del_DSCav1_mut1 (opt1)
gggagacggagacggccugcaggaccugcucucucagcccucagccgaggccuacgccgagccgagugcgcagccgacgaccgggaggagccgcagccuucaacucugagguacugugauccgcgcugcccgccgggccgccccaguccgcugcugcggcaccuccuucccucgcgcccucuucgcucgccagcgccuucccugugagccugcgucaccgcggccgccaagcuuaccauggagcugcccauccucaagaccaacgccaucaccacgauccuggccgcggugacccugugcuucgccagcucccagaacaucaccgaggaguucuaccagagcacgugcuccgccgucagcaagggcuaccucggcgcccugcgcaccgggugguacaccagcgugaucaccaucgagcuguccaacaucaaggagaacaagugcaacggcaccgacgccaaggugaagcucaucaagcaggagcuggacaaguacaagaacgcggucacggagcugcagcuccugaugcagagcaccccggccgccggcuccgggagcgcgaucugcuccggcaucgccgucugcaaggugcugcaccucgagggcgaggugaacaagaucaagaacgcccugcuguccaccaacaaggccgucgugagccucuccaacggggugagcguccugaccuucaaggugcuggaccucaagaacuacaucgacaagcagcugcugcccauccugaacaagcagagcugcuccauccccaacaucgagaccgucaucgaguuccagcagaagaacaaccgccuccuggagaucacgcgggaguucagcgugaacgcgggcgugaccacccccgucuccaccuacaugcugacgaacagcgagcuccugucccugaucaacgacaugccgaucaccaacgaccagaagaagcucaugagcaacaacgugcagaucgugcgccagcaguccuacagcaucaugugcaucaucaaggaggagguccuggccuacguggugcagcugccccucuacggggucaucgacacccccugcuggaagcugcacaccagcccccugugcacgaccaacaccaaggagggcuccaacaucugccucacccggacggaccgcgggugguacugcgacaacgccggcagcguguccuucuucccgcaggccgagaccugcaagguccagagcaaccggguguucugcgacaccaugaacucccugacccugcccagcgaggugaaccucugcaacaucgacaucuucaaccccaaguacgacugcaagaucaugacguccaagaccgacgucagcuccagcgugaucaccucccugggcgccaucgugagcugcuacgggaagaccaagugcacggcgagcaacaagaaccgcggcaucaucaagaccuucuccaacgggugcgacuacgucagcaacaagggcguggacaccguguccgucggcaacacccuguacugcgugaacaagcaggagggccagagccucuacgugaagggggagcccaucaucaacuucuacgacccgcuggucuuccccuccgacgaguucgacgccagcaucucccaggugaacgagaagaucaaccagagccuggccuucauccggaaguccgacgagcuccugcacaacgugaacgucggcaagagcaccacgaacaucaugaucaccaccaucaucaucgugaucaucgugauccugcugcuccugaucgccgucgggcuguuccucuacugcaaggcccgcugaggacuaguguccaccugucccuccugggcugcuggauugucucguuuuccugccaaauaaacaggaucagcgcuuuacagaucuaaaaaaaaaaaaaaaaaaaaaaaaaaaaaaaaaaaaaaaaaaaaaaaaaaaaaaaaaaaaaaaaugcaucccccccccccccccccccccccccccccccaaaggcucuuuucagagccaccagaauu

SEQ ID NO: 14359 - RNA, 1994 nt, Artificial Sequence
  mRNA product Design b-1 comprising derived and/or modified sequence from HRSV(Memphis-37)__AIY60640.1__F-del_DSCav1_mut1 (opt1)
gggagacggagacggccugcaggaccugcucucucagcccucagccgaggccuacgccgagccgagugcgcagccgacgaccgggaggagccgcagccuucaacucugagguacugugauccgcgcugcccgccgggccgccccaguccgcugcugcggcaccuccuucccucgcgcccucuucgcucgccagcgccuucccugugagccugcgucaccgcggccgccaagcuuaccauggagcugcccauccucaagaccaacgccaucaccacgauccuggccgcggugacccugugcuucgccagcucccagaacaucaccgaggaguucuaccagagcacgugcuccgccgucagcaagggcuaccucggggcccugcgcaccggcugguacaccuccgugaucaccaucgagcugagcaacaucaaggagaacaagugcaacgggaccgacgccaaggugaagcucaucaagcaggagcuggacaaguacaagaacgcggucacggagcugcagcuccugaugcaguccaccccggccgccggcagcggguccgccaucugcagcggcaucgcggugugcaaggugcugcaccucgagggcgaggucaacaagaucaagaacgcccugcuguccaccaacaaggccguggugagccucuccaacggggucagcgugcugaccuucaaggugcuggaccucaagaacuacaucgacaagcagcugcugcccauccucaacaagcaguccugcagcauccccaacaucgagacggucaucgaguuccagcagaagaacaaccggcugcuggagaucacccgcgaguucuccgugaacgccggcgugaccacccccgucagcacguacaugcucaccaacuccgagcugcugagccucaucaacgacaugccgaucaccaacgaccagaagaagcugaugagcaacaacgugcagaucgugcggcagcaguccuacagcaucaugugcaucaucaaggaggagguccuggccuacguggugcagcucccccuguacggggucaucgacacccccugcuggaagcugcacacgagcccccucugcaccaccaacaccaaggagggcuccaacaucugccugacgcgcaccgaccgggggugguacugcgacaacgcgggcuccgugagcuucuucccgcaggccgagaccugcaaggugcaguccaaccgcgucuucugcgacaccaugaacagccugacgcuccccuccgaggugaaccugugcaacaucgacaucuucaaccccaaguacgacugcaagaucaugaccagcaagaccgacgucuccagcuccgugaucaccagccugggcgccaucguguccugcuacgggaagacgaagugcaccgccagcaacaagaaccggggcaucaucaagaccuucuccaacgggugcgacuacgucagcaacaagggcguggacaccguguccgucggcaacacgcucuacugcgugaacaagcaggaggggcagagccuguacgugaagggcgagcccaucaucaacuucuacgacccgcuggucuuccccagcgacgaguucgacgccuccaucagccaggugaacgagaagaucaaccagucccucgcguucauccgcaagagcgacgagcugcugcacaacgugaacgucgggaaguccaccaccaacaucaugaucaccaccaucaucaucgugaucaucgugauccuccugcugcucaucgccgucggccuguuccuguacugcaaggcccggugaggacuaguguccaccugucccuccugggcugcuggauugucucguuuuccugccaaauaaacaggaucagcgcuuuacagaucuaaaaaaaaaaaaaaaaaaaaaaaaaaaaaaaaaaaaaaaaaaaaaaaaaaaaaaaaaaaaaaaaugcaucccccccccccccccccccccccccccccccaaaggcucuuuucagagccaccagaauu

SEQ ID NO: 14360 - RNA, 1994 nt, Artificial Sequence
  mRNA product Design b-1 comprising derived and/or modified sequence from HRSV(Memphis-37)__AIY60640.1__F-del_DSCav1_mut1 (opt2)
gggagacggagacggccugcaggaccugcucucucagcccucagccgaggccuacgccgagccgagugcgcagccgacgaccgggaggagccgcagccuucaacucugagguacugugauccgcgcugcccgccgggccgccccaguccgcugcugcggcaccuccuucccucgcgcccucuucgcucgccagcgccuucccugugagccugcgucaccgcggccgccaagcuuaccauggagcuccccauccucaagaccaacgccaucaccaccauccucgccgccgucacccucugcuucgccuccucccagaacaucaccgaggaguucuaccaguccaccugcuccgccgucuccaagggcuaccucggcgcccuccgcaccggcugguacaccuccgucaucaccaucgagcucuccaacaucaaggagaacaagugcaacggcaccgacgccaaggucaagcucaucaagcaggagcucgacaaguacaagaacgccgucaccgagcuccagcuccucaugcaguccacccccgccgccggcuccggcuccgccaucugcuccggcaucgccgucugcaagguccuccaccucgagggcgaggucaacaagaucaagaacgcccuccucuccaccaacaaggccgucgucucccucuccaacggcgucuccguccucaccuucaagguccucgaccucaagaacuacaucgacaagcagcuccuccccauccucaacaagcaguccugcuccauccccaacaucgagaccgucaucgaguuccagcagaagaacaaccgccuccucgagaucacccgcgaguucuccgucaacgccggcgucaccacccccgucuccaccuacaugcucaccaacuccgagcuccucucccucaucaacgacaugcccaucaccaacgaccagaagaagcucauguccaacaacguccagaucguccgccagcaguccuacuccaucaugugcaucaucaaggaggagguccucgccuacgucguccagcucccccucuacggcgucaucgacacccccugcuggaagcuccacaccuccccccucugcaccaccaacaccaaggagggcuccaacaucugccucacccgcaccgaccgcggcugguacugcgacaacgccggcuccgucuccuucuucccccaggccgagaccugcaagguccaguccaaccgcgucuucugcgacaccaugaacucccucacccuccccuccgaggucaaccucugcaacaucgacaucuucaaccccaaguacgacugcaagaucaugaccuccaagaccgacgucuccuccuccgucaucaccucccucggcgccaucgucuccugcuacggcaagaccaagugcaccgccuccaacaagaaccgcggcaucaucaagaccuucuccaacggcugcgacuacgucuccaacaagggcgucgacaccgucuccgucggcaacacccucuacugcgucaacaagcaggagggccagucccucuacgucaagggcgagcccaucaucaacuucuacgacccccucgucuuccccuccgacgaguucgacgccuccaucucccaggucaacgagaagaucaaccagucccucgccuucauccgcaaguccgacgagcuccuccacaacgucaacgucggcaaguccaccaccaacaucaugaucaccaccaucaucaucgucaucaucgucauccuccuccuccucaucgccgucggccucuuccucuacugcaaggcccgcugaggacuaguguccaccugucccuccugggcugcuggauugucucguuuuccugccaaauaaacaggaucagcgcuuuacagaucuaaaaaaaaaaaaaaaaaaaaaaaaaaaaaaaaaaaaaaaaaaaaaaaaaaaaaaaaaaaaaaaaugcaucccccccccccccccccccccccccccccccaaaggcucuuuucagagccaccagaauu

SEQ ID NO: 14361 - RNA, 1994 nt, Artificial Sequence
  mRNA product Design b-1 comprising derived and/or modified sequence from HRSV(Memphis-37)__AIY60640.1__F-del_DSCav1_mut1 (opt3)
gggagacggagacggccugcaggaccugcucucucagcccucagccgaggccuacgccgagccgagugcgcagccgacgaccgggaggagccgcagccuucaacucugagguacugugauccgcgcugcccgccgggccgccccaguccgcugcugcggcaccuccuucccucgcgcccucuucgcucgccagcgccuucccugugagccugcgucaccgcggccgccaagcuuaccauggagcugcccauccucaagaccaacgccauuacaacuauacuugcugcagugacgcugugcuucgccagcucccagaauaucaccgaagaguuuuaccaaucuacauguucagcggucaguaaaggcuauuugggggcuuuaagaacuggaugguacaccagcguuauuacaaucgaacuguccaacauuaaggagaauaaaugcaacgguaccgacgccaaggugaaacuaaucaagcaggaacucgauaaguauaaaaaugcaguaacugagcugcagcuucugaugcagucuacuccugccgcuggcucggggucagcaauauguagcggaaucgccgugugcaaggucuugcaccucgagggcgaagugaacaaaauuaagaaugcucugcugaguaccaacaaagccguugugucccucucuaauggugucagcguguuaacguucaagguacuggaccuuaagaacuacaucgauaaacaauugcugccaauucuaaauaagcaguccuguucaaucccgaacauagagacuguuauugaauuucagcagaaaaauaacaggcuccuggagaucacccgggaguucagugugaaugcgggggucacaacucccgugagcaccuauaugcuuacaaacucugaacuguugucccucauuaacgacaugccuaucaccaaugaucaaaagaaacugaugucaaacaaugugcagaucguccgccagcagagcuacaguauuaugugcauaaucaaggaggaaguuuuagcauaugugguacaacugccacucuacggagugauugacacgcccuguuggaaacuucauacuucuccucugugcacaaccaacacuaaggagggcuccaauaucuguuugacacgaaccgaucguggcugguacugcgacaacgccgggagcgucucguuuuucccacaggcugaaacguguaaggugcagucuaauagaguguuuugcgauaccaugaacucccuaacacugcccucagagguuaaucucugcaacauagacauuuucaauccuaaauaugauuguaagaucaugacaaguaaaaccgacgucagcuccucugugaucacaagccugggagccauuguaucaugcuacgguaagacuaaauguaccgcaaguaacaagaauaggggcaucauuaagacauuuuccaacgggugcgauuauguuagcaauaaaggaguggacaccgucucugugggcaacacucuuuacugugucaacaagcaagagggucagucacuguaugugaaaggggaaccaauaaucaauuucuacgacccguugguuuuucccagugaugaguucgacgcuagcauuucccaggugaacgaaaagaucaaucagucucucgccuuuauccggaaaucggaugagcuguuacacaacguaaaugucggaaagagcacgacaaacauuaugauaaccacuaucauuaucgugauuaucguuauacugcuacuccugaucgcggugggccuuuucuuguauugcaaggcccgcugaggacuaguguccaccugucccuccugggcugcuggauugucucguuuuccugccaaauaaacaggaucagcgcuuuacagaucuaaaaaaaaaaaaaaaaaaaaaaaaaaaaaaaaaaaaaaaaaaaaaaaaaaaaaaaaaaaaaaaaugcaucccccccccccccccccccccccccccccccaaaggcucuuuucagagccaccagaauu

SEQ ID NO: 14362 - RNA, 1994 nt, Artificial Sequence
  mRNA product Design b-1 comprising derived and/or modified sequence from HRSV(Memphis-37)__AIY60640.1__F-del_DSCav1_mut1 (opt4)
gggagacggagacggccugcaggaccugcucucucagcccucagccgaggccuacgccgagccgagugcgcagccgacgaccgggaggagccgcagccuucaacucugagguacugugauccgcgcugcccgccgggccgccccaguccgcugcugcggcaccuccuucccucgcgcccucuucgcucgccagcgccuucccugugagccugcgucaccgcggccgccaagcuuaccauggagcugcccauccugaagaccaacgccaucaccaccauccuggccgccgugacccugugcuucgccagcagccagaacaucaccgaggaguucuaccagagcaccugcagcgccgugagcaagggcuaccugggcgcccugagaaccggcugguacaccagcgugaucaccaucgagcugagcaacaucaaggagaacaagugcaacggcaccgacgccaaggugaagcugaucaagcaggagcuggacaaguacaagaacgccgugaccgagcugcagcugcugaugcagagcacccccgccgccggcagcggcagcgccaucugcagcggcaucgccgugugcaaggugcugcaccuggagggcgaggugaacaagaucaagaacgcccugcugagcaccaacaaggccguggugagccugagcaacggcgugagcgugcugaccuucaaggugcuggaccugaagaacuacaucgacaagcagcugcugcccauccugaacaagcagagcugcagcauccccaacaucgagaccgugaucgaguuccagcagaagaacaacagacugcuggagaucaccagagaguucagcgugaacgccggcgugaccacccccgugagcaccuacaugcugaccaacagcgagcugcugagccugaucaacgacaugcccaucaccaacgaccagaagaagcugaugagcaacaacgugcagaucgugagacagcagagcuacagcaucaugugcaucaucaaggaggaggugcuggccuacguggugcagcugccccuguacggcgugaucgacacccccugcuggaagcugcacaccagcccccugugcaccaccaacaccaaggagggcagcaacaucugccugaccagaaccgacagaggcugguacugcgacaacgccggcagcgugagcuucuucccccaggccgagaccugcaaggugcagagcaacagaguguucugcgacaccaugaacagccugacccugcccagcgaggugaaccugugcaacaucgacaucuucaaccccaaguacgacugcaagaucaugaccagcaagaccgacgugagcagcagcgugaucaccagccugggcgccaucgugagcugcuacggcaagaccaagugcaccgccagcaacaagaacagaggcaucaucaagaccuucagcaacggcugcgacuacgugagcaacaagggcguggacaccgugagcgugggcaacacccuguacugcgugaacaagcaggagggccagagccuguacgugaagggcgagcccaucaucaacuucuacgacccccugguguuccccagcgacgaguucgacgccagcaucagccaggugaacgagaagaucaaccagagccuggccuucaucagaaagagcgacgagcugcugcacaacgugaacgugggcaagagcaccaccaacaucaugaucaccaccaucaucaucgugaucaucgugauccugcugcugcugaucgccgugggccuguuccuguacugcaaggccagaugaggacuaguguccaccugucccuccugggcugcuggauugucucguuuuccugccaaauaaacaggaucagcgcuuuacagaucuaaaaaaaaaaaaaaaaaaaaaaaaaaaaaaaaaaaaaaaaaaaaaaaaaaaaaaaaaaaaaaaaugcaucccccccccccccccccccccccccccccccaaaggcucuuuucagagccaccagaauu

SEQ ID NO: 14363 - RNA, 1994 nt, Artificial Sequence
  mRNA product Design b-1 comprising derived and/or modified sequence from HRSV(Memphis-37)__AIY60640.1__F-del_DSCav1_mut1 (opt5)
gggagacggagacggccugcaggaccugcucucucagcccucagccgaggccuacgccgagccgagugcgcagccgacgaccgggaggagccgcagccuucaacucugagguacugugauccgcgcugcccgccgggccgccccaguccgcugcugcggcaccuccuucccucgcgcccucuucgcucgccagcgccuucccugugagccugcgucaccgcggccgccaagcuuaccauggagcugcccauccucaagaccaacgccauuacaacgauccuggcugccgugacccuuugcuucgcgagcucccagaauauuacagaagaguuuuaccaaucuaccuguagcgcugucuccaaaggcuaucugggggcccucagaacaggaugguacaccucuguuaucacaauugaacugagcaacaucaaggagaauaaaugcaacggcaccgacgccaaggugaaacuuaucaagcaggaacuggauaaguauaaaaaugcugugacggagcuccagcugcugaugcaguccaccccugccgcugggucuggaagcgccauuuguuccggcaucgcggucugcaaggugcuccaccuggagggggaaguuaacaaaauuaagaaugcccuucugagcacaaacaaagcuguggucucucucuccaauggagugagcguucugaccuucaaggugcuugaccugaagaacuacaucgauaaacaacuccugccgauucugaauaagcagucuuguuccauccccaacauugagacagucaucgaauuucagcagaaaaauaaccggcuccuggagaucacccgcgaguucagcgugaaugccggcgugacgacaccugucucuaccuauaugcuuacaaacuccgaacugcucagccugauuaacgacaugcccaucaccaaugaucaaaagaaacuuauguccaacaauguucagauugugagacagcagucuuacagcaucaugugcauuaucaaggaggaagugcuggcuuaugucgugcaacucccucuguacggcguuaucgacacccccuguuggaaacugcauacauccccucucugcacgaccaacacaaaggaggggagcaauauuugucugacccggacagaucgcggaugguacugcgacaacgccggcucuguguccuuuuucccgcaggcggaaaccuguaagguccagagcaauagaguguuuugcgauacgaugaacucucuuacacugcccagcgagguuaaucucugcaacaucgacauuuucaauccuaaauaugauuguaagaucaugaccuccaaaaccgacgugucuagcuccgucauuacaagccugggggccaucgugucuugcuacggaaagaccaaauguacagcuuccaacaagaaucggggcaucauuaagacguuuagcaacgggugcgauuaugucucuaauaaaggaguggacaccguuuccgugggcaacacacuuuacugugucaacaagcaagagggccagagccuguaugugaaaggggaacccaucauuaauuucuacgacccucucguuuuucccuccgaugaguucgacgccucuaucagccaggugaacgaaaagauuaaucagucccuggcuuuuauccgcaaaucugaugagcugcuccacaacgucaaugugggaaagagcaccacaaacauuaugaucaccacgaucauuaucgugauuaucguuauucugcuucugcucaucgccgucggccuguuccuguauugcaaggccagaugaggacuaguguccaccugucccuccugggcugcuggauugucucguuuuccugccaaauaaacaggaucagcgcuuuacagaucuaaaaaaaaaaaaaaaaaaaaaaaaaaaaaaaaaaaaaaaaaaaaaaaaaaaaaaaaaaaaaaaaugcaucccccccccccccccccccccccccccccccaaaggcucuuuucagagccaccagaauu

SEQ ID NO: 14364 - RNA, 1994 nt, Artificial Sequence
  mRNA product Design b-1 comprising derived and/or modified sequence from HRSV(Memphis-37)__AIY60640.1__F-del_DSCav1_mut1 (opt6)
gggagacggagacggccugcaggaccugcucucucagcccucagccgaggccuacgccgagccgagugcgcagccgacgaccgggaggagccgcagccuucaacucugagguacugugauccgcgcugcccgccgggccgccccaguccgcugcugcggcaccuccuucccucgcgcccucuucgcucgccagcgccuucccugugagccugcgucaccgcggccgccaagcuuaccauggaauuaccaauacuaaaaacaaacgcaauaacaacaauucuagcagcaguaacauuaugcuuugcaucaucccaaaacaucacagaagaauuuuaucaaucaaccugcucagcaguuuccaaaggauacuuaggagcauuaagaacugguugguacacuucaguaaucaccaucgaacucucaaacaucaaggaaaacaaaugcaacggaacagacgcaaaaguuaaacucauaaaacaagaacuugacaaauacaaaaacgccguaacagaacuacaacuucucaugcaaucaacacccgcagcaggauccggaucagccauaugcucaggcauagcaguauguaaaguauuacaucuugaaggugaaguaaacaaaauaaaaaacgcacuucuaucaaccaacaaagcaguaguaucacuaucaaacggaguauccgucuuaacauuuaaaguucuagaccucaaaaacuauauagacaaacaauuacugccaauccucaauaaacaaucaugcucaauaccaaacaucgaaacaguaauagaauuucaacaaaaaaacaacagacuacuagaaauaacaagagaauuuuccgucaacgccggcguaacuacuccaguaucaacauauaugcuaaccaacucagaacuccuaucccucauaaacgacaugccaauaacuaaugaucaaaaaaaacuaaugucaaacaauguacaaauaguuagacaacaaucauacucaaucaugugcauaauaaaagaagaaguacuagcauacgucguccaacuaccccuauacggaguaauagacacaccuugcuggaaacuacacacaucaccccuaugcacaacaaauacaaaagaagguuccaacaucugccuaacaagaacugauagaggaugguacugcgacaacgccggaucaguaucauucuucccucaagcugaaaccugcaaaguacaaucaaacagaguauuuugcgauacaaugaacucccuaacacuucccucagaaguuaaucuuuguaauauagauauauucaacccaaaauacgacugcaaaauaaugacaaguaaaacagacguauccucaucuguaauuacaucacuaggagccauaguaucuugcuacggcaaaaccaaaugcacagcaucaaacaaaaacagagguauuaucaaaaccuucucaaacggaugugacuacguuucaaacaaaggaguagacacaguaucagucggaaacacccuauacuguguuaacaaacaagaaggacaaucacuguacguaaaaggagaacccauaauaaauuucuacgacccacuuguauuuccaucagacgaauuugaugcaucaaucucacaaguaaaugaaaaaauaaaccaaucauuagcauucauaagaaaaucugacgaguuacuacacaacguaaauguuggcaaaucaacaaccaauauaaugauaacaacaauaauaauaguaauaauagucauauuacuccuccucauagccgucggauuauucuuauacugcaaagcaagauaaggacuaguguccaccugucccuccugggcugcuggauugucucguuuuccugccaaauaaacaggaucagcgcuuuacagaucuaaaaaaaaaaaaaaaaaaaaaaaaaaaaaaaaaaaaaaaaaaaaaaaaaaaaaaaaaaaaaaaaugcaucccccccccccccccccccccccccccccccaaaggcucuuuucagagccaccagaauu

SEQ ID NO: 14365 - RNA, 1994 nt, Artificial Sequence
  mRNA product Design b-1 comprising derived and/or modified sequence from HRSV(Memphis-37)__AIY60640.1__F-del_DSCav1_mut1 (opt11)
gggagacggagacggccugcaggaccugcucucucagcccucagccgaggccuacgccgagccgagugcgcagccgacgaccgggaggagccgcagccuucaacucugagguacugugauccgcgcugcccgccgggccgccccaguccgcugcugcggcaccuccuucccucgcgcccucuucgcucgccagcgccuucccugugagccugcgucaccgcggccgccaagcuuaccauggaacuccccauacuaaaaaccaacgccaucacaacaauccucgccgccgucacacucugcuucgccagcucccaaaacaucaccgaagaguucuaucaaucaaccugcuccgcagucucaaagggauaccucggagcccuccgcaccggaugguacacuuccgucaucacaauagaacucuccaacaucaaagaaaacaaaugcaacggcaccgacgcaaaagucaagcucaucaaacaagaacucgacaaauauaaaaacgccgucaccgaacuccaacuacucaugcaauccacacccgcggccggcucaggcagcgccaucugcucaggcaucgccgucugcaaaguccuccaccucgaaggcgaagucaacaaaaucaaaaacgcccuucuuucaaccaacaaggcaguaguaucccucucaaacggcgucagcguccugaccuucaaaguccuagaccucaaaaacuacauagauaaacaacuccuccccauacugaacaaacaaucgugcuccauccccaauaucgaaaccgucauagaguuccagcagaaaaacaacagacuucucgaaauaacccgagaguucucaguaaacgccggagucaccacacccguaagcaccuacaugcucacaaacucagaacuccuaucccucaucaacgacaugcccaucaccaacgaccagaaaaagcuaauguccaacaacguccaaauaguacgccaacaaagcuacucgauaaugugcaucaucaaggaagaaguacucgccuacgucguccaacucccccucuacggcguaaucgacacacccugcuggaaacuccacacguccccacucugcacaacaaacacaaaagaaggauccaacauaugccuaacccgcaccgacaggggcugguacugcgacaacgcaggcucagucagcuucuuuccccaagccgaaacaugcaaaguccaauccaaccgugucuucugcgacaccaugaacucgcucacccuacccucggaagucaaucucugcaacaucgacaucuucaacccaaaauacgacuguaaaaucaugaccagcaaaacagacguuucuuccagcgucaucacaucacucggcgcgaucguaucaugcuauggcaaaacaaagugcaccgcuagcaauaaaaaccgaggaaucauaaaaaccuucagcaacggcugcgacuacguauccaacaaaggcgucgacaccguauccgucggaaacacccucuacugcgucaacaagcaagaaggacaaucacucuacgucaaaggcgaaccaaucauaaacuucuacgacccacucguauuccccucagacgaguucgacgcauccaucucccaagucaacgaaaagaucaaccaaucucucgccuuuauacgcaaaagcgacgaacuccuucacaacguaaacgucggcaaaagcaccacuaacauaaugaucaccacaaucauaauaguaaucaucguaauacuccuccuacucaucgccgugggccuauuccucuauugcaaagcccgauaaggacuaguguccaccugucccuccugggcugcuggauugucucguuuuccugccaaauaaacaggaucagcgcuuuacagaucuaaaaaaaaaaaaaaaaaaaaaaaaaaaaaaaaaaaaaaaaaaaaaaaaaaaaaaaaaaaaaaaaugcaucccccccccccccccccccccccccccccccaaaggcucuuuucagagccaccagaauu

SEQ ID NO: 14366 - RNA, 1814 nt, Artificial Sequence
  mRNA product Design b-2 comprising derived and/or modified sequence from HRSV(Memphis-37)__AIY60640.1__F-del_DSCav1_mut1 (opt1)
gggagagccucugcuggaguccggggaguggcguuggcugcuagagcgaagcuuaccauggagcugcccauccucaagaccaacgccaucaccacgauccuggccgcggugacccugugcuucgccagcucccagaacaucaccgaggaguucuaccagagcacgugcuccgccgucagcaagggcuaccucggcgcccugcgcaccgggugguacaccagcgugaucaccaucgagcuguccaacaucaaggagaacaagugcaacggcaccgacgccaaggugaagcucaucaagcaggagcuggacaaguacaagaacgcggucacggagcugcagcuccugaugcagagcaccccggccgccggcuccgggagcgcgaucugcuccggcaucgccgucugcaaggugcugcaccucgagggcgaggugaacaagaucaagaacgcccugcuguccaccaacaaggccgucgugagccucuccaacggggugagcguccugaccuucaaggugcuggaccucaagaacuacaucgacaagcagcugcugcccauccugaacaagcagagcugcuccauccccaacaucgagaccgucaucgaguuccagcagaagaacaaccgccuccuggagaucacgcgggaguucagcgugaacgcgggcgugaccacccccgucuccaccuacaugcugacgaacagcgagcuccugucccugaucaacgacaugccgaucaccaacgaccagaagaagcucaugagcaacaacgugcagaucgugcgccagcaguccuacagcaucaugugcaucaucaaggaggagguccuggccuacguggugcagcugccccucuacggggucaucgacacccccugcuggaagcugcacaccagcccccugugcacgaccaacaccaaggagggcuccaacaucugccucacccggacggaccgcgggugguacugcgacaacgccggcagcguguccuucuucccgcaggccgagaccugcaagguccagagcaaccggguguucugcgacaccaugaacucccugacccugcccagcgaggugaaccucugcaacaucgacaucuucaaccccaaguacgacugcaagaucaugacguccaagaccgacgucagcuccagcgugaucaccucccugggcgccaucgugagcugcuacgggaagaccaagugcacggcgagcaacaagaaccgcggcaucaucaagaccuucuccaacgggugcgacuacgucagcaacaagggcguggacaccguguccgucggcaacacccuguacugcgugaacaagcaggagggccagagccucuacgugaagggggagcccaucaucaacuucuacgacccgcuggucuuccccuccgacgaguucgacgccagcaucucccaggugaacgagaagaucaaccagagccuggccuucauccggaaguccgacgagcuccugcacaacgugaacgucggcaagagcaccacgaacaucaugaucaccaccaucaucaucgugaucaucgugauccugcugcuccugaucgccgucgggcuguuccucuacugcaaggcccgcugaggacuaguguccaccugucccuccugggcugcuggauugucucguuuuccugccaaauaaacaggaucagcgcuuuacagaucuaaaaaaaaaaaaaaaaaaaaaaaaaaaaaaaaaaaaaaaaaaaaaaaaaaaaaaaaaaaaaaaaugcaucccccccccccccccccccccccccccccccaaaggcucuuuucagagccaccagaauu

SEQ ID NO: 14367 - RNA, 1814 nt, Artificial Sequence
  mRNA product Design b-2 comprising derived and/or modified sequence from HRSV(Memphis-37)__AIY60640.1__F-del_DSCav1_mut1 (opt1)
gggagagccucugcuggaguccggggaguggcguuggcugcuagagcgaagcuuaccauggagcugcccauccucaagaccaacgccaucaccacgauccuggccgcggugacccugugcuucgccagcucccagaacaucaccgaggaguucuaccagagcacgugcuccgccgucagcaagggcuaccucggggcccugcgcaccggcugguacaccuccgugaucaccaucgagcugagcaacaucaaggagaacaagugcaacgggaccgacgccaaggugaagcucaucaagcaggagcuggacaaguacaagaacgcggucacggagcugcagcuccugaugcaguccaccccggccgccggcagcggguccgccaucugcagcggcaucgcggugugcaaggugcugcaccucgagggcgaggucaacaagaucaagaacgcccugcuguccaccaacaaggccguggugagccucuccaacggggucagcgugcugaccuucaaggugcuggaccucaagaacuacaucgacaagcagcugcugcccauccucaacaagcaguccugcagcauccccaacaucgagacggucaucgaguuccagcagaagaacaaccggcugcuggagaucacccgcgaguucuccgugaacgccggcgugaccacccccgucagcacguacaugcucaccaacuccgagcugcugagccucaucaacgacaugccgaucaccaacgaccagaagaagcugaugagcaacaacgugcagaucgugcggcagcaguccuacagcaucaugugcaucaucaaggaggagguccuggccuacguggugcagcucccccuguacggggucaucgacacccccugcuggaagcugcacacgagcccccucugcaccaccaacaccaaggagggcuccaacaucugccugacgcgcaccgaccgggggugguacugcgacaacgcgggcuccgugagcuucuucccgcaggccgagaccugcaaggugcaguccaaccgcgucuucugcgacaccaugaacagccugacgcuccccuccgaggugaaccugugcaacaucgacaucuucaaccccaaguacgacugcaagaucaugaccagcaagaccgacgucuccagcuccgugaucaccagccugggcgccaucguguccugcuacgggaagacgaagugcaccgccagcaacaagaaccggggcaucaucaagaccuucuccaacgggugcgacuacgucagcaacaagggcguggacaccguguccgucggcaacacgcucuacugcgugaacaagcaggaggggcagagccuguacgugaagggcgagcccaucaucaacuucuacgacccgcuggucuuccccagcgacgaguucgacgccuccaucagccaggugaacgagaagaucaaccagucccucgcguucauccgcaagagcgacgagcugcugcacaacgugaacgucgggaaguccaccaccaacaucaugaucaccaccaucaucaucgugaucaucgugauccuccugcugcucaucgccgucggccuguuccuguacugcaaggcccggugaggacuaguguccaccugucccuccugggcugcuggauugucucguuuuccugccaaauaaacaggaucagcgcuuuacagaucuaaaaaaaaaaaaaaaaaaaaaaaaaaaaaaaaaaaaaaaaaaaaaaaaaaaaaaaaaaaaaaaaugcaucccccccccccccccccccccccccccccccaaaggcucuuuucagagccaccagaauu

SEQ ID NO: 14368 - RNA, 1814 nt, Artificial Sequence
  mRNA product Design b-2 comprising derived and/or modified sequence from HRSV(Memphis-37)__AIY60640.1__F-del_DSCav1_mut1 (opt2)
gggagagccucugcuggaguccggggaguggcguuggcugcuagagcgaagcuuaccauggagcuccccauccucaagaccaacgccaucaccaccauccucgccgccgucacccucugcuucgccuccucccagaacaucaccgaggaguucuaccaguccaccugcuccgccgucuccaagggcuaccucggcgcccuccgcaccggcugguacaccuccgucaucaccaucgagcucuccaacaucaaggagaacaagugcaacggcaccgacgccaaggucaagcucaucaagcaggagcucgacaaguacaagaacgccgucaccgagcuccagcuccucaugcaguccacccccgccgccggcuccggcuccgccaucugcuccggcaucgccgucugcaagguccuccaccucgagggcgaggucaacaagaucaagaacgcccuccucuccaccaacaaggccgucgucucccucuccaacggcgucuccguccucaccuucaagguccucgaccucaagaacuacaucgacaagcagcuccuccccauccucaacaagcaguccugcuccauccccaacaucgagaccgucaucgaguuccagcagaagaacaaccgccuccucgagaucacccgcgaguucuccgucaacgccggcgucaccacccccgucuccaccuacaugcucaccaacuccgagcuccucucccucaucaacgacaugcccaucaccaacgaccagaagaagcucauguccaacaacguccagaucguccgccagcaguccuacuccaucaugugcaucaucaaggaggagguccucgccuacgucguccagcucccccucuacggcgucaucgacacccccugcuggaagcuccacaccuccccccucugcaccaccaacaccaaggagggcuccaacaucugccucacccgcaccgaccgcggcugguacugcgacaacgccggcuccgucuccuucuucccccaggccgagaccugcaagguccaguccaaccgcgucuucugcgacaccaugaacucccucacccuccccuccgaggucaaccucugcaacaucgacaucuucaaccccaaguacgacugcaagaucaugaccuccaagaccgacgucuccuccuccgucaucaccucccucggcgccaucgucuccugcuacggcaagaccaagugcaccgccuccaacaagaaccgcggcaucaucaagaccuucuccaacggcugcgacuacgucuccaacaagggcgucgacaccgucuccgucggcaacacccucuacugcgucaacaagcaggagggccagucccucuacgucaagggcgagcccaucaucaacuucuacgacccccucgucuuccccuccgacgaguucgacgccuccaucucccaggucaacgagaagaucaaccagucccucgccuucauccgcaaguccgacgagcuccuccacaacgucaacgucggcaaguccaccaccaacaucaugaucaccaccaucaucaucgucaucaucgucauccuccuccuccucaucgccgucggccucuuccucuacugcaaggcccgcugaggacuaguguccaccugucccuccugggcugcuggauugucucguuuuccugccaaauaaacaggaucagcgcuuuacagaucuaaaaaaaaaaaaaaaaaaaaaaaaaaaaaaaaaaaaaaaaaaaaaaaaaaaaaaaaaaaaaaaaugcaucccccccccccccccccccccccccccccccaaaggcucuuuucagagccaccagaauu

SEQ ID NO: 14369 - RNA, 1814 nt, Artificial Sequence
  mRNA product Design b-2 comprising derived and/or modified sequence from HRSV(Memphis-37)__AIY60640.1__F-del_DSCav1_mut1 (opt3)
gggagagccucugcuggaguccggggaguggcguuggcugcuagagcgaagcuuaccauggagcugcccauccucaagaccaacgccauuacaacuauacuugcugcagugacgcugugcuucgccagcucccagaauaucaccgaagaguuuuaccaaucuacauguucagcggucaguaaaggcuauuugggggcuuuaagaacuggaugguacaccagcguuauuacaaucgaacuguccaacauuaaggagaauaaaugcaacgguaccgacgccaaggugaaacuaaucaagcaggaacucgauaaguauaaaaaugcaguaacugagcugcagcuucugaugcagucuacuccugccgcuggcucggggucagcaauauguagcggaaucgccgugugcaaggucuugcaccucgagggcgaagugaacaaaauuaagaaugcucugcugaguaccaacaaagccguugugucccucucuaauggugucagcguguuaacguucaagguacuggaccuuaagaacuacaucgauaaacaauugcugccaauucuaaauaagcaguccuguucaaucccgaacauagagacuguuauugaauuucagcagaaaaauaacaggcuccuggagaucacccgggaguucagugugaaugcgggggucacaacucccgugagcaccuauaugcuuacaaacucugaacuguugucccucauuaacgacaugccuaucaccaaugaucaaaagaaacugaugucaaacaaugugcagaucguccgccagcagagcuacaguauuaugugcauaaucaaggaggaaguuuuagcauaugugguacaacugccacucuacggagugauugacacgcccuguuggaaacuucauacuucuccucugugcacaaccaacacuaaggagggcuccaauaucuguuugacacgaaccgaucguggcugguacugcgacaacgccgggagcgucucguuuuucccacaggcugaaacguguaaggugcagucuaauagaguguuuugcgauaccaugaacucccuaacacugcccucagagguuaaucucugcaacauagacauuuucaauccuaaauaugauuguaagaucaugacaaguaaaaccgacgucagcuccucugugaucacaagccugggagccauuguaucaugcuacgguaagacuaaauguaccgcaaguaacaagaauaggggcaucauuaagacauuuuccaacgggugcgauuauguuagcaauaaaggaguggacaccgucucugugggcaacacucuuuacugugucaacaagcaagagggucagucacuguaugugaaaggggaaccaauaaucaauuucuacgacccguugguuuuucccagugaugaguucgacgcuagcauuucccaggugaacgaaaagaucaaucagucucucgccuuuauccggaaaucggaugagcuguuacacaacguaaaugucggaaagagcacgacaaacauuaugauaaccacuaucauuaucgugauuaucguuauacugcuacuccugaucgcggugggccuuuucuuguauugcaaggcccgcugaggacuaguguccaccugucccuccugggcugcuggauugucucguuuuccugccaaauaaacaggaucagcgcuuuacagaucuaaaaaaaaaaaaaaaaaaaaaaaaaaaaaaaaaaaaaaaaaaaaaaaaaaaaaaaaaaaaaaaaugcaucccccccccccccccccccccccccccccccaaaggcucuuuucagagccaccagaauu

SEQ ID NO: 14370 - RNA, 1814 nt, Artificial Sequence
  mRNA product Design b-2 comprising derived and/or modified sequence from HRSV(Memphis-37)__AIY60640.1__F-del_DSCav1_mut1 (opt4)
gggagagccucugcuggaguccggggaguggcguuggcugcuagagcgaagcuuaccauggagcugcccauccugaagaccaacgccaucaccaccauccuggccgccgugacccugugcuucgccagcagccagaacaucaccgaggaguucuaccagagcaccugcagcgccgugagcaagggcuaccugggcgcccugagaaccggcugguacaccagcgugaucaccaucgagcugagcaacaucaaggagaacaagugcaacggcaccgacgccaaggugaagcugaucaagcaggagcuggacaaguacaagaacgccgugaccgagcugcagcugcugaugcagagcacccccgccgccggcagcggcagcgccaucugcagcggcaucgccgugugcaaggugcugcaccuggagggcgaggugaacaagaucaagaacgcccugcugagcaccaacaaggccguggugagccugagcaacggcgugagcgugcugaccuucaaggugcuggaccugaagaacuacaucgacaagcagcugcugcccauccugaacaagcagagcugcagcauccccaacaucgagaccgugaucgaguuccagcagaagaacaacagacugcuggagaucaccagagaguucagcgugaacgccggcgugaccacccccgugagcaccuacaugcugaccaacagcgagcugcugagccugaucaacgacaugcccaucaccaacgaccagaagaagcugaugagcaacaacgugcagaucgugagacagcagagcuacagcaucaugugcaucaucaaggaggaggugcuggccuacguggugcagcugccccuguacggcgugaucgacacccccugcuggaagcugcacaccagcccccugugcaccaccaacaccaaggagggcagcaacaucugccugaccagaaccgacagaggcugguacugcgacaacgccggcagcgugagcuucuucccccaggccgagaccugcaaggugcagagcaacagaguguucugcgacaccaugaacagccugacccugcccagcgaggugaaccugugcaacaucgacaucuucaaccccaaguacgacugcaagaucaugaccagcaagaccgacgugagcagcagcgugaucaccagccugggcgccaucgugagcugcuacggcaagaccaagugcaccgccagcaacaagaacagaggcaucaucaagaccuucagcaacggcugcgacuacgugagcaacaagggcguggacaccgugagcgugggcaacacccuguacugcgugaacaagcaggagggccagagccuguacgugaagggcgagcccaucaucaacuucuacgacccccugguguuccccagcgacgaguucgacgccagcaucagccaggugaacgagaagaucaaccagagccuggccuucaucagaaagagcgacgagcugcugcacaacgugaacgugggcaagagcaccaccaacaucaugaucaccaccaucaucaucgugaucaucgugauccugcugcugcugaucgccgugggccuguuccuguacugcaaggccagaugaggacuaguguccaccugucccuccugggcugcuggauugucucguuuuccugccaaauaaacaggaucagcgcuuuacagaucuaaaaaaaaaaaaaaaaaaaaaaaaaaaaaaaaaaaaaaaaaaaaaaaaaaaaaaaaaaaaaaaaugcaucccccccccccccccccccccccccccccccaaaggcucuuuucagagccaccagaauu

SEQ ID NO: 14371 - RNA, 1814 nt, Artificial Sequence
  mRNA product Design b-2 comprising derived and/or modified sequence from HRSV(Memphis-37)__AIY60640.1__F-del_DSCav1_mut1 (opt5)
gggagagccucugcuggaguccggggaguggcguuggcugcuagagcgaagcuuaccauggagcugcccauccucaagaccaacgccauuacaacgauccuggcugccgugacccuuugcuucgcgagcucccagaauauuacagaagaguuuuaccaaucuaccuguagcgcugucuccaaaggcuaucugggggcccucagaacaggaugguacaccucuguuaucacaauugaacugagcaacaucaaggagaauaaaugcaacggcaccgacgccaaggugaaacuuaucaagcaggaacuggauaaguauaaaaaugcugugacggagcuccagcugcugaugcaguccaccccugccgcugggucuggaagcgccauuuguuccggcaucgcggucugcaaggugcuccaccuggagggggaaguuaacaaaauuaagaaugcccuucugagcacaaacaaagcuguggucucucucuccaauggagugagcguucugaccuucaaggugcuugaccugaagaacuacaucgauaaacaacuccugccgauucugaauaagcagucuuguuccauccccaacauugagacagucaucgaauuucagcagaaaaauaaccggcuccuggagaucacccgcgaguucagcgugaaugccggcgugacgacaccugucucuaccuauaugcuuacaaacuccgaacugcucagccugauuaacgacaugcccaucaccaaugaucaaaagaaacuuauguccaacaauguucagauugugagacagcagucuuacagcaucaugugcauuaucaaggaggaagugcuggcuuaugucgugcaacucccucuguacggcguuaucgacacccccuguuggaaacugcauacauccccucucugcacgaccaacacaaaggaggggagcaauauuugucugacccggacagaucgcggaugguacugcgacaacgccggcucuguguccuuuuucccgcaggcggaaaccuguaagguccagagcaauagaguguuuugcgauacgaugaacucucuuacacugcccagcgagguuaaucucugcaacaucgacauuuucaauccuaaauaugauuguaagaucaugaccuccaaaaccgacgugucuagcuccgucauuacaagccugggggccaucgugucuugcuacggaaagaccaaauguacagcuuccaacaagaaucggggcaucauuaagacguuuagcaacgggugcgauuaugucucuaauaaaggaguggacaccguuuccgugggcaacacacuuuacugugucaacaagcaagagggccagagccuguaugugaaaggggaacccaucauuaauuucuacgacccucucguuuuucccuccgaugaguucgacgccucuaucagccaggugaacgaaaagauuaaucagucccuggcuuuuauccgcaaaucugaugagcugcuccacaacgucaaugugggaaagagcaccacaaacauuaugaucaccacgaucauuaucgugauuaucguuauucugcuucugcucaucgccgucggccuguuccuguauugcaaggccagaugaggacuaguguccaccugucccuccugggcugcuggauugucucguuuuccugccaaauaaacaggaucagcgcuuuacagaucuaaaaaaaaaaaaaaaaaaaaaaaaaaaaaaaaaaaaaaaaaaaaaaaaaaaaaaaaaaaaaaaaugcaucccccccccccccccccccccccccccccccaaaggcucuuuucagagccaccagaauu

SEQ ID NO: 14372 - RNA, 1814 nt, Artificial Sequence
  mRNA product Design b-2 comprising derived and/or modified sequence from HRSV(Memphis-37)__AIY60640.1__F-del_DSCav1_mut1 (opt6)
gggagagccucugcuggaguccggggaguggcguuggcugcuagagcgaagcuuaccauggaauuaccaauacuaaaaacaaacgcaauaacaacaauucuagcagcaguaacauuaugcuuugcaucaucccaaaacaucacagaagaauuuuaucaaucaaccugcucagcaguuuccaaaggauacuuaggagcauuaagaacugguugguacacuucaguaaucaccaucgaacucucaaacaucaaggaaaacaaaugcaacggaacagacgcaaaaguuaaacucauaaaacaagaacuugacaaauacaaaaacgccguaacagaacuacaacuucucaugcaaucaacacccgcagcaggauccggaucagccauaugcucaggcauagcaguauguaaaguauuacaucuugaaggugaaguaaacaaaauaaaaaacgcacuucuaucaaccaacaaagcaguaguaucacuaucaaacggaguauccgucuuaacauuuaaaguucuagaccucaaaaacuauauagacaaacaauuacugccaauccucaauaaacaaucaugcucaauaccaaacaucgaaacaguaauagaauuucaacaaaaaaacaacagacuacuagaaauaacaagagaauuuuccgucaacgccggcguaacuacuccaguaucaacauauaugcuaaccaacucagaacuccuaucccucauaaacgacaugccaauaacuaaugaucaaaaaaaacuaaugucaaacaauguacaaauaguuagacaacaaucauacucaaucaugugcauaauaaaagaagaaguacuagcauacgucguccaacuaccccuauacggaguaauagacacaccuugcuggaaacuacacacaucaccccuaugcacaacaaauacaaaagaagguuccaacaucugccuaacaagaacugauagaggaugguacugcgacaacgccggaucaguaucauucuucccucaagcugaaaccugcaaaguacaaucaaacagaguauuuugcgauacaaugaacucccuaacacuucccucagaaguuaaucuuuguaauauagauauauucaacccaaaauacgacugcaaaauaaugacaaguaaaacagacguauccucaucuguaauuacaucacuaggagccauaguaucuugcuacggcaaaaccaaaugcacagcaucaaacaaaaacagagguauuaucaaaaccuucucaaacggaugugacuacguuucaaacaaaggaguagacacaguaucagucggaaacacccuauacuguguuaacaaacaagaaggacaaucacuguacguaaaaggagaacccauaauaaauuucuacgacccacuuguauuuccaucagacgaauuugaugcaucaaucucacaaguaaaugaaaaaauaaaccaaucauuagcauucauaagaaaaucugacgaguuacuacacaacguaaauguuggcaaaucaacaaccaauauaaugauaacaacaauaauaauaguaauaauagucauauuacuccuccucauagccgucggauuauucuuauacugcaaagcaagauaaggacuaguguccaccugucccuccugggcugcuggauugucucguuuuccugccaaauaaacaggaucagcgcuuuacagaucuaaaaaaaaaaaaaaaaaaaaaaaaaaaaaaaaaaaaaaaaaaaaaaaaaaaaaaaaaaaaaaaaugcaucccccccccccccccccccccccccccccccaaaggcucuuuucagagccaccagaauu

SEQ ID NO: 14373 - RNA, 1814 nt, Artificial Sequence
  mRNA product Design b-2 comprising derived and/or modified sequence from HRSV(Memphis-37)__AIY60640.1__F-del_DSCav1_mut1 (opt11)
gggagagccucugcuggaguccggggaguggcguuggcugcuagagcgaagcuuaccauggaacuccccauacuaaaaaccaacgccaucacaacaauccucgccgccgucacacucugcuucgccagcucccaaaacaucaccgaagaguucuaucaaucaaccugcuccgcagucucaaagggauaccucggagcccuccgcaccggaugguacacuuccgucaucacaauagaacucuccaacaucaaagaaaacaaaugcaacggcaccgacgcaaaagucaagcucaucaaacaagaacucgacaaauauaaaaacgccgucaccgaacuccaacuacucaugcaauccacacccgcggccggcucaggcagcgccaucugcucaggcaucgccgucugcaaaguccuccaccucgaaggcgaagucaacaaaaucaaaaacgcccuucuuucaaccaacaaggcaguaguaucccucucaaacggcgucagcguccugaccuucaaaguccuagaccucaaaaacuacauagauaaacaacuccuccccauacugaacaaacaaucgugcuccauccccaauaucgaaaccgucauagaguuccagcagaaaaacaacagacuucucgaaauaacccgagaguucucaguaaacgccggagucaccacacccguaagcaccuacaugcucacaaacucagaacuccuaucccucaucaacgacaugcccaucaccaacgaccagaaaaagcuaauguccaacaacguccaaauaguacgccaacaaagcuacucgauaaugugcaucaucaaggaagaaguacucgccuacgucguccaacucccccucuacggcguaaucgacacacccugcuggaaacuccacacguccccacucugcacaacaaacacaaaagaaggauccaacauaugccuaacccgcaccgacaggggcugguacugcgacaacgcaggcucagucagcuucuuuccccaagccgaaacaugcaaaguccaauccaaccgugucuucugcgacaccaugaacucgcucacccuacccucggaagucaaucucugcaacaucgacaucuucaacccaaaauacgacuguaaaaucaugaccagcaaaacagacguuucuuccagcgucaucacaucacucggcgcgaucguaucaugcuauggcaaaacaaagugcaccgcuagcaauaaaaaccgaggaaucauaaaaaccuucagcaacggcugcgacuacguauccaacaaaggcgucgacaccguauccgucggaaacacccucuacugcgucaacaagcaagaaggacaaucacucuacgucaaaggcgaaccaaucauaaacuucuacgacccacucguauuccccucagacgaguucgacgcauccaucucccaagucaacgaaaagaucaaccaaucucucgccuuuauacgcaaaagcgacgaacuccuucacaacguaaacgucggcaaaagcaccacuaacauaaugaucaccacaaucauaauaguaaucaucguaauacuccuccuacucaucgccgugggccuauuccucuauugcaaagcccgauaaggacuaguguccaccugucccuccugggcugcuggauugucucguuuuccugccaaauaaacaggaucagcgcuuuacagaucuaaaaaaaaaaaaaaaaaaaaaaaaaaaaaaaaaaaaaaaaaaaaaaaaaaaaaaaaaaaaaaaaugcaucccccccccccccccccccccccccccccccaaaggcucuuuucagagccaccagaauu

SEQ ID NO: 14374 - RNA, 1834 nt, Artificial Sequence
  mRNA product Design b-3 comprising derived and/or modified sequence from HRSV(Memphis-37)__AIY60640.1__F-del_DSCav1_mut1 (opt1)
gggagagucccgcagucggcguccagcggcucugcuuguucgugugugugucguugcaggccuuauucaagcuuaccauggagcugcccauccucaagaccaacgccaucaccacgauccuggccgcggugacccugugcuucgccagcucccagaacaucaccgaggaguucuaccagagcacgugcuccgccgucagcaagggcuaccucggcgcccugcgcaccgggugguacaccagcgugaucaccaucgagcuguccaacaucaaggagaacaagugcaacggcaccgacgccaaggugaagcucaucaagcaggagcuggacaaguacaagaacgcggucacggagcugcagcuccugaugcagagcaccccggccgccggcuccgggagcgcgaucugcuccggcaucgccgucugcaaggugcugcaccucgagggcgaggugaacaagaucaagaacgcccugcuguccaccaacaaggccgucgugagccucuccaacggggugagcguccugaccuucaaggugcuggaccucaagaacuacaucgacaagcagcugcugcccauccugaacaagcagagcugcuccauccccaacaucgagaccgucaucgaguuccagcagaagaacaaccgccuccuggagaucacgcgggaguucagcgugaacgcgggcgugaccacccccgucuccaccuacaugcugacgaacagcgagcuccugucccugaucaacgacaugccgaucaccaacgaccagaagaagcucaugagcaacaacgugcagaucgugcgccagcaguccuacagcaucaugugcaucaucaaggaggagguccuggccuacguggugcagcugccccucuacggggucaucgacacccccugcuggaagcugcacaccagcccccugugcacgaccaacaccaaggagggcuccaacaucugccucacccggacggaccgcgggugguacugcgacaacgccggcagcguguccuucuucccgcaggccgagaccugcaagguccagagcaaccggguguucugcgacaccaugaacucccugacccugcccagcgaggugaaccucugcaacaucgacaucuucaaccccaaguacgacugcaagaucaugacguccaagaccgacgucagcuccagcgugaucaccucccugggcgccaucgugagcugcuacgggaagaccaagugcacggcgagcaacaagaaccgcggcaucaucaagaccuucuccaacgggugcgacuacgucagcaacaagggcguggacaccguguccgucggcaacacccuguacugcgugaacaagcaggagggccagagccucuacgugaagggggagcccaucaucaacuucuacgacccgcuggucuuccccuccgacgaguucgacgccagcaucucccaggugaacgagaagaucaaccagagccuggccuucauccggaaguccgacgagcuccugcacaacgugaacgucggcaagagcaccacgaacaucaugaucaccaccaucaucaucgugaucaucgugauccugcugcuccugaucgccgucgggcuguuccucuacugcaaggcccgcugaggacuaguguccaccugucccuccugggcugcuggauugucucguuuuccugccaaauaaacaggaucagcgcuuuacagaucuaaaaaaaaaaaaaaaaaaaaaaaaaaaaaaaaaaaaaaaaaaaaaaaaaaaaaaaaaaaaaaaaugcaucccccccccccccccccccccccccccccccaaaggcucuuuucagagccaccagaauu

SEQ ID NO: 14375 - RNA, 1834 nt, Artificial Sequence
  mRNA product Design b-3 comprising derived and/or modified sequence from HRSV(Memphis-37)__AIY60640.1__F-del_DSCav1_mut1 (opt1)
gggagagucccgcagucggcguccagcggcucugcuuguucgugugugugucguugcaggccuuauucaagcuuaccauggagcugcccauccucaagaccaacgccaucaccacgauccuggccgcggugacccugugcuucgccagcucccagaacaucaccgaggaguucuaccagagcacgugcuccgccgucagcaagggcuaccucggggcccugcgcaccggcugguacaccuccgugaucaccaucgagcugagcaacaucaaggagaacaagugcaacgggaccgacgccaaggugaagcucaucaagcaggagcuggacaaguacaagaacgcggucacggagcugcagcuccugaugcaguccaccccggccgccggcagcggguccgccaucugcagcggcaucgcggugugcaaggugcugcaccucgagggcgaggucaacaagaucaagaacgcccugcuguccaccaacaaggccguggugagccucuccaacggggucagcgugcugaccuucaaggugcuggaccucaagaacuacaucgacaagcagcugcugcccauccucaacaagcaguccugcagcauccccaacaucgagacggucaucgaguuccagcagaagaacaaccggcugcuggagaucacccgcgaguucuccgugaacgccggcgugaccacccccgucagcacguacaugcucaccaacuccgagcugcugagccucaucaacgacaugccgaucaccaacgaccagaagaagcugaugagcaacaacgugcagaucgugcggcagcaguccuacagcaucaugugcaucaucaaggaggagguccuggccuacguggugcagcucccccuguacggggucaucgacacccccugcuggaagcugcacacgagcccccucugcaccaccaacaccaaggagggcuccaacaucugccugacgcgcaccgaccgggggugguacugcgacaacgcgggcuccgugagcuucuucccgcaggccgagaccugcaaggugcaguccaaccgcgucuucugcgacaccaugaacagccugacgcuccccuccgaggugaaccugugcaacaucgacaucuucaaccccaaguacgacugcaagaucaugaccagcaagaccgacgucuccagcuccgugaucaccagccugggcgccaucguguccugcuacgggaagacgaagugcaccgccagcaacaagaaccggggcaucaucaagaccuucuccaacgggugcgacuacgucagcaacaagggcguggacaccguguccgucggcaacacgcucuacugcgugaacaagcaggaggggcagagccuguacgugaagggcgagcccaucaucaacuucuacgacccgcuggucuuccccagcgacgaguucgacgccuccaucagccaggugaacgagaagaucaaccagucccucgcguucauccgcaagagcgacgagcugcugcacaacgugaacgucgggaaguccaccaccaacaucaugaucaccaccaucaucaucgugaucaucgugauccuccugcugcucaucgccgucggccuguuccuguacugcaaggcccggugaggacuaguguccaccugucccuccugggcugcuggauugucucguuuuccugccaaauaaacaggaucagcgcuuuacagaucuaaaaaaaaaaaaaaaaaaaaaaaaaaaaaaaaaaaaaaaaaaaaaaaaaaaaaaaaaaaaaaaaugcaucccccccccccccccccccccccccccccccaaaggcucuuuucagagccaccagaauu

SEQ ID NO: 14376 - RNA, 1834 nt, Artificial Sequence
  mRNA product Design b-3 comprising derived and/or modified sequence from HRSV(Memphis-37)__AIY60640.1__F-del_DSCav1_mut1 (opt2)
gggagagucccgcagucggcguccagcggcucugcuuguucgugugugugucguugcaggccuuauucaagcuuaccauggagcuccccauccucaagaccaacgccaucaccaccauccucgccgccgucacccucugcuucgccuccucccagaacaucaccgaggaguucuaccaguccaccugcuccgccgucuccaagggcuaccucggcgcccuccgcaccggcugguacaccuccgucaucaccaucgagcucuccaacaucaaggagaacaagugcaacggcaccgacgccaaggucaagcucaucaagcaggagcucgacaaguacaagaacgccgucaccgagcuccagcuccucaugcaguccacccccgccgccggcuccggcuccgccaucugcuccggcaucgccgucugcaagguccuccaccucgagggcgaggucaacaagaucaagaacgcccuccucuccaccaacaaggccgucgucucccucuccaacggcgucuccguccucaccuucaagguccucgaccucaagaacuacaucgacaagcagcuccuccccauccucaacaagcaguccugcuccauccccaacaucgagaccgucaucgaguuccagcagaagaacaaccgccuccucgagaucacccgcgaguucuccgucaacgccggcgucaccacccccgucuccaccuacaugcucaccaacuccgagcuccucucccucaucaacgacaugcccaucaccaacgaccagaagaagcucauguccaacaacguccagaucguccgccagcaguccuacuccaucaugugcaucaucaaggaggagguccucgccuacgucguccagcucccccucuacggcgucaucgacacccccugcuggaagcuccacaccuccccccucugcaccaccaacaccaaggagggcuccaacaucugccucacccgcaccgaccgcggcugguacugcgacaacgccggcuccgucuccuucuucccccaggccgagaccugcaagguccaguccaaccgcgucuucugcgacaccaugaacucccucacccuccccuccgaggucaaccucugcaacaucgacaucuucaaccccaaguacgacugcaagaucaugaccuccaagaccgacgucuccuccuccgucaucaccucccucggcgccaucgucuccugcuacggcaagaccaagugcaccgccuccaacaagaaccgcggcaucaucaagaccuucuccaacggcugcgacuacgucuccaacaagggcgucgacaccgucuccgucggcaacacccucuacugcgucaacaagcaggagggccagucccucuacgucaagggcgagcccaucaucaacuucuacgacccccucgucuuccccuccgacgaguucgacgccuccaucucccaggucaacgagaagaucaaccagucccucgccuucauccgcaaguccgacgagcuccuccacaacgucaacgucggcaaguccaccaccaacaucaugaucaccaccaucaucaucgucaucaucgucauccuccuccuccucaucgccgucggccucuuccucuacugcaaggcccgcugaggacuaguguccaccugucccuccugggcugcuggauugucucguuuuccugccaaauaaacaggaucagcgcuuuacagaucuaaaaaaaaaaaaaaaaaaaaaaaaaaaaaaaaaaaaaaaaaaaaaaaaaaaaaaaaaaaaaaaaugcaucccccccccccccccccccccccccccccccaaaggcucuuuucagagccaccagaauu

SEQ ID NO: 14377 - RNA, 1834 nt, Artificial Sequence
  mRNA product Design b-3 comprising derived and/or modified sequence from HRSV(Memphis-37)__AIY60640.1__F-del_DSCav1_mut1 (opt3)
gggagagucccgcagucggcguccagcggcucugcuuguucgugugugugucguugcaggccuuauucaagcuuaccauggagcugcccauccucaagaccaacgccauuacaacuauacuugcugcagugacgcugugcuucgccagcucccagaauaucaccgaagaguuuuaccaaucuacauguucagcggucaguaaaggcuauuugggggcuuuaagaacuggaugguacaccagcguuauuacaaucgaacuguccaacauuaaggagaauaaaugcaacgguaccgacgccaaggugaaacuaaucaagcaggaacucgauaaguauaaaaaugcaguaacugagcugcagcuucugaugcagucuacuccugccgcuggcucggggucagcaauauguagcggaaucgccgugugcaaggucuugcaccucgagggcgaagugaacaaaauuaagaaugcucugcugaguaccaacaaagccguugugucccucucuaauggugucagcguguuaacguucaagguacuggaccuuaagaacuacaucgauaaacaauugcugccaauucuaaauaagcaguccuguucaaucccgaacauagagacuguuauugaauuucagcagaaaaauaacaggcuccuggagaucacccgggaguucagugugaaugcgggggucacaacucccgugagcaccuauaugcuuacaaacucugaacuguugucccucauuaacgacaugccuaucaccaaugaucaaaagaaacugaugucaaacaaugugcagaucguccgccagcagagcuacaguauuaugugcauaaucaaggaggaaguuuuagcauaugugguacaacugccacucuacggagugauugacacgcccuguuggaaacuucauacuucuccucugugcacaaccaacacuaaggagggcuccaauaucuguuugacacgaaccgaucguggcugguacugcgacaacgccgggagcgucucguuuuucccacaggcugaaacguguaaggugcagucuaauagaguguuuugcgauaccaugaacucccuaacacugcccucagagguuaaucucugcaacauagacauuuucaauccuaaauaugauuguaagaucaugacaaguaaaaccgacgucagcuccucugugaucacaagccugggagccauuguaucaugcuacgguaagacuaaauguaccgcaaguaacaagaauaggggcaucauuaagacauuuuccaacgggugcgauuauguuagcaauaaaggaguggacaccgucucugugggcaacacucuuuacugugucaacaagcaagagggucagucacuguaugugaaaggggaaccaauaaucaauuucuacgacccguugguuuuucccagugaugaguucgacgcuagcauuucccaggugaacgaaaagaucaaucagucucucgccuuuauccggaaaucggaugagcuguuacacaacguaaaugucggaaagagcacgacaaacauuaugauaaccacuaucauuaucgugauuaucguuauacugcuacuccugaucgcggugggccuuuucuuguauugcaaggcccgcugaggacuaguguccaccugucccuccugggcugcuggauugucucguuuuccugccaaauaaacaggaucagcgcuuuacagaucuaaaaaaaaaaaaaaaaaaaaaaaaaaaaaaaaaaaaaaaaaaaaaaaaaaaaaaaaaaaaaaaaugcaucccccccccccccccccccccccccccccccaaaggcucuuuucagagccaccagaauu

SEQ ID NO: 14378 - RNA, 1834 nt, Artificial Sequence
  mRNA product Design b-3 comprising derived and/or modified sequence from HRSV(Memphis-37)__AIY60640.1__F-del_DSCav1_mut1 (opt4)
gggagagucccgcagucggcguccagcggcucugcuuguucgugugugugucguugcaggccuuauucaagcuuaccauggagcugcccauccugaagaccaacgccaucaccaccauccuggccgccgugacccugugcuucgccagcagccagaacaucaccgaggaguucuaccagagcaccugcagcgccgugagcaagggcuaccugggcgcccugagaaccggcugguacaccagcgugaucaccaucgagcugagcaacaucaaggagaacaagugcaacggcaccgacgccaaggugaagcugaucaagcaggagcuggacaaguacaagaacgccgugaccgagcugcagcugcugaugcagagcacccccgccgccggcagcggcagcgccaucugcagcggcaucgccgugugcaaggugcugcaccuggagggcgaggugaacaagaucaagaacgcccugcugagcaccaacaaggccguggugagccugagcaacggcgugagcgugcugaccuucaaggugcuggaccugaagaacuacaucgacaagcagcugcugcccauccugaacaagcagagcugcagcauccccaacaucgagaccgugaucgaguuccagcagaagaacaacagacugcuggagaucaccagagaguucagcgugaacgccggcgugaccacccccgugagcaccuacaugcugaccaacagcgagcugcugagccugaucaacgacaugcccaucaccaacgaccagaagaagcugaugagcaacaacgugcagaucgugagacagcagagcuacagcaucaugugcaucaucaaggaggaggugcuggccuacguggugcagcugccccuguacggcgugaucgacacccccugcuggaagcugcacaccagcccccugugcaccaccaacaccaaggagggcagcaacaucugccugaccagaaccgacagaggcugguacugcgacaacgccggcagcgugagcuucuucccccaggccgagaccugcaaggugcagagcaacagaguguucugcgacaccaugaacagccugacccugcccagcgaggugaaccugugcaacaucgacaucuucaaccccaaguacgacugcaagaucaugaccagcaagaccgacgugagcagcagcgugaucaccagccugggcgccaucgugagcugcuacggcaagaccaagugcaccgccagcaacaagaacagaggcaucaucaagaccuucagcaacggcugcgacuacgugagcaacaagggcguggacaccgugagcgugggcaacacccuguacugcgugaacaagcaggagggccagagccuguacgugaagggcgagcccaucaucaacuucuacgacccccugguguuccccagcgacgaguucgacgccagcaucagccaggugaacgagaagaucaaccagagccuggccuucaucagaaagagcgacgagcugcugcacaacgugaacgugggcaagagcaccaccaacaucaugaucaccaccaucaucaucgugaucaucgugauccugcugcugcugaucgccgugggccuguuccuguacugcaaggccagaugaggacuaguguccaccugucccuccugggcugcuggauugucucguuuuccugccaaauaaacaggaucagcgcuuuacagaucuaaaaaaaaaaaaaaaaaaaaaaaaaaaaaaaaaaaaaaaaaaaaaaaaaaaaaaaaaaaaaaaaugcaucccccccccccccccccccccccccccccccaaaggcucuuuucagagccaccagaauu

SEQ ID NO: 14379 - RNA, 1834 nt, Artificial Sequence
  mRNA product Design b-3 comprising derived and/or modified sequence from HRSV(Memphis-37)__AIY60640.1__F-del_DSCav1_mut1 (opt5)
gggagagucccgcagucggcguccagcggcucugcuuguucgugugugugucguugcaggccuuauucaagcuuaccauggagcugcccauccucaagaccaacgccauuacaacgauccuggcugccgugacccuuugcuucgcgagcucccagaauauuacagaagaguuuuaccaaucuaccuguagcgcugucuccaaaggcuaucugggggcccucagaacaggaugguacaccucuguuaucacaauugaacugagcaacaucaaggagaauaaaugcaacggcaccgacgccaaggugaaacuuaucaagcaggaacuggauaaguauaaaaaugcugugacggagcuccagcugcugaugcaguccaccccugccgcugggucuggaagcgccauuuguuccggcaucgcggucugcaaggugcuccaccuggagggggaaguuaacaaaauuaagaaugcccuucugagcacaaacaaagcuguggucucucucuccaauggagugagcguucugaccuucaaggugcuugaccugaagaacuacaucgauaaacaacuccugccgauucugaauaagcagucuuguuccauccccaacauugagacagucaucgaauuucagcagaaaaauaaccggcuccuggagaucacccgcgaguucagcgugaaugccggcgugacgacaccugucucuaccuauaugcuuacaaacuccgaacugcucagccugauuaacgacaugcccaucaccaaugaucaaaagaaacuuauguccaacaauguucagauugugagacagcagucuuacagcaucaugugcauuaucaaggaggaagugcuggcuuaugucgugcaacucccucuguacggcguuaucgacacccccuguuggaaacugcauacauccccucucugcacgaccaacacaaaggaggggagcaauauuugucugacccggacagaucgcggaugguacugcgacaacgccggcucuguguccuuuuucccgcaggcggaaaccuguaagguccagagcaauagaguguuuugcgauacgaugaacucucuuacacugcccagcgagguuaaucucugcaacaucgacauuuucaauccuaaauaugauuguaagaucaugaccuccaaaaccgacgugucuagcuccgucauuacaagccugggggccaucgugucuugcuacggaaagaccaaauguacagcuuccaacaagaaucggggcaucauuaagacguuuagcaacgggugcgauuaugucucuaauaaaggaguggacaccguuuccgugggcaacacacuuuacugugucaacaagcaagagggccagagccuguaugugaaaggggaacccaucauuaauuucuacgacccucucguuuuucccuccgaugaguucgacgccucuaucagccaggugaacgaaaagauuaaucagucccuggcuuuuauccgcaaaucugaugagcugcuccacaacgucaaugugggaaagagcaccacaaacauuaugaucaccacgaucauuaucgugauuaucguuauucugcuucugcucaucgccgucggccuguuccuguauugcaaggccagaugaggacuaguguccaccugucccuccugggcugcuggauugucucguuuuccugccaaauaaacaggaucagcgcuuuacagaucuaaaaaaaaaaaaaaaaaaaaaaaaaaaaaaaaaaaaaaaaaaaaaaaaaaaaaaaaaaaaaaaaugcaucccccccccccccccccccccccccccccccaaaggcucuuuucagagccaccagaauu

SEQ ID NO: 14380 - RNA, 1834 nt, Artificial Sequence
  mRNA product Design b-3 comprising derived and/or modified sequence from HRSV(Memphis-37)__AIY60640.1__F-del_DSCav1_mut1 (opt6)
gggagagucccgcagucggcguccagcggcucugcuuguucgugugugugucguugcaggccuuauucaagcuuaccauggaauuaccaauacuaaaaacaaacgcaauaacaacaauucuagcagcaguaacauuaugcuuugcaucaucccaaaacaucacagaagaauuuuaucaaucaaccugcucagcaguuuccaaaggauacuuaggagcauuaagaacugguugguacacuucaguaaucaccaucgaacucucaaacaucaaggaaaacaaaugcaacggaacagacgcaaaaguuaaacucauaaaacaagaacuugacaaauacaaaaacgccguaacagaacuacaacuucucaugcaaucaacacccgcagcaggauccggaucagccauaugcucaggcauagcaguauguaaaguauuacaucuugaaggugaaguaaacaaaauaaaaaacgcacuucuaucaaccaacaaagcaguaguaucacuaucaaacggaguauccgucuuaacauuuaaaguucuagaccucaaaaacuauauagacaaacaauuacugccaauccucaauaaacaaucaugcucaauaccaaacaucgaaacaguaauagaauuucaacaaaaaaacaacagacuacuagaaauaacaagagaauuuuccgucaacgccggcguaacuacuccaguaucaacauauaugcuaaccaacucagaacuccuaucccucauaaacgacaugccaauaacuaaugaucaaaaaaaacuaaugucaaacaauguacaaauaguuagacaacaaucauacucaaucaugugcauaauaaaagaagaaguacuagcauacgucguccaacuaccccuauacggaguaauagacacaccuugcuggaaacuacacacaucaccccuaugcacaacaaauacaaaagaagguuccaacaucugccuaacaagaacugauagaggaugguacugcgacaacgccggaucaguaucauucuucccucaagcugaaaccugcaaaguacaaucaaacagaguauuuugcgauacaaugaacucccuaacacuucccucagaaguuaaucuuuguaauauagauauauucaacccaaaauacgacugcaaaauaaugacaaguaaaacagacguauccucaucuguaauuacaucacuaggagccauaguaucuugcuacggcaaaaccaaaugcacagcaucaaacaaaaacagagguauuaucaaaaccuucucaaacggaugugacuacguuucaaacaaaggaguagacacaguaucagucggaaacacccuauacuguguuaacaaacaagaaggacaaucacuguacguaaaaggagaacccauaauaaauuucuacgacccacuuguauuuccaucagacgaauuugaugcaucaaucucacaaguaaaugaaaaaauaaaccaaucauuagcauucauaagaaaaucugacgaguuacuacacaacguaaauguuggcaaaucaacaaccaauauaaugauaacaacaauaauaauaguaauaauagucauauuacuccuccucauagccgucggauuauucuuauacugcaaagcaagauaaggacuaguguccaccugucccuccugggcugcuggauugucucguuuuccugccaaauaaacaggaucagcgcuuuacagaucuaaaaaaaaaaaaaaaaaaaaaaaaaaaaaaaaaaaaaaaaaaaaaaaaaaaaaaaaaaaaaaaaugcaucccccccccccccccccccccccccccccccaaaggcucuuuucagagccaccagaauu

SEQ ID NO: 14381 - RNA, 1834 nt, Artificial Sequence
  mRNA product Design b-3 comprising derived and/or modified sequence from HRSV(Memphis-37)__AIY60640.1__F-del_DSCav1_mut1 (opt11)
gggagagucccgcagucggcguccagcggcucugcuuguucgugugugugucguugcaggccuuauucaagcuuaccauggaacuccccauacuaaaaaccaacgccaucacaacaauccucgccgccgucacacucugcuucgccagcucccaaaacaucaccgaagaguucuaucaaucaaccugcuccgcagucucaaagggauaccucggagcccuccgcaccggaugguacacuuccgucaucacaauagaacucuccaacaucaaagaaaacaaaugcaacggcaccgacgcaaaagucaagcucaucaaacaagaacucgacaaauauaaaaacgccgucaccgaacuccaacuacucaugcaauccacacccgcggccggcucaggcagcgccaucugcucaggcaucgccgucugcaaaguccuccaccucgaaggcgaagucaacaaaaucaaaaacgcccuucuuucaaccaacaaggcaguaguaucccucucaaacggcgucagcguccugaccuucaaaguccuagaccucaaaaacuacauagauaaacaacuccuccccauacugaacaaacaaucgugcuccauccccaauaucgaaaccgucauagaguuccagcagaaaaacaacagacuucucgaaauaacccgagaguucucaguaaacgccggagucaccacacccguaagcaccuacaugcucacaaacucagaacuccuaucccucaucaacgacaugcccaucaccaacgaccagaaaaagcuaauguccaacaacguccaaauaguacgccaacaaagcuacucgauaaugugcaucaucaaggaagaaguacucgccuacgucguccaacucccccucuacggcguaaucgacacacccugcuggaaacuccacacguccccacucugcacaacaaacacaaaagaaggauccaacauaugccuaacccgcaccgacaggggcugguacugcgacaacgcaggcucagucagcuucuuuccccaagccgaaacaugcaaaguccaauccaaccgugucuucugcgacaccaugaacucgcucacccuacccucggaagucaaucucugcaacaucgacaucuucaacccaaaauacgacuguaaaaucaugaccagcaaaacagacguuucuuccagcgucaucacaucacucggcgcgaucguaucaugcuauggcaaaacaaagugcaccgcuagcaauaaaaaccgaggaaucauaaaaaccuucagcaacggcugcgacuacguauccaacaaaggcgucgacaccguauccgucggaaacacccucuacugcgucaacaagcaagaaggacaaucacucuacgucaaaggcgaaccaaucauaaacuucuacgacccacucguauuccccucagacgaguucgacgcauccaucucccaagucaacgaaaagaucaaccaaucucucgccuuuauacgcaaaagcgacgaacuccuucacaacguaaacgucggcaaaagcaccacuaacauaaugaucaccacaaucauaauaguaaucaucguaauacuccuccuacucaucgccgugggccuauuccucuauugcaaagcccgauaaggacuaguguccaccugucccuccugggcugcuggauugucucguuuuccugccaaauaaacaggaucagcgcuuuacagaucuaaaaaaaaaaaaaaaaaaaaaaaaaaaaaaaaaaaaaaaaaaaaaaaaaaaaaaaaaaaaaaaaugcaucccccccccccccccccccccccccccccccaaaggcucuuuucagagccaccagaauu

SEQ ID NO: 14382 - RNA, 1885 nt, Artificial Sequence
  mRNA product Design b-4 comprising derived and/or modified sequence from HRSV(Memphis-37)__AIY60640.1__F-del_DSCav1_mut1 (opt1)
gggagagucccgcagucggcguccagcggcucugcuuguucgugugugugucguugcaggccuuauucaagcuuaccauggagcugcccauccucaagaccaacgccaucaccacgauccuggccgcggugacccugugcuucgccagcucccagaacaucaccgaggaguucuaccagagcacgugcuccgccgucagcaagggcuaccucggcgcccugcgcaccgggugguacaccagcgugaucaccaucgagcuguccaacaucaaggagaacaagugcaacggcaccgacgccaaggugaagcucaucaagcaggagcuggacaaguacaagaacgcggucacggagcugcagcuccugaugcagagcaccccggccgccggcuccgggagcgcgaucugcuccggcaucgccgucugcaaggugcugcaccucgagggcgaggugaacaagaucaagaacgcccugcuguccaccaacaaggccgucgugagccucuccaacggggugagcguccugaccuucaaggugcuggaccucaagaacuacaucgacaagcagcugcugcccauccugaacaagcagagcugcuccauccccaacaucgagaccgucaucgaguuccagcagaagaacaaccgccuccuggagaucacgcgggaguucagcgugaacgcgggcgugaccacccccgucuccaccuacaugcugacgaacagcgagcuccugucccugaucaacgacaugccgaucaccaacgaccagaagaagcucaugagcaacaacgugcagaucgugcgccagcaguccuacagcaucaugugcaucaucaaggaggagguccuggccuacguggugcagcugccccucuacggggucaucgacacccccugcuggaagcugcacaccagcccccugugcacgaccaacaccaaggagggcuccaacaucugccucacccggacggaccgcgggugguacugcgacaacgccggcagcguguccuucuucccgcaggccgagaccugcaagguccagagcaaccggguguucugcgacaccaugaacucccugacccugcccagcgaggugaaccucugcaacaucgacaucuucaaccccaaguacgacugcaagaucaugacguccaagaccgacgucagcuccagcgugaucaccucccugggcgccaucgugagcugcuacgggaagaccaagugcacggcgagcaacaagaaccgcggcaucaucaagaccuucuccaacgggugcgacuacgucagcaacaagggcguggacaccguguccgucggcaacacccuguacugcgugaacaagcaggagggccagagccucuacgugaagggggagcccaucaucaacuucuacgacccgcuggucuuccccuccgacgaguucgacgccagcaucucccaggugaacgagaagaucaaccagagccuggccuucauccggaaguccgacgagcuccugcacaacgugaacgucggcaagagcaccacgaacaucaugaucaccaccaucaucaucgugaucaucgugauccugcugcuccugaucgccgucgggcuguuccucuacugcaaggcccgcugaggacuaguaauaaggaaacuguaugaaugucugugggcaggaagugaagagauccuucuguaaagguuuuuggaauuaugucugcugaauaauaaacuuuuuugaaauaauaaaucugguagaaaaaugagaucuaaaaaaaaaaaaaaaaaaaaaaaaaaaaaaaaaaaaaaaaaaaaaaaaaaaaaaaaaaaaaaaaugcaucccccccccccccccccccccccccccccccaaaggcucuuuucagagccaccagaauu

SEQ ID NO: 14383 - RNA, 1885 nt, Artificial Sequence
  mRNA product Design b-4 comprising derived and/or modified sequence from HRSV(Memphis-37)__AIY60640.1__F-del_DSCav1_mut1 (opt1)
gggagagucccgcagucggcguccagcggcucugcuuguucgugugugugucguugcaggccuuauucaagcuuaccauggagcugcccauccucaagaccaacgccaucaccacgauccuggccgcggugacccugugcuucgccagcucccagaacaucaccgaggaguucuaccagagcacgugcuccgccgucagcaagggcuaccucggggcccugcgcaccggcugguacaccuccgugaucaccaucgagcugagcaacaucaaggagaacaagugcaacgggaccgacgccaaggugaagcucaucaagcaggagcuggacaaguacaagaacgcggucacggagcugcagcuccugaugcaguccaccccggccgccggcagcggguccgccaucugcagcggcaucgcggugugcaaggugcugcaccucgagggcgaggucaacaagaucaagaacgcccugcuguccaccaacaaggccguggugagccucuccaacggggucagcgugcugaccuucaaggugcuggaccucaagaacuacaucgacaagcagcugcugcccauccucaacaagcaguccugcagcauccccaacaucgagacggucaucgaguuccagcagaagaacaaccggcugcuggagaucacccgcgaguucuccgugaacgccggcgugaccacccccgucagcacguacaugcucaccaacuccgagcugcugagccucaucaacgacaugccgaucaccaacgaccagaagaagcugaugagcaacaacgugcagaucgugcggcagcaguccuacagcaucaugugcaucaucaaggaggagguccuggccuacguggugcagcucccccuguacggggucaucgacacccccugcuggaagcugcacacgagcccccucugcaccaccaacaccaaggagggcuccaacaucugccugacgcgcaccgaccgggggugguacugcgacaacgcgggcuccgugagcuucuucccgcaggccgagaccugcaaggugcaguccaaccgcgucuucugcgacaccaugaacagccugacgcuccccuccgaggugaaccugugcaacaucgacaucuucaaccccaaguacgacugcaagaucaugaccagcaagaccgacgucuccagcuccgugaucaccagccugggcgccaucguguccugcuacgggaagacgaagugcaccgccagcaacaagaaccggggcaucaucaagaccuucuccaacgggugcgacuacgucagcaacaagggcguggacaccguguccgucggcaacacgcucuacugcgugaacaagcaggaggggcagagccuguacgugaagggcgagcccaucaucaacuucuacgacccgcuggucuuccccagcgacgaguucgacgccuccaucagccaggugaacgagaagaucaaccagucccucgcguucauccgcaagagcgacgagcugcugcacaacgugaacgucgggaaguccaccaccaacaucaugaucaccaccaucaucaucgugaucaucgugauccuccugcugcucaucgccgucggccuguuccuguacugcaaggcccggugaggacuaguaauaaggaaacuguaugaaugucugugggcaggaagugaagagauccuucuguaaagguuuuuggaauuaugucugcugaauaauaaacuuuuuugaaauaauaaaucugguagaaaaaugagaucuaaaaaaaaaaaaaaaaaaaaaaaaaaaaaaaaaaaaaaaaaaaaaaaaaaaaaaaaaaaaaaaaugcaucccccccccccccccccccccccccccccccaaaggcucuuuucagagccaccagaauu

SEQ ID NO: 14384 - RNA, 1885 nt, Artificial Sequence
  mRNA product Design b-4 comprising derived and/or modified sequence from HRSV(Memphis-37)__AIY60640.1__F-del_DSCav1_mut1 (opt2)
gggagagucccgcagucggcguccagcggcucugcuuguucgugugugugucguugcaggccuuauucaagcuuaccauggagcuccccauccucaagaccaacgccaucaccaccauccucgccgccgucacccucugcuucgccuccucccagaacaucaccgaggaguucuaccaguccaccugcuccgccgucuccaagggcuaccucggcgcccuccgcaccggcugguacaccuccgucaucaccaucgagcucuccaacaucaaggagaacaagugcaacggcaccgacgccaaggucaagcucaucaagcaggagcucgacaaguacaagaacgccgucaccgagcuccagcuccucaugcaguccacccccgccgccggcuccggcuccgccaucugcuccggcaucgccgucugcaagguccuccaccucgagggcgaggucaacaagaucaagaacgcccuccucuccaccaacaaggccgucgucucccucuccaacggcgucuccguccucaccuucaagguccucgaccucaagaacuacaucgacaagcagcuccuccccauccucaacaagcaguccugcuccauccccaacaucgagaccgucaucgaguuccagcagaagaacaaccgccuccucgagaucacccgcgaguucuccgucaacgccggcgucaccacccccgucuccaccuacaugcucaccaacuccgagcuccucucccucaucaacgacaugcccaucaccaacgaccagaagaagcucauguccaacaacguccagaucguccgccagcaguccuacuccaucaugugcaucaucaaggaggagguccucgccuacgucguccagcucccccucuacggcgucaucgacacccccugcuggaagcuccacaccuccccccucugcaccaccaacaccaaggagggcuccaacaucugccucacccgcaccgaccgcggcugguacugcgacaacgccggcuccgucuccuucuucccccaggccgagaccugcaagguccaguccaaccgcgucuucugcgacaccaugaacucccucacccuccccuccgaggucaaccucugcaacaucgacaucuucaaccccaaguacgacugcaagaucaugaccuccaagaccgacgucuccuccuccgucaucaccucccucggcgccaucgucuccugcuacggcaagaccaagugcaccgccuccaacaagaaccgcggcaucaucaagaccuucuccaacggcugcgacuacgucuccaacaagggcgucgacaccgucuccgucggcaacacccucuacugcgucaacaagcaggagggccagucccucuacgucaagggcgagcccaucaucaacuucuacgacccccucgucuuccccuccgacgaguucgacgccuccaucucccaggucaacgagaagaucaaccagucccucgccuucauccgcaaguccgacgagcuccuccacaacgucaacgucggcaaguccaccaccaacaucaugaucaccaccaucaucaucgucaucaucgucauccuccuccuccucaucgccgucggccucuuccucuacugcaaggcccgcugaggacuaguaauaaggaaacuguaugaaugucugugggcaggaagugaagagauccuucuguaaagguuuuuggaauuaugucugcugaauaauaaacuuuuuugaaauaauaaaucugguagaaaaaugagaucuaaaaaaaaaaaaaaaaaaaaaaaaaaaaaaaaaaaaaaaaaaaaaaaaaaaaaaaaaaaaaaaaugcaucccccccccccccccccccccccccccccccaaaggcucuuuucagagccaccagaauu

SEQ ID NO: 14385 - RNA, 1885 nt, Artificial Sequence
  mRNA product Design b-4 comprising derived and/or modified sequence from HRSV(Memphis-37)__AIY60640.1__F-del_DSCav1_mut1 (opt3)
gggagagucccgcagucggcguccagcggcucugcuuguucgugugugugucguugcaggccuuauucaagcuuaccauggagcugcccauccucaagaccaacgccauuacaacuauacuugcugcagugacgcugugcuucgccagcucccagaauaucaccgaagaguuuuaccaaucuacauguucagcggucaguaaaggcuauuugggggcuuuaagaacuggaugguacaccagcguuauuacaaucgaacuguccaacauuaaggagaauaaaugcaacgguaccgacgccaaggugaaacuaaucaagcaggaacucgauaaguauaaaaaugcaguaacugagcugcagcuucugaugcagucuacuccugccgcuggcucggggucagcaauauguagcggaaucgccgugugcaaggucuugcaccucgagggcgaagugaacaaaauuaagaaugcucugcugaguaccaacaaagccguugugucccucucuaauggugucagcguguuaacguucaagguacuggaccuuaagaacuacaucgauaaacaauugcugccaauucuaaauaagcaguccuguucaaucccgaacauagagacuguuauugaauuucagcagaaaaauaacaggcuccuggagaucacccgggaguucagugugaaugcgggggucacaacucccgugagcaccuauaugcuuacaaacucugaacuguugucccucauuaacgacaugccuaucaccaaugaucaaaagaaacugaugucaaacaaugugcagaucguccgccagcagagcuacaguauuaugugcauaaucaaggaggaaguuuuagcauaugugguacaacugccacucuacggagugauugacacgcccuguuggaaacuucauacuucuccucugugcacaaccaacacuaaggagggcuccaauaucuguuugacacgaaccgaucguggcugguacugcgacaacgccgggagcgucucguuuuucccacaggcugaaacguguaaggugcagucuaauagaguguuuugcgauaccaugaacucccuaacacugcccucagagguuaaucucugcaacauagacauuuucaauccuaaauaugauuguaagaucaugacaaguaaaaccgacgucagcuccucugugaucacaagccugggagccauuguaucaugcuacgguaagacuaaauguaccgcaaguaacaagaauaggggcaucauuaagacauuuuccaacgggugcgauuauguuagcaauaaaggaguggacaccgucucugugggcaacacucuuuacugugucaacaagcaagagggucagucacuguaugugaaaggggaaccaauaaucaauuucuacgacccguugguuuuucccagugaugaguucgacgcuagcauuucccaggugaacgaaaagaucaaucagucucucgccuuuauccggaaaucggaugagcuguuacacaacguaaaugucggaaagagcacgacaaacauuaugauaaccacuaucauuaucgugauuaucguuauacugcuacuccugaucgcggugggccuuuucuuguauugcaaggcccgcugaggacuaguaauaaggaaacuguaugaaugucugugggcaggaagugaagagauccuucuguaaagguuuuuggaauuaugucugcugaauaauaaacuuuuuugaaauaauaaaucugguagaaaaaugagaucuaaaaaaaaaaaaaaaaaaaaaaaaaaaaaaaaaaaaaaaaaaaaaaaaaaaaaaaaaaaaaaaaugcaucccccccccccccccccccccccccccccccaaaggcucuuuucagagccaccagaauu

SEQ ID NO: 14386 - RNA, 1885 nt, Artificial Sequence
  mRNA product Design b-4 comprising derived and/or modified sequence from HRSV(Memphis-37)__AIY60640.1__F-del_DSCav1_mut1 (opt4)
gggagagucccgcagucggcguccagcggcucugcuuguucgugugugugucguugcaggccuuauucaagcuuaccauggagcugcccauccugaagaccaacgccaucaccaccauccuggccgccgugacccugugcuucgccagcagccagaacaucaccgaggaguucuaccagagcaccugcagcgccgugagcaagggcuaccugggcgcccugagaaccggcugguacaccagcgugaucaccaucgagcugagcaacaucaaggagaacaagugcaacggcaccgacgccaaggugaagcugaucaagcaggagcuggacaaguacaagaacgccgugaccgagcugcagcugcugaugcagagcacccccgccgccggcagcggcagcgccaucugcagcggcaucgccgugugcaaggugcugcaccuggagggcgaggugaacaagaucaagaacgcccugcugagcaccaacaaggccguggugagccugagcaacggcgugagcgugcugaccuucaaggugcuggaccugaagaacuacaucgacaagcagcugcugcccauccugaacaagcagagcugcagcauccccaacaucgagaccgugaucgaguuccagcagaagaacaacagacugcuggagaucaccagagaguucagcgugaacgccggcgugaccacccccgugagcaccuacaugcugaccaacagcgagcugcugagccugaucaacgacaugcccaucaccaacgaccagaagaagcugaugagcaacaacgugcagaucgugagacagcagagcuacagcaucaugugcaucaucaaggaggaggugcuggccuacguggugcagcugccccuguacggcgugaucgacacccccugcuggaagcugcacaccagcccccugugcaccaccaacaccaaggagggcagcaacaucugccugaccagaaccgacagaggcugguacugcgacaacgccggcagcgugagcuucuucccccaggccgagaccugcaaggugcagagcaacagaguguucugcgacaccaugaacagccugacccugcccagcgaggugaaccugugcaacaucgacaucuucaaccccaaguacgacugcaagaucaugaccagcaagaccgacgugagcagcagcgugaucaccagccugggcgccaucgugagcugcuacggcaagaccaagugcaccgccagcaacaagaacagaggcaucaucaagaccuucagcaacggcugcgacuacgugagcaacaagggcguggacaccgugagcgugggcaacacccuguacugcgugaacaagcaggagggccagagccuguacgugaagggcgagcccaucaucaacuucuacgacccccugguguuccccagcgacgaguucgacgccagcaucagccaggugaacgagaagaucaaccagagccuggccuucaucagaaagagcgacgagcugcugcacaacgugaacgugggcaagagcaccaccaacaucaugaucaccaccaucaucaucgugaucaucgugauccugcugcugcugaucgccgugggccuguuccuguacugcaaggccagaugaggacuaguaauaaggaaacuguaugaaugucugugggcaggaagugaagagauccuucuguaaagguuuuuggaauuaugucugcugaauaauaaacuuuuuugaaauaauaaaucugguagaaaaaugagaucuaaaaaaaaaaaaaaaaaaaaaaaaaaaaaaaaaaaaaaaaaaaaaaaaaaaaaaaaaaaaaaaaugcaucccccccccccccccccccccccccccccccaaaggcucuuuucagagccaccagaauu

SEQ ID NO: 14387 - RNA, 1885 nt, Artificial Sequence
  mRNA product Design b-4 comprising derived and/or modified sequence from HRSV(Memphis-37)__AIY60640.1__F-del_DSCav1_mut1 (opt5)
gggagagucccgcagucggcguccagcggcucugcuuguucgugugugugucguugcaggccuuauucaagcuuaccauggagcugcccauccucaagaccaacgccauuacaacgauccuggcugccgugacccuuugcuucgcgagcucccagaauauuacagaagaguuuuaccaaucuaccuguagcgcugucuccaaaggcuaucugggggcccucagaacaggaugguacaccucuguuaucacaauugaacugagcaacaucaaggagaauaaaugcaacggcaccgacgccaaggugaaacuuaucaagcaggaacuggauaaguauaaaaaugcugugacggagcuccagcugcugaugcaguccaccccugccgcugggucuggaagcgccauuuguuccggcaucgcggucugcaaggugcuccaccuggagggggaaguuaacaaaauuaagaaugcccuucugagcacaaacaaagcuguggucucucucuccaauggagugagcguucugaccuucaaggugcuugaccugaagaacuacaucgauaaacaacuccugccgauucugaauaagcagucuuguuccauccccaacauugagacagucaucgaauuucagcagaaaaauaaccggcuccuggagaucacccgcgaguucagcgugaaugccggcgugacgacaccugucucuaccuauaugcuuacaaacuccgaacugcucagccugauuaacgacaugcccaucaccaaugaucaaaagaaacuuauguccaacaauguucagauugugagacagcagucuuacagcaucaugugcauuaucaaggaggaagugcuggcuuaugucgugcaacucccucuguacggcguuaucgacacccccuguuggaaacugcauacauccccucucugcacgaccaacacaaaggaggggagcaauauuugucugacccggacagaucgcggaugguacugcgacaacgccggcucuguguccuuuuucccgcaggcggaaaccuguaagguccagagcaauagaguguuuugcgauacgaugaacucucuuacacugcccagcgagguuaaucucugcaacaucgacauuuucaauccuaaauaugauuguaagaucaugaccuccaaaaccgacgugucuagcuccgucauuacaagccugggggccaucgugucuugcuacggaaagaccaaauguacagcuuccaacaagaaucggggcaucauuaagacguuuagcaacgggugcgauuaugucucuaauaaaggaguggacaccguuuccgugggcaacacacuuuacugugucaacaagcaagagggccagagccuguaugugaaaggggaacccaucauuaauuucuacgacccucucguuuuucccuccgaugaguucgacgccucuaucagccaggugaacgaaaagauuaaucagucccuggcuuuuauccgcaaaucugaugagcugcuccacaacgucaaugugggaaagagcaccacaaacauuaugaucaccacgaucauuaucgugauuaucguuauucugcuucugcucaucgccgucggccuguuccuguauugcaaggccagaugaggacuaguaauaaggaaacuguaugaaugucugugggcaggaagugaagagauccuucuguaaagguuuuuggaauuaugucugcugaauaauaaacuuuuuugaaauaauaaaucugguagaaaaaugagaucuaaaaaaaaaaaaaaaaaaaaaaaaaaaaaaaaaaaaaaaaaaaaaaaaaaaaaaaaaaaaaaaaugcaucccccccccccccccccccccccccccccccaaaggcucuuuucagagccaccagaauu

SEQ ID NO: 14388 - RNA, 1885 nt, Artificial Sequence
  mRNA product Design b-4 comprising derived and/or modified sequence from HRSV(Memphis-37)__AIY60640.1__F-del_DSCav1_mut1 (opt6)
gggagagucccgcagucggcguccagcggcucugcuuguucgugugugugucguugcaggccuuauucaagcuuaccauggaauuaccaauacuaaaaacaaacgcaauaacaacaauucuagcagcaguaacauuaugcuuugcaucaucccaaaacaucacagaagaauuuuaucaaucaaccugcucagcaguuuccaaaggauacuuaggagcauuaagaacugguugguacacuucaguaaucaccaucgaacucucaaacaucaaggaaaacaaaugcaacggaacagacgcaaaaguuaaacucauaaaacaagaacuugacaaauacaaaaacgccguaacagaacuacaacuucucaugcaaucaacacccgcagcaggauccggaucagccauaugcucaggcauagcaguauguaaaguauuacaucuugaaggugaaguaaacaaaauaaaaaacgcacuucuaucaaccaacaaagcaguaguaucacuaucaaacggaguauccgucuuaacauuuaaaguucuagaccucaaaaacuauauagacaaacaauuacugccaauccucaauaaacaaucaugcucaauaccaaacaucgaaacaguaauagaauuucaacaaaaaaacaacagacuacuagaaauaacaagagaauuuuccgucaacgccggcguaacuacuccaguaucaacauauaugcuaaccaacucagaacuccuaucccucauaaacgacaugccaauaacuaaugaucaaaaaaaacuaaugucaaacaauguacaaauaguuagacaacaaucauacucaaucaugugcauaauaaaagaagaaguacuagcauacgucguccaacuaccccuauacggaguaauagacacaccuugcuggaaacuacacacaucaccccuaugcacaacaaauacaaaagaagguuccaacaucugccuaacaagaacugauagaggaugguacugcgacaacgccggaucaguaucauucuucccucaagcugaaaccugcaaaguacaaucaaacagaguauuuugcgauacaaugaacucccuaacacuucccucagaaguuaaucuuuguaauauagauauauucaacccaaaauacgacugcaaaauaaugacaaguaaaacagacguauccucaucuguaauuacaucacuaggagccauaguaucuugcuacggcaaaaccaaaugcacagcaucaaacaaaaacagagguauuaucaaaaccuucucaaacggaugugacuacguuucaaacaaaggaguagacacaguaucagucggaaacacccuauacuguguuaacaaacaagaaggacaaucacuguacguaaaaggagaacccauaauaaauuucuacgacccacuuguauuuccaucagacgaauuugaugcaucaaucucacaaguaaaugaaaaaauaaaccaaucauuagcauucauaagaaaaucugacgaguuacuacacaacguaaauguuggcaaaucaacaaccaauauaaugauaacaacaauaauaauaguaauaauagucauauuacuccuccucauagccgucggauuauucuuauacugcaaagcaagauaaggacuaguaauaaggaaacuguaugaaugucugugggcaggaagugaagagauccuucuguaaagguuuuuggaauuaugucugcugaauaauaaacuuuuuugaaauaauaaaucugguagaaaaaugagaucuaaaaaaaaaaaaaaaaaaaaaaaaaaaaaaaaaaaaaaaaaaaaaaaaaaaaaaaaaaaaaaaaugcaucccccccccccccccccccccccccccccccaaaggcucuuuucagagccaccagaauu

SEQ ID NO: 14389 - RNA, 1885 nt, Artificial Sequence
  mRNA product Design b-4 comprising derived and/or modified sequence from HRSV(Memphis-37)__AIY60640.1__F-del_DSCav1_mut1 (opt11)
gggagagucccgcagucggcguccagcggcucugcuuguucgugugugugucguugcaggccuuauucaagcuuaccauggaacuccccauacuaaaaaccaacgccaucacaacaauccucgccgccgucacacucugcuucgccagcucccaaaacaucaccgaagaguucuaucaaucaaccugcuccgcagucucaaagggauaccucggagcccuccgcaccggaugguacacuuccgucaucacaauagaacucuccaacaucaaagaaaacaaaugcaacggcaccgacgcaaaagucaagcucaucaaacaagaacucgacaaauauaaaaacgccgucaccgaacuccaacuacucaugcaauccacacccgcggccggcucaggcagcgccaucugcucaggcaucgccgucugcaaaguccuccaccucgaaggcgaagucaacaaaaucaaaaacgcccuucuuucaaccaacaaggcaguaguaucccucucaaacggcgucagcguccugaccuucaaaguccuagaccucaaaaacuacauagauaaacaacuccuccccauacugaacaaacaaucgugcuccauccccaauaucgaaaccgucauagaguuccagcagaaaaacaacagacuucucgaaauaacccgagaguucucaguaaacgccggagucaccacacccguaagcaccuacaugcucacaaacucagaacuccuaucccucaucaacgacaugcccaucaccaacgaccagaaaaagcuaauguccaacaacguccaaauaguacgccaacaaagcuacucgauaaugugcaucaucaaggaagaaguacucgccuacgucguccaacucccccucuacggcguaaucgacacacccugcuggaaacuccacacguccccacucugcacaacaaacacaaaagaaggauccaacauaugccuaacccgcaccgacaggggcugguacugcgacaacgcaggcucagucagcuucuuuccccaagccgaaacaugcaaaguccaauccaaccgugucuucugcgacaccaugaacucgcucacccuacccucggaagucaaucucugcaacaucgacaucuucaacccaaaauacgacuguaaaaucaugaccagcaaaacagacguuucuuccagcgucaucacaucacucggcgcgaucguaucaugcuauggcaaaacaaagugcaccgcuagcaauaaaaaccgaggaaucauaaaaaccuucagcaacggcugcgacuacguauccaacaaaggcgucgacaccguauccgucggaaacacccucuacugcgucaacaagcaagaaggacaaucacucuacgucaaaggcgaaccaaucauaaacuucuacgacccacucguauuccccucagacgaguucgacgcauccaucucccaagucaacgaaaagaucaaccaaucucucgccuuuauacgcaaaagcgacgaacuccuucacaacguaaacgucggcaaaagcaccacuaacauaaugaucaccacaaucauaauaguaaucaucguaauacuccuccuacucaucgccgugggccuauuccucuauugcaaagcccgauaaggacuaguaauaaggaaacuguaugaaugucugugggcaggaagugaagagauccuucuguaaagguuuuuggaauuaugucugcugaauaauaaacuuuuuugaaauaauaaaucugguagaaaaaugagaucuaaaaaaaaaaaaaaaaaaaaaaaaaaaaaaaaaaaaaaaaaaaaaaaaaaaaaaaaaaaaaaaaugcaucccccccccccccccccccccccccccccccaaaggcucuuuucagagccaccagaauu

SEQ ID NO: 14390 - RNA, 1947 nt, Artificial Sequence
  mRNA product Design b-5 comprising derived and/or modified sequence from HRSV(Memphis-37)__AIY60640.1__F-del_DSCav1_mut1 (opt1)
gggagacuccugucgggcggaaguaggaggaguagaguuuaaaaacaguacucuuuuuccgguucgggacguaguugaagcaacgacaagccggauaaccgcucuugagacaggaagcuuaccauggagcugcccauccucaagaccaacgccaucaccacgauccuggccgcggugacccugugcuucgccagcucccagaacaucaccgaggaguucuaccagagcacgugcuccgccgucagcaagggcuaccucggcgcccugcgcaccgggugguacaccagcgugaucaccaucgagcuguccaacaucaaggagaacaagugcaacggcaccgacgccaaggugaagcucaucaagcaggagcuggacaaguacaagaacgcggucacggagcugcagcuccugaugcagagcaccccggccgccggcuccgggagcgcgaucugcuccggcaucgccgucugcaaggugcugcaccucgagggcgaggugaacaagaucaagaacgcccugcuguccaccaacaaggccgucgugagccucuccaacggggugagcguccugaccuucaaggugcuggaccucaagaacuacaucgacaagcagcugcugcccauccugaacaagcagagcugcuccauccccaacaucgagaccgucaucgaguuccagcagaagaacaaccgccuccuggagaucacgcgggaguucagcgugaacgcgggcgugaccacccccgucuccaccuacaugcugacgaacagcgagcuccugucccugaucaacgacaugccgaucaccaacgaccagaagaagcucaugagcaacaacgugcagaucgugcgccagcaguccuacagcaucaugugcaucaucaaggaggagguccuggccuacguggugcagcugccccucuacggggucaucgacacccccugcuggaagcugcacaccagcccccugugcacgaccaacaccaaggagggcuccaacaucugccucacccggacggaccgcgggugguacugcgacaacgccggcagcguguccuucuucccgcaggccgagaccugcaagguccagagcaaccggguguucugcgacaccaugaacucccugacccugcccagcgaggugaaccucugcaacaucgacaucuucaaccccaaguacgacugcaagaucaugacguccaagaccgacgucagcuccagcgugaucaccucccugggcgccaucgugagcugcuacgggaagaccaagugcacggcgagcaacaagaaccgcggcaucaucaagaccuucuccaacgggugcgacuacgucagcaacaagggcguggacaccguguccgucggcaacacccuguacugcgugaacaagcaggagggccagagccucuacgugaagggggagcccaucaucaacuucuacgacccgcuggucuuccccuccgacgaguucgacgccagcaucucccaggugaacgagaagaucaaccagagccuggccuucauccggaaguccgacgagcuccugcacaacgugaacgucggcaagagcaccacgaacaucaugaucaccaccaucaucaucgugaucaucgugauccugcugcuccugaucgccgucgggcuguuccucuacugcaaggcccgcugaggacuaguacuggcugcaucucccuuuccucuguccuccauccuucucccaggauggugaagggggaccugguacccagugauccccaccccaggauccuaaaucaugacuuaccugcuaauaaaaacucauuggaaaagugagaagaucuaaaaaaaaaaaaaaaaaaaaaaaaaaaaaaaaaaaaaaaaaaaaaaaaaaaaaaaaaaaaaaaaugcaucccccccccccccccccccccccccccccccaaaggcucuuuucagagccaccagaauu

SEQ ID NO: 14391 - RNA, 1947 nt, Artificial Sequence
  mRNA product Design b-5 comprising derived and/or modified sequence from HRSV(Memphis-37)__AIY60640.1__F-del_DSCav1_mut1 (opt1)
gggagacuccugucgggcggaaguaggaggaguagaguuuaaaaacaguacucuuuuuccgguucgggacguaguugaagcaacgacaagccggauaaccgcucuugagacaggaagcuuaccauggagcugcccauccucaagaccaacgccaucaccacgauccuggccgcggugacccugugcuucgccagcucccagaacaucaccgaggaguucuaccagagcacgugcuccgccgucagcaagggcuaccucggggcccugcgcaccggcugguacaccuccgugaucaccaucgagcugagcaacaucaaggagaacaagugcaacgggaccgacgccaaggugaagcucaucaagcaggagcuggacaaguacaagaacgcggucacggagcugcagcuccugaugcaguccaccccggccgccggcagcggguccgccaucugcagcggcaucgcggugugcaaggugcugcaccucgagggcgaggucaacaagaucaagaacgcccugcuguccaccaacaaggccguggugagccucuccaacggggucagcgugcugaccuucaaggugcuggaccucaagaacuacaucgacaagcagcugcugcccauccucaacaagcaguccugcagcauccccaacaucgagacggucaucgaguuccagcagaagaacaaccggcugcuggagaucacccgcgaguucuccgugaacgccggcgugaccacccccgucagcacguacaugcucaccaacuccgagcugcugagccucaucaacgacaugccgaucaccaacgaccagaagaagcugaugagcaacaacgugcagaucgugcggcagcaguccuacagcaucaugugcaucaucaaggaggagguccuggccuacguggugcagcucccccuguacggggucaucgacacccccugcuggaagcugcacacgagcccccucugcaccaccaacaccaaggagggcuccaacaucugccugacgcgcaccgaccgggggugguacugcgacaacgcgggcuccgugagcuucuucccgcaggccgagaccugcaaggugcaguccaaccgcgucuucugcgacaccaugaacagccugacgcuccccuccgaggugaaccugugcaacaucgacaucuucaaccccaaguacgacugcaagaucaugaccagcaagaccgacgucuccagcuccgugaucaccagccugggcgccaucguguccugcuacgggaagacgaagugcaccgccagcaacaagaaccggggcaucaucaagaccuucuccaacgggugcgacuacgucagcaacaagggcguggacaccguguccgucggcaacacgcucuacugcgugaacaagcaggaggggcagagccuguacgugaagggcgagcccaucaucaacuucuacgacccgcuggucuuccccagcgacgaguucgacgccuccaucagccaggugaacgagaagaucaaccagucccucgcguucauccgcaagagcgacgagcugcugcacaacgugaacgucgggaaguccaccaccaacaucaugaucaccaccaucaucaucgugaucaucgugauccuccugcugcucaucgccgucggccuguuccuguacugcaaggcccggugaggacuaguacuggcugcaucucccuuuccucuguccuccauccuucucccaggauggugaagggggaccugguacccagugauccccaccccaggauccuaaaucaugacuuaccugcuaauaaaaacucauuggaaaagugagaagaucuaaaaaaaaaaaaaaaaaaaaaaaaaaaaaaaaaaaaaaaaaaaaaaaaaaaaaaaaaaaaaaaaugcaucccccccccccccccccccccccccccccccaaaggcucuuuucagagccaccagaauu

SEQ ID NO: 14392 - RNA, 1947 nt, Artificial Sequence
  mRNA product Design b-5 comprising derived and/or modified sequence from HRSV(Memphis-37)__AIY60640.1__F-del_DSCav1_mut1 (opt2)
gggagacuccugucgggcggaaguaggaggaguagaguuuaaaaacaguacucuuuuuccgguucgggacguaguugaagcaacgacaagccggauaaccgcucuugagacaggaagcuuaccauggagcuccccauccucaagaccaacgccaucaccaccauccucgccgccgucacccucugcuucgccuccucccagaacaucaccgaggaguucuaccaguccaccugcuccgccgucuccaagggcuaccucggcgcccuccgcaccggcugguacaccuccgucaucaccaucgagcucuccaacaucaaggagaacaagugcaacggcaccgacgccaaggucaagcucaucaagcaggagcucgacaaguacaagaacgccgucaccgagcuccagcuccucaugcaguccacccccgccgccggcuccggcuccgccaucugcuccggcaucgccgucugcaagguccuccaccucgagggcgaggucaacaagaucaagaacgcccuccucuccaccaacaaggccgucgucucccucuccaacggcgucuccguccucaccuucaagguccucgaccucaagaacuacaucgacaagcagcuccuccccauccucaacaagcaguccugcuccauccccaacaucgagaccgucaucgaguuccagcagaagaacaaccgccuccucgagaucacccgcgaguucuccgucaacgccggcgucaccacccccgucuccaccuacaugcucaccaacuccgagcuccucucccucaucaacgacaugcccaucaccaacgaccagaagaagcucauguccaacaacguccagaucguccgccagcaguccuacuccaucaugugcaucaucaaggaggagguccucgccuacgucguccagcucccccucuacggcgucaucgacacccccugcuggaagcuccacaccuccccccucugcaccaccaacaccaaggagggcuccaacaucugccucacccgcaccgaccgcggcugguacugcgacaacgccggcuccgucuccuucuucccccaggccgagaccugcaagguccaguccaaccgcgucuucugcgacaccaugaacucccucacccuccccuccgaggucaaccucugcaacaucgacaucuucaaccccaaguacgacugcaagaucaugaccuccaagaccgacgucuccuccuccgucaucaccucccucggcgccaucgucuccugcuacggcaagaccaagugcaccgccuccaacaagaaccgcggcaucaucaagaccuucuccaacggcugcgacuacgucuccaacaagggcgucgacaccgucuccgucggcaacacccucuacugcgucaacaagcaggagggccagucccucuacgucaagggcgagcccaucaucaacuucuacgacccccucgucuuccccuccgacgaguucgacgccuccaucucccaggucaacgagaagaucaaccagucccucgccuucauccgcaaguccgacgagcuccuccacaacgucaacgucggcaaguccaccaccaacaucaugaucaccaccaucaucaucgucaucaucgucauccuccuccuccucaucgccgucggccucuuccucuacugcaaggcccgcugaggacuaguacuggcugcaucucccuuuccucuguccuccauccuucucccaggauggugaagggggaccugguacccagugauccccaccccaggauccuaaaucaugacuuaccugcuaauaaaaacucauuggaaaagugagaagaucuaaaaaaaaaaaaaaaaaaaaaaaaaaaaaaaaaaaaaaaaaaaaaaaaaaaaaaaaaaaaaaaaugcaucccccccccccccccccccccccccccccccaaaggcucuuuucagagccaccagaauu

SEQ ID NO: 14393 - RNA, 1947 nt, Artificial Sequence
  mRNA product Design b-5 comprising derived and/or modified sequence from HRSV(Memphis-37)__AIY60640.1__F-del_DSCav1_mut1 (opt3)
gggagacuccugucgggcggaaguaggaggaguagaguuuaaaaacaguacucuuuuuccgguucgggacguaguugaagcaacgacaagccggauaaccgcucuugagacaggaagcuuaccauggagcugcccauccucaagaccaacgccauuacaacuauacuugcugcagugacgcugugcuucgccagcucccagaauaucaccgaagaguuuuaccaaucuacauguucagcggucaguaaaggcuauuugggggcuuuaagaacuggaugguacaccagcguuauuacaaucgaacuguccaacauuaaggagaauaaaugcaacgguaccgacgccaaggugaaacuaaucaagcaggaacucgauaaguauaaaaaugcaguaacugagcugcagcuucugaugcagucuacuccugccgcuggcucggggucagcaauauguagcggaaucgccgugugcaaggucuugcaccucgagggcgaagugaacaaaauuaagaaugcucugcugaguaccaacaaagccguugugucccucucuaauggugucagcguguuaacguucaagguacuggaccuuaagaacuacaucgauaaacaauugcugccaauucuaaauaagcaguccuguucaaucccgaacauagagacuguuauugaauuucagcagaaaaauaacaggcuccuggagaucacccgggaguucagugugaaugcgggggucacaacucccgugagcaccuauaugcuuacaaacucugaacuguugucccucauuaacgacaugccuaucaccaaugaucaaaagaaacugaugucaaacaaugugcagaucguccgccagcagagcuacaguauuaugugcauaaucaaggaggaaguuuuagcauaugugguacaacugccacucuacggagugauugacacgcccuguuggaaacuucauacuucuccucugugcacaaccaacacuaaggagggcuccaauaucuguuugacacgaaccgaucguggcugguacugcgacaacgccgggagcgucucguuuuucccacaggcugaaacguguaaggugcagucuaauagaguguuuugcgauaccaugaacucccuaacacugcccucagagguuaaucucugcaacauagacauuuucaauccuaaauaugauuguaagaucaugacaaguaaaaccgacgucagcuccucugugaucacaagccugggagccauuguaucaugcuacgguaagacuaaauguaccgcaaguaacaagaauaggggcaucauuaagacauuuuccaacgggugcgauuauguuagcaauaaaggaguggacaccgucucugugggcaacacucuuuacugugucaacaagcaagagggucagucacuguaugugaaaggggaaccaauaaucaauuucuacgacccguugguuuuucccagugaugaguucgacgcuagcauuucccaggugaacgaaaagaucaaucagucucucgccuuuauccggaaaucggaugagcuguuacacaacguaaaugucggaaagagcacgacaaacauuaugauaaccacuaucauuaucgugauuaucguuauacugcuacuccugaucgcggugggccuuuucuuguauugcaaggcccgcugaggacuaguacuggcugcaucucccuuuccucuguccuccauccuucucccaggauggugaagggggaccugguacccagugauccccaccccaggauccuaaaucaugacuuaccugcuaauaaaaacucauuggaaaagugagaagaucuaaaaaaaaaaaaaaaaaaaaaaaaaaaaaaaaaaaaaaaaaaaaaaaaaaaaaaaaaaaaaaaaugcaucccccccccccccccccccccccccccccccaaaggcucuuuucagagccaccagaauu

SEQ ID NO: 14394 - RNA, 1947 nt, Artificial Sequence
  mRNA product Design b-5 comprising derived and/or modified sequence from HRSV(Memphis-37)__AIY60640.1__F-del_DSCav1_mut1 (opt4)
gggagacuccugucgggcggaaguaggaggaguagaguuuaaaaacaguacucuuuuuccgguucgggacguaguugaagcaacgacaagccggauaaccgcucuugagacaggaagcuuaccauggagcugcccauccugaagaccaacgccaucaccaccauccuggccgccgugacccugugcuucgccagcagccagaacaucaccgaggaguucuaccagagcaccugcagcgccgugagcaagggcuaccugggcgcccugagaaccggcugguacaccagcgugaucaccaucgagcugagcaacaucaaggagaacaagugcaacggcaccgacgccaaggugaagcugaucaagcaggagcuggacaaguacaagaacgccgugaccgagcugcagcugcugaugcagagcacccccgccgccggcagcggcagcgccaucugcagcggcaucgccgugugcaaggugcugcaccuggagggcgaggugaacaagaucaagaacgcccugcugagcaccaacaaggccguggugagccugagcaacggcgugagcgugcugaccuucaaggugcuggaccugaagaacuacaucgacaagcagcugcugcccauccugaacaagcagagcugcagcauccccaacaucgagaccgugaucgaguuccagcagaagaacaacagacugcuggagaucaccagagaguucagcgugaacgccggcgugaccacccccgugagcaccuacaugcugaccaacagcgagcugcugagccugaucaacgacaugcccaucaccaacgaccagaagaagcugaugagcaacaacgugcagaucgugagacagcagagcuacagcaucaugugcaucaucaaggaggaggugcuggccuacguggugcagcugccccuguacggcgugaucgacacccccugcuggaagcugcacaccagcccccugugcaccaccaacaccaaggagggcagcaacaucugccugaccagaaccgacagaggcugguacugcgacaacgccggcagcgugagcuucuucccccaggccgagaccugcaaggugcagagcaacagaguguucugcgacaccaugaacagccugacccugcccagcgaggugaaccugugcaacaucgacaucuucaaccccaaguacgacugcaagaucaugaccagcaagaccgacgugagcagcagcgugaucaccagccugggcgccaucgugagcugcuacggcaagaccaagugcaccgccagcaacaagaacagaggcaucaucaagaccuucagcaacggcugcgacuacgugagcaacaagggcguggacaccgugagcgugggcaacacccuguacugcgugaacaagcaggagggccagagccuguacgugaagggcgagcccaucaucaacuucuacgacccccugguguuccccagcgacgaguucgacgccagcaucagccaggugaacgagaagaucaaccagagccuggccuucaucagaaagagcgacgagcugcugcacaacgugaacgugggcaagagcaccaccaacaucaugaucaccaccaucaucaucgugaucaucgugauccugcugcugcugaucgccgugggccuguuccuguacugcaaggccagaugaggacuaguacuggcugcaucucccuuuccucuguccuccauccuucucccaggauggugaagggggaccugguacccagugauccccaccccaggauccuaaaucaugacuuaccugcuaauaaaaacucauuggaaaagugagaagaucuaaaaaaaaaaaaaaaaaaaaaaaaaaaaaaaaaaaaaaaaaaaaaaaaaaaaaaaaaaaaaaaaugcaucccccccccccccccccccccccccccccccaaaggcucuuuucagagccaccagaauu

SEQ ID NO: 14395 - RNA, 1947 nt, Artificial Sequence
  mRNA product Design b-5 comprising derived and/or modified sequence from HRSV(Memphis-37)__AIY60640.1__F-del_DSCav1_mut1 (opt5)
gggagacuccugucgggcggaaguaggaggaguagaguuuaaaaacaguacucuuuuuccgguucgggacguaguugaagcaacgacaagccggauaaccgcucuugagacaggaagcuuaccauggagcugcccauccucaagaccaacgccauuacaacgauccuggcugccgugacccuuugcuucgcgagcucccagaauauuacagaagaguuuuaccaaucuaccuguagcgcugucuccaaaggcuaucugggggcccucagaacaggaugguacaccucuguuaucacaauugaacugagcaacaucaaggagaauaaaugcaacggcaccgacgccaaggugaaacuuaucaagcaggaacuggauaaguauaaaaaugcugugacggagcuccagcugcugaugcaguccaccccugccgcugggucuggaagcgccauuuguuccggcaucgcggucugcaaggugcuccaccuggagggggaaguuaacaaaauuaagaaugcccuucugagcacaaacaaagcuguggucucucucuccaauggagugagcguucugaccuucaaggugcuugaccugaagaacuacaucgauaaacaacuccugccgauucugaauaagcagucuuguuccauccccaacauugagacagucaucgaauuucagcagaaaaauaaccggcuccuggagaucacccgcgaguucagcgugaaugccggcgugacgacaccugucucuaccuauaugcuuacaaacuccgaacugcucagccugauuaacgacaugcccaucaccaaugaucaaaagaaacuuauguccaacaauguucagauugugagacagcagucuuacagcaucaugugcauuaucaaggaggaagugcuggcuuaugucgugcaacucccucuguacggcguuaucgacacccccuguuggaaacugcauacauccccucucugcacgaccaacacaaaggaggggagcaauauuugucugacccggacagaucgcggaugguacugcgacaacgccggcucuguguccuuuuucccgcaggcggaaaccuguaagguccagagcaauagaguguuuugcgauacgaugaacucucuuacacugcccagcgagguuaaucucugcaacaucgacauuuucaauccuaaauaugauuguaagaucaugaccuccaaaaccgacgugucuagcuccgucauuacaagccugggggccaucgugucuugcuacggaaagaccaaauguacagcuuccaacaagaaucggggcaucauuaagacguuuagcaacgggugcgauuaugucucuaauaaaggaguggacaccguuuccgugggcaacacacuuuacugugucaacaagcaagagggccagagccuguaugugaaaggggaacccaucauuaauuucuacgacccucucguuuuucccuccgaugaguucgacgccucuaucagccaggugaacgaaaagauuaaucagucccuggcuuuuauccgcaaaucugaugagcugcuccacaacgucaaugugggaaagagcaccacaaacauuaugaucaccacgaucauuaucgugauuaucguuauucugcuucugcucaucgccgucggccuguuccuguauugcaaggccagaugaggacuaguacuggcugcaucucccuuuccucuguccuccauccuucucccaggauggugaagggggaccugguacccagugauccccaccccaggauccuaaaucaugacuuaccugcuaauaaaaacucauuggaaaagugagaagaucuaaaaaaaaaaaaaaaaaaaaaaaaaaaaaaaaaaaaaaaaaaaaaaaaaaaaaaaaaaaaaaaaugcaucccccccccccccccccccccccccccccccaaaggcucuuuucagagccaccagaauu

SEQ ID NO: 14396 - RNA, 1947 nt, Artificial Sequence
  mRNA product Design b-5 comprising derived and/or modified sequence from HRSV(Memphis-37)__AIY60640.1__F-del_DSCav1_mut1 (opt6)
gggagacuccugucgggcggaaguaggaggaguagaguuuaaaaacaguacucuuuuuccgguucgggacguaguugaagcaacgacaagccggauaaccgcucuugagacaggaagcuuaccauggaauuaccaauacuaaaaacaaacgcaauaacaacaauucuagcagcaguaacauuaugcuuugcaucaucccaaaacaucacagaagaauuuuaucaaucaaccugcucagcaguuuccaaaggauacuuaggagcauuaagaacugguugguacacuucaguaaucaccaucgaacucucaaacaucaaggaaaacaaaugcaacggaacagacgcaaaaguuaaacucauaaaacaagaacuugacaaauacaaaaacgccguaacagaacuacaacuucucaugcaaucaacacccgcagcaggauccggaucagccauaugcucaggcauagcaguauguaaaguauuacaucuugaaggugaaguaaacaaaauaaaaaacgcacuucuaucaaccaacaaagcaguaguaucacuaucaaacggaguauccgucuuaacauuuaaaguucuagaccucaaaaacuauauagacaaacaauuacugccaauccucaauaaacaaucaugcucaauaccaaacaucgaaacaguaauagaauuucaacaaaaaaacaacagacuacuagaaauaacaagagaauuuuccgucaacgccggcguaacuacuccaguaucaacauauaugcuaaccaacucagaacuccuaucccucauaaacgacaugccaauaacuaaugaucaaaaaaaacuaaugucaaacaauguacaaauaguuagacaacaaucauacucaaucaugugcauaauaaaagaagaaguacuagcauacgucguccaacuaccccuauacggaguaauagacacaccuugcuggaaacuacacacaucaccccuaugcacaacaaauacaaaagaagguuccaacaucugccuaacaagaacugauagaggaugguacugcgacaacgccggaucaguaucauucuucccucaagcugaaaccugcaaaguacaaucaaacagaguauuuugcgauacaaugaacucccuaacacuucccucagaaguuaaucuuuguaauauagauauauucaacccaaaauacgacugcaaaauaaugacaaguaaaacagacguauccucaucuguaauuacaucacuaggagccauaguaucuugcuacggcaaaaccaaaugcacagcaucaaacaaaaacagagguauuaucaaaaccuucucaaacggaugugacuacguuucaaacaaaggaguagacacaguaucagucggaaacacccuauacuguguuaacaaacaagaaggacaaucacuguacguaaaaggagaacccauaauaaauuucuacgacccacuuguauuuccaucagacgaauuugaugcaucaaucucacaaguaaaugaaaaaauaaaccaaucauuagcauucauaagaaaaucugacgaguuacuacacaacguaaauguuggcaaaucaacaaccaauauaaugauaacaacaauaauaauaguaauaauagucauauuacuccuccucauagccgucggauuauucuuauacugcaaagcaagauaaggacuaguacuggcugcaucucccuuuccucuguccuccauccuucucccaggauggugaagggggaccugguacccagugauccccaccccaggauccuaaaucaugacuuaccugcuaauaaaaacucauuggaaaagugagaagaucuaaaaaaaaaaaaaaaaaaaaaaaaaaaaaaaaaaaaaaaaaaaaaaaaaaaaaaaaaaaaaaaaugcaucccccccccccccccccccccccccccccccaaaggcucuuuucagagccaccagaauu

SEQ ID NO: 14397 - RNA, 1947 nt, Artificial Sequence
  mRNA product Design b-5 comprising derived and/or modified sequence from HRSV(Memphis-37)__AIY60640.1__F-del_DSCav1_mut1 (opt11)
gggagacuccugucgggcggaaguaggaggaguagaguuuaaaaacaguacucuuuuuccgguucgggacguaguugaagcaacgacaagccggauaaccgcucuugagacaggaagcuuaccauggaacuccccauacuaaaaaccaacgccaucacaacaauccucgccgccgucacacucugcuucgccagcucccaaaacaucaccgaagaguucuaucaaucaaccugcuccgcagucucaaagggauaccucggagcccuccgcaccggaugguacacuuccgucaucacaauagaacucuccaacaucaaagaaaacaaaugcaacggcaccgacgcaaaagucaagcucaucaaacaagaacucgacaaauauaaaaacgccgucaccgaacuccaacuacucaugcaauccacacccgcggccggcucaggcagcgccaucugcucaggcaucgccgucugcaaaguccuccaccucgaaggcgaagucaacaaaaucaaaaacgcccuucuuucaaccaacaaggcaguaguaucccucucaaacggcgucagcguccugaccuucaaaguccuagaccucaaaaacuacauagauaaacaacuccuccccauacugaacaaacaaucgugcuccauccccaauaucgaaaccgucauagaguuccagcagaaaaacaacagacuucucgaaauaacccgagaguucucaguaaacgccggagucaccacacccguaagcaccuacaugcucacaaacucagaacuccuaucccucaucaacgacaugcccaucaccaacgaccagaaaaagcuaauguccaacaacguccaaauaguacgccaacaaagcuacucgauaaugugcaucaucaaggaagaaguacucgccuacgucguccaacucccccucuacggcguaaucgacacacccugcuggaaacuccacacguccccacucugcacaacaaacacaaaagaaggauccaacauaugccuaacccgcaccgacaggggcugguacugcgacaacgcaggcucagucagcuucuuuccccaagccgaaacaugcaaaguccaauccaaccgugucuucugcgacaccaugaacucgcucacccuacccucggaagucaaucucugcaacaucgacaucuucaacccaaaauacgacuguaaaaucaugaccagcaaaacagacguuucuuccagcgucaucacaucacucggcgcgaucguaucaugcuauggcaaaacaaagugcaccgcuagcaauaaaaaccgaggaaucauaaaaaccuucagcaacggcugcgacuacguauccaacaaaggcgucgacaccguauccgucggaaacacccucuacugcgucaacaagcaagaaggacaaucacucuacgucaaaggcgaaccaaucauaaacuucuacgacccacucguauuccccucagacgaguucgacgcauccaucucccaagucaacgaaaagaucaaccaaucucucgccuuuauacgcaaaagcgacgaacuccuucacaacguaaacgucggcaaaagcaccacuaacauaaugaucaccacaaucauaauaguaaucaucguaauacuccuccuacucaucgccgugggccuauuccucuauugcaaagcccgauaaggacuaguacuggcugcaucucccuuuccucuguccuccauccuucucccaggauggugaagggggaccugguacccagugauccccaccccaggauccuaaaucaugacuuaccugcuaauaaaaacucauuggaaaagugagaagaucuaaaaaaaaaaaaaaaaaaaaaaaaaaaaaaaaaaaaaaaaaaaaaaaaaaaaaaaaaaaaaaaaugcaucccccccccccccccccccccccccccccccaaaggcucuuuucagagccaccagaauu

SEQ ID NO: 14398 - RNA, 1853 nt, Artificial Sequence
  mRNA product Design c-1 comprising derived and/or modified sequence from HRSV(Memphis-37)__AIY60640.1__F-del_DSCav1_mut1 (opt1)
gggagaguccgcucagccagguugcagaagcggcuuagcguguguccuaaucuucucucugcguguagguaggccugugccgcaaacaagcuuaccauggagcugcccauccucaagaccaacgccaucaccacgauccuggccgcggugacccugugcuucgccagcucccagaacaucaccgaggaguucuaccagagcacgugcuccgccgucagcaagggcuaccucggcgcccugcgcaccgggugguacaccagcgugaucaccaucgagcuguccaacaucaaggagaacaagugcaacggcaccgacgccaaggugaagcucaucaagcaggagcuggacaaguacaagaacgcggucacggagcugcagcuccugaugcagagcaccccggccgccggcuccgggagcgcgaucugcuccggcaucgccgucugcaaggugcugcaccucgagggcgaggugaacaagaucaagaacgcccugcuguccaccaacaaggccgucgugagccucuccaacggggugagcguccugaccuucaaggugcuggaccucaagaacuacaucgacaagcagcugcugcccauccugaacaagcagagcugcuccauccccaacaucgagaccgucaucgaguuccagcagaagaacaaccgccuccuggagaucacgcgggaguucagcgugaacgcgggcgugaccacccccgucuccaccuacaugcugacgaacagcgagcuccugucccugaucaacgacaugccgaucaccaacgaccagaagaagcucaugagcaacaacgugcagaucgugcgccagcaguccuacagcaucaugugcaucaucaaggaggagguccuggccuacguggugcagcugccccucuacggggucaucgacacccccugcuggaagcugcacaccagcccccugugcacgaccaacaccaaggagggcuccaacaucugccucacccggacggaccgcgggugguacugcgacaacgccggcagcguguccuucuucccgcaggccgagaccugcaagguccagagcaaccggguguucugcgacaccaugaacucccugacccugcccagcgaggugaaccucugcaacaucgacaucuucaaccccaaguacgacugcaagaucaugacguccaagaccgacgucagcuccagcgugaucaccucccugggcgccaucgugagcugcuacgggaagaccaagugcacggcgagcaacaagaaccgcggcaucaucaagaccuucuccaacgggugcgacuacgucagcaacaagggcguggacaccguguccgucggcaacacccuguacugcgugaacaagcaggagggccagagccucuacgugaagggggagcccaucaucaacuucuacgacccgcuggucuuccccuccgacgaguucgacgccagcaucucccaggugaacgagaagaucaaccagagccuggccuucauccggaaguccgacgagcuccugcacaacgugaacgucggcaagagcaccacgaacaucaugaucaccaccaucaucaucgugaucaucgugauccugcugcuccugaucgccgucgggcuguuccucuacugcaaggcccgcugaggacuaguguccaccugucccuccugggcugcuggauugucucguuuuccugccaaauaaacaggaucagcgcuuuacagaucuaaaaaaaaaaaaaaaaaaaaaaaaaaaaaaaaaaaaaaaaaaaaaaaaaaaaaaaaaaaaaaaaugcaucccccccccccccccccccccccccccccccaaaggcucuuuucagagccaccagaauu

SEQ ID NO: 14399 - RNA, 1853 nt, Artificial Sequence
  mRNA product Design c-1 comprising derived and/or modified sequence from HRSV(Memphis-37)__AIY60640.1__F-del_DSCav1_mut1 (opt1)
gggagaguccgcucagccagguugcagaagcggcuuagcguguguccuaaucuucucucugcguguagguaggccugugccgcaaacaagcuuaccauggagcugcccauccucaagaccaacgccaucaccacgauccuggccgcggugacccugugcuucgccagcucccagaacaucaccgaggaguucuaccagagcacgugcuccgccgucagcaagggcuaccucggggcccugcgcaccggcugguacaccuccgugaucaccaucgagcugagcaacaucaaggagaacaagugcaacgggaccgacgccaaggugaagcucaucaagcaggagcuggacaaguacaagaacgcggucacggagcugcagcuccugaugcaguccaccccggccgccggcagcggguccgccaucugcagcggcaucgcggugugcaaggugcugcaccucgagggcgaggucaacaagaucaagaacgcccugcuguccaccaacaaggccguggugagccucuccaacggggucagcgugcugaccuucaaggugcuggaccucaagaacuacaucgacaagcagcugcugcccauccucaacaagcaguccugcagcauccccaacaucgagacggucaucgaguuccagcagaagaacaaccggcugcuggagaucacccgcgaguucuccgugaacgccggcgugaccacccccgucagcacguacaugcucaccaacuccgagcugcugagccucaucaacgacaugccgaucaccaacgaccagaagaagcugaugagcaacaacgugcagaucgugcggcagcaguccuacagcaucaugugcaucaucaaggaggagguccuggccuacguggugcagcucccccuguacggggucaucgacacccccugcuggaagcugcacacgagcccccucugcaccaccaacaccaaggagggcuccaacaucugccugacgcgcaccgaccgggggugguacugcgacaacgcgggcuccgugagcuucuucccgcaggccgagaccugcaaggugcaguccaaccgcgucuucugcgacaccaugaacagccugacgcuccccuccgaggugaaccugugcaacaucgacaucuucaaccccaaguacgacugcaagaucaugaccagcaagaccgacgucuccagcuccgugaucaccagccugggcgccaucguguccugcuacgggaagacgaagugcaccgccagcaacaagaaccggggcaucaucaagaccuucuccaacgggugcgacuacgucagcaacaagggcguggacaccguguccgucggcaacacgcucuacugcgugaacaagcaggaggggcagagccuguacgugaagggcgagcccaucaucaacuucuacgacccgcuggucuuccccagcgacgaguucgacgccuccaucagccaggugaacgagaagaucaaccagucccucgcguucauccgcaagagcgacgagcugcugcacaacgugaacgucgggaaguccaccaccaacaucaugaucaccaccaucaucaucgugaucaucgugauccuccugcugcucaucgccgucggccuguuccuguacugcaaggcccggugaggacuaguguccaccugucccuccugggcugcuggauugucucguuuuccugccaaauaaacaggaucagcgcuuuacagaucuaaaaaaaaaaaaaaaaaaaaaaaaaaaaaaaaaaaaaaaaaaaaaaaaaaaaaaaaaaaaaaaaugcaucccccccccccccccccccccccccccccccaaaggcucuuuucagagccaccagaauu

SEQ ID NO: 14400 - RNA, 1853 nt, Artificial Sequence
  mRNA product Design c-1 comprising derived and/or modified sequence from HRSV(Memphis-37)__AIY60640.1__F-del_DSCav1_mut1 (opt2)
gggagaguccgcucagccagguugcagaagcggcuuagcguguguccuaaucuucucucugcguguagguaggccugugccgcaaacaagcuuaccauggagcuccccauccucaagaccaacgccaucaccaccauccucgccgccgucacccucugcuucgccuccucccagaacaucaccgaggaguucuaccaguccaccugcuccgccgucuccaagggcuaccucggcgcccuccgcaccggcugguacaccuccgucaucaccaucgagcucuccaacaucaaggagaacaagugcaacggcaccgacgccaaggucaagcucaucaagcaggagcucgacaaguacaagaacgccgucaccgagcuccagcuccucaugcaguccacccccgccgccggcuccggcuccgccaucugcuccggcaucgccgucugcaagguccuccaccucgagggcgaggucaacaagaucaagaacgcccuccucuccaccaacaaggccgucgucucccucuccaacggcgucuccguccucaccuucaagguccucgaccucaagaacuacaucgacaagcagcuccuccccauccucaacaagcaguccugcuccauccccaacaucgagaccgucaucgaguuccagcagaagaacaaccgccuccucgagaucacccgcgaguucuccgucaacgccggcgucaccacccccgucuccaccuacaugcucaccaacuccgagcuccucucccucaucaacgacaugcccaucaccaacgaccagaagaagcucauguccaacaacguccagaucguccgccagcaguccuacuccaucaugugcaucaucaaggaggagguccucgccuacgucguccagcucccccucuacggcgucaucgacacccccugcuggaagcuccacaccuccccccucugcaccaccaacaccaaggagggcuccaacaucugccucacccgcaccgaccgcggcugguacugcgacaacgccggcuccgucuccuucuucccccaggccgagaccugcaagguccaguccaaccgcgucuucugcgacaccaugaacucccucacccuccccuccgaggucaaccucugcaacaucgacaucuucaaccccaaguacgacugcaagaucaugaccuccaagaccgacgucuccuccuccgucaucaccucccucggcgccaucgucuccugcuacggcaagaccaagugcaccgccuccaacaagaaccgcggcaucaucaagaccuucuccaacggcugcgacuacgucuccaacaagggcgucgacaccgucuccgucggcaacacccucuacugcgucaacaagcaggagggccagucccucuacgucaagggcgagcccaucaucaacuucuacgacccccucgucuuccccuccgacgaguucgacgccuccaucucccaggucaacgagaagaucaaccagucccucgccuucauccgcaaguccgacgagcuccuccacaacgucaacgucggcaaguccaccaccaacaucaugaucaccaccaucaucaucgucaucaucgucauccuccuccuccucaucgccgucggccucuuccucuacugcaaggcccgcugaggacuaguguccaccugucccuccugggcugcuggauugucucguuuuccugccaaauaaacaggaucagcgcuuuacagaucuaaaaaaaaaaaaaaaaaaaaaaaaaaaaaaaaaaaaaaaaaaaaaaaaaaaaaaaaaaaaaaaaugcaucccccccccccccccccccccccccccccccaaaggcucuuuucagagccaccagaauu

SEQ ID NO: 14401 - RNA, 1853 nt, Artificial Sequence
  mRNA product Design c-1 comprising derived and/or modified sequence from HRSV(Memphis-37)__AIY60640.1__F-del_DSCav1_mut1 (opt3)
gggagaguccgcucagccagguugcagaagcggcuuagcguguguccuaaucuucucucugcguguagguaggccugugccgcaaacaagcuuaccauggagcugcccauccucaagaccaacgccauuacaacuauacuugcugcagugacgcugugcuucgccagcucccagaauaucaccgaagaguuuuaccaaucuacauguucagcggucaguaaaggcuauuugggggcuuuaagaacuggaugguacaccagcguuauuacaaucgaacuguccaacauuaaggagaauaaaugcaacgguaccgacgccaaggugaaacuaaucaagcaggaacucgauaaguauaaaaaugcaguaacugagcugcagcuucugaugcagucuacuccugccgcuggcucggggucagcaauauguagcggaaucgccgugugcaaggucuugcaccucgagggcgaagugaacaaaauuaagaaugcucugcugaguaccaacaaagccguugugucccucucuaauggugucagcguguuaacguucaagguacuggaccuuaagaacuacaucgauaaacaauugcugccaauucuaaauaagcaguccuguucaaucccgaacauagagacuguuauugaauuucagcagaaaaauaacaggcuccuggagaucacccgggaguucagugugaaugcgggggucacaacucccgugagcaccuauaugcuuacaaacucugaacuguugucccucauuaacgacaugccuaucaccaaugaucaaaagaaacugaugucaaacaaugugcagaucguccgccagcagagcuacaguauuaugugcauaaucaaggaggaaguuuuagcauaugugguacaacugccacucuacggagugauugacacgcccuguuggaaacuucauacuucuccucugugcacaaccaacacuaaggagggcuccaauaucuguuugacacgaaccgaucguggcugguacugcgacaacgccgggagcgucucguuuuucccacaggcugaaacguguaaggugcagucuaauagaguguuuugcgauaccaugaacucccuaacacugcccucagagguuaaucucugcaacauagacauuuucaauccuaaauaugauuguaagaucaugacaaguaaaaccgacgucagcuccucugugaucacaagccugggagccauuguaucaugcuacgguaagacuaaauguaccgcaaguaacaagaauaggggcaucauuaagacauuuuccaacgggugcgauuauguuagcaauaaaggaguggacaccgucucugugggcaacacucuuuacugugucaacaagcaagagggucagucacuguaugugaaaggggaaccaauaaucaauuucuacgacccguugguuuuucccagugaugaguucgacgcuagcauuucccaggugaacgaaaagaucaaucagucucucgccuuuauccggaaaucggaugagcuguuacacaacguaaaugucggaaagagcacgacaaacauuaugauaaccacuaucauuaucgugauuaucguuauacugcuacuccugaucgcggugggccuuuucuuguauugcaaggcccgcugaggacuaguguccaccugucccuccugggcugcuggauugucucguuuuccugccaaauaaacaggaucagcgcuuuacagaucuaaaaaaaaaaaaaaaaaaaaaaaaaaaaaaaaaaaaaaaaaaaaaaaaaaaaaaaaaaaaaaaaugcaucccccccccccccccccccccccccccccccaaaggcucuuuucagagccaccagaauu

SEQ ID NO: 14402 - RNA, 1853 nt, Artificial Sequence
  mRNA product Design c-1 comprising derived and/or modified sequence from HRSV(Memphis-37)__AIY60640.1__F-del_DSCav1_mut1 (opt4)
gggagaguccgcucagccagguugcagaagcggcuuagcguguguccuaaucuucucucugcguguagguaggccugugccgcaaacaagcuuaccauggagcugcccauccugaagaccaacgccaucaccaccauccuggccgccgugacccugugcuucgccagcagccagaacaucaccgaggaguucuaccagagcaccugcagcgccgugagcaagggcuaccugggcgcccugagaaccggcugguacaccagcgugaucaccaucgagcugagcaacaucaaggagaacaagugcaacggcaccgacgccaaggugaagcugaucaagcaggagcuggacaaguacaagaacgccgugaccgagcugcagcugcugaugcagagcacccccgccgccggcagcggcagcgccaucugcagcggcaucgccgugugcaaggugcugcaccuggagggcgaggugaacaagaucaagaacgcccugcugagcaccaacaaggccguggugagccugagcaacggcgugagcgugcugaccuucaaggugcuggaccugaagaacuacaucgacaagcagcugcugcccauccugaacaagcagagcugcagcauccccaacaucgagaccgugaucgaguuccagcagaagaacaacagacugcuggagaucaccagagaguucagcgugaacgccggcgugaccacccccgugagcaccuacaugcugaccaacagcgagcugcugagccugaucaacgacaugcccaucaccaacgaccagaagaagcugaugagcaacaacgugcagaucgugagacagcagagcuacagcaucaugugcaucaucaaggaggaggugcuggccuacguggugcagcugccccuguacggcgugaucgacacccccugcuggaagcugcacaccagcccccugugcaccaccaacaccaaggagggcagcaacaucugccugaccagaaccgacagaggcugguacugcgacaacgccggcagcgugagcuucuucccccaggccgagaccugcaaggugcagagcaacagaguguucugcgacaccaugaacagccugacccugcccagcgaggugaaccugugcaacaucgacaucuucaaccccaaguacgacugcaagaucaugaccagcaagaccgacgugagcagcagcgugaucaccagccugggcgccaucgugagcugcuacggcaagaccaagugcaccgccagcaacaagaacagaggcaucaucaagaccuucagcaacggcugcgacuacgugagcaacaagggcguggacaccgugagcgugggcaacacccuguacugcgugaacaagcaggagggccagagccuguacgugaagggcgagcccaucaucaacuucuacgacccccugguguuccccagcgacgaguucgacgccagcaucagccaggugaacgagaagaucaaccagagccuggccuucaucagaaagagcgacgagcugcugcacaacgugaacgugggcaagagcaccaccaacaucaugaucaccaccaucaucaucgugaucaucgugauccugcugcugcugaucgccgugggccuguuccuguacugcaaggccagaugaggacuaguguccaccugucccuccugggcugcuggauugucucguuuuccugccaaauaaacaggaucagcgcuuuacagaucuaaaaaaaaaaaaaaaaaaaaaaaaaaaaaaaaaaaaaaaaaaaaaaaaaaaaaaaaaaaaaaaaugcaucccccccccccccccccccccccccccccccaaaggcucuuuucagagccaccagaauu

SEQ ID NO: 14403 - RNA, 1853 nt, Artificial Sequence
  mRNA product Design c-1 comprising derived and/or modified sequence from HRSV(Memphis-37)__AIY60640.1__F-del_DSCav1_mut1 (opt5)
gggagaguccgcucagccagguugcagaagcggcuuagcguguguccuaaucuucucucugcguguagguaggccugugccgcaaacaagcuuaccauggagcugcccauccucaagaccaacgccauuacaacgauccuggcugccgugacccuuugcuucgcgagcucccagaauauuacagaagaguuuuaccaaucuaccuguagcgcugucuccaaaggcuaucugggggcccucagaacaggaugguacaccucuguuaucacaauugaacugagcaacaucaaggagaauaaaugcaacggcaccgacgccaaggugaaacuuaucaagcaggaacuggauaaguauaaaaaugcugugacggagcuccagcugcugaugcaguccaccccugccgcugggucuggaagcgccauuuguuccggcaucgcggucugcaaggugcuccaccuggagggggaaguuaacaaaauuaagaaugcccuucugagcacaaacaaagcuguggucucucucuccaauggagugagcguucugaccuucaaggugcuugaccugaagaacuacaucgauaaacaacuccugccgauucugaauaagcagucuuguuccauccccaacauugagacagucaucgaauuucagcagaaaaauaaccggcuccuggagaucacccgcgaguucagcgugaaugccggcgugacgacaccugucucuaccuauaugcuuacaaacuccgaacugcucagccugauuaacgacaugcccaucaccaaugaucaaaagaaacuuauguccaacaauguucagauugugagacagcagucuuacagcaucaugugcauuaucaaggaggaagugcuggcuuaugucgugcaacucccucuguacggcguuaucgacacccccuguuggaaacugcauacauccccucucugcacgaccaacacaaaggaggggagcaauauuugucugacccggacagaucgcggaugguacugcgacaacgccggcucuguguccuuuuucccgcaggcggaaaccuguaagguccagagcaauagaguguuuugcgauacgaugaacucucuuacacugcccagcgagguuaaucucugcaacaucgacauuuucaauccuaaauaugauuguaagaucaugaccuccaaaaccgacgugucuagcuccgucauuacaagccugggggccaucgugucuugcuacggaaagaccaaauguacagcuuccaacaagaaucggggcaucauuaagacguuuagcaacgggugcgauuaugucucuaauaaaggaguggacaccguuuccgugggcaacacacuuuacugugucaacaagcaagagggccagagccuguaugugaaaggggaacccaucauuaauuucuacgacccucucguuuuucccuccgaugaguucgacgccucuaucagccaggugaacgaaaagauuaaucagucccuggcuuuuauccgcaaaucugaugagcugcuccacaacgucaaugugggaaagagcaccacaaacauuaugaucaccacgaucauuaucgugauuaucguuauucugcuucugcucaucgccgucggccuguuccuguauugcaaggccagaugaggacuaguguccaccugucccuccugggcugcuggauugucucguuuuccugccaaauaaacaggaucagcgcuuuacagaucuaaaaaaaaaaaaaaaaaaaaaaaaaaaaaaaaaaaaaaaaaaaaaaaaaaaaaaaaaaaaaaaaugcaucccccccccccccccccccccccccccccccaaaggcucuuuucagagccaccagaauu

SEQ ID NO: 14404 - RNA, 1853 nt, Artificial Sequence
  mRNA product Design c-1 comprising derived and/or modified sequence from HRSV(Memphis-37)__AIY60640.1__F-del_DSCav1_mut1 (opt6)
gggagaguccgcucagccagguugcagaagcggcuuagcguguguccuaaucuucucucugcguguagguaggccugugccgcaaacaagcuuaccauggaauuaccaauacuaaaaacaaacgcaauaacaacaauucuagcagcaguaacauuaugcuuugcaucaucccaaaacaucacagaagaauuuuaucaaucaaccugcucagcaguuuccaaaggauacuuaggagcauuaagaacugguugguacacuucaguaaucaccaucgaacucucaaacaucaaggaaaacaaaugcaacggaacagacgcaaaaguuaaacucauaaaacaagaacuugacaaauacaaaaacgccguaacagaacuacaacuucucaugcaaucaacacccgcagcaggauccggaucagccauaugcucaggcauagcaguauguaaaguauuacaucuugaaggugaaguaaacaaaauaaaaaacgcacuucuaucaaccaacaaagcaguaguaucacuaucaaacggaguauccgucuuaacauuuaaaguucuagaccucaaaaacuauauagacaaacaauuacugccaauccucaauaaacaaucaugcucaauaccaaacaucgaaacaguaauagaauuucaacaaaaaaacaacagacuacuagaaauaacaagagaauuuuccgucaacgccggcguaacuacuccaguaucaacauauaugcuaaccaacucagaacuccuaucccucauaaacgacaugccaauaacuaaugaucaaaaaaaacuaaugucaaacaauguacaaauaguuagacaacaaucauacucaaucaugugcauaauaaaagaagaaguacuagcauacgucguccaacuaccccuauacggaguaauagacacaccuugcuggaaacuacacacaucaccccuaugcacaacaaauacaaaagaagguuccaacaucugccuaacaagaacugauagaggaugguacugcgacaacgccggaucaguaucauucuucccucaagcugaaaccugcaaaguacaaucaaacagaguauuuugcgauacaaugaacucccuaacacuucccucagaaguuaaucuuuguaauauagauauauucaacccaaaauacgacugcaaaauaaugacaaguaaaacagacguauccucaucuguaauuacaucacuaggagccauaguaucuugcuacggcaaaaccaaaugcacagcaucaaacaaaaacagagguauuaucaaaaccuucucaaacggaugugacuacguuucaaacaaaggaguagacacaguaucagucggaaacacccuauacuguguuaacaaacaagaaggacaaucacuguacguaaaaggagaacccauaauaaauuucuacgacccacuuguauuuccaucagacgaauuugaugcaucaaucucacaaguaaaugaaaaaauaaaccaaucauuagcauucauaagaaaaucugacgaguuacuacacaacguaaauguuggcaaaucaacaaccaauauaaugauaacaacaauaauaauaguaauaauagucauauuacuccuccucauagccgucggauuauucuuauacugcaaagcaagauaaggacuaguguccaccugucccuccugggcugcuggauugucucguuuuccugccaaauaaacaggaucagcgcuuuacagaucuaaaaaaaaaaaaaaaaaaaaaaaaaaaaaaaaaaaaaaaaaaaaaaaaaaaaaaaaaaaaaaaaugcaucccccccccccccccccccccccccccccccaaaggcucuuuucagagccaccagaauu

SEQ ID NO: 14405 - RNA, 1853 nt, Artificial Sequence
  mRNA product Design c-1 comprising derived and/or modified sequence from HRSV(Memphis-37)__AIY60640.1__F-del_DSCav1_mut1 (opt11)
gggagaguccgcucagccagguugcagaagcggcuuagcguguguccuaaucuucucucugcguguagguaggccugugccgcaaacaagcuuaccauggaacuccccauacuaaaaaccaacgccaucacaacaauccucgccgccgucacacucugcuucgccagcucccaaaacaucaccgaagaguucuaucaaucaaccugcuccgcagucucaaagggauaccucggagcccuccgcaccggaugguacacuuccgucaucacaauagaacucuccaacaucaaagaaaacaaaugcaacggcaccgacgcaaaagucaagcucaucaaacaagaacucgacaaauauaaaaacgccgucaccgaacuccaacuacucaugcaauccacacccgcggccggcucaggcagcgccaucugcucaggcaucgccgucugcaaaguccuccaccucgaaggcgaagucaacaaaaucaaaaacgcccuucuuucaaccaacaaggcaguaguaucccucucaaacggcgucagcguccugaccuucaaaguccuagaccucaaaaacuacauagauaaacaacuccuccccauacugaacaaacaaucgugcuccauccccaauaucgaaaccgucauagaguuccagcagaaaaacaacagacuucucgaaauaacccgagaguucucaguaaacgccggagucaccacacccguaagcaccuacaugcucacaaacucagaacuccuaucccucaucaacgacaugcccaucaccaacgaccagaaaaagcuaauguccaacaacguccaaauaguacgccaacaaagcuacucgauaaugugcaucaucaaggaagaaguacucgccuacgucguccaacucccccucuacggcguaaucgacacacccugcuggaaacuccacacguccccacucugcacaacaaacacaaaagaaggauccaacauaugccuaacccgcaccgacaggggcugguacugcgacaacgcaggcucagucagcuucuuuccccaagccgaaacaugcaaaguccaauccaaccgugucuucugcgacaccaugaacucgcucacccuacccucggaagucaaucucugcaacaucgacaucuucaacccaaaauacgacuguaaaaucaugaccagcaaaacagacguuucuuccagcgucaucacaucacucggcgcgaucguaucaugcuauggcaaaacaaagugcaccgcuagcaauaaaaaccgaggaaucauaaaaaccuucagcaacggcugcgacuacguauccaacaaaggcgucgacaccguauccgucggaaacacccucuacugcgucaacaagcaagaaggacaaucacucuacgucaaaggcgaaccaaucauaaacuucuacgacccacucguauuccccucagacgaguucgacgcauccaucucccaagucaacgaaaagaucaaccaaucucucgccuuuauacgcaaaagcgacgaacuccuucacaacguaaacgucggcaaaagcaccacuaacauaaugaucaccacaaucauaauaguaaucaucguaauacuccuccuacucaucgccgugggccuauuccucuauugcaaagcccgauaaggacuaguguccaccugucccuccugggcugcuggauugucucguuuuccugccaaauaaacaggaucagcgcuuuacagaucuaaaaaaaaaaaaaaaaaaaaaaaaaaaaaaaaaaaaaaaaaaaaaaaaaaaaaaaaaaaaaaaaugcaucccccccccccccccccccccccccccccccaaaggcucuuuucagagccaccagaauu

SEQ ID NO: 14406 - RNA, 1943 nt, Artificial Sequence
  mRNA product Design c-2 comprising derived and/or modified sequence from HRSV(Memphis-37)__AIY60640.1__F-del_DSCav1_mut1 (opt1)
gggagacuccugucgggcggaaguaggaggaguagaguuuaaaaacaguacucuuuuuccgguucgggacguaguugaagcaacgacaagccggauaaccgcucuugagacaggaagcuuaccauggagcugcccauccucaagaccaacgccaucaccacgauccuggccgcggugacccugugcuucgccagcucccagaacaucaccgaggaguucuaccagagcacgugcuccgccgucagcaagggcuaccucggcgcccugcgcaccgggugguacaccagcgugaucaccaucgagcuguccaacaucaaggagaacaagugcaacggcaccgacgccaaggugaagcucaucaagcaggagcuggacaaguacaagaacgcggucacggagcugcagcuccugaugcagagcaccccggccgccggcuccgggagcgcgaucugcuccggcaucgccgucugcaaggugcugcaccucgagggcgaggugaacaagaucaagaacgcccugcuguccaccaacaaggccgucgugagccucuccaacggggugagcguccugaccuucaaggugcuggaccucaagaacuacaucgacaagcagcugcugcccauccugaacaagcagagcugcuccauccccaacaucgagaccgucaucgaguuccagcagaagaacaaccgccuccuggagaucacgcgggaguucagcgugaacgcgggcgugaccacccccgucuccaccuacaugcugacgaacagcgagcuccugucccugaucaacgacaugccgaucaccaacgaccagaagaagcucaugagcaacaacgugcagaucgugcgccagcaguccuacagcaucaugugcaucaucaaggaggagguccuggccuacguggugcagcugccccucuacggggucaucgacacccccugcuggaagcugcacaccagcccccugugcacgaccaacaccaaggagggcuccaacaucugccucacccggacggaccgcgggugguacugcgacaacgccggcagcguguccuucuucccgcaggccgagaccugcaagguccagagcaaccggguguucugcgacaccaugaacucccugacccugcccagcgaggugaaccucugcaacaucgacaucuucaaccccaaguacgacugcaagaucaugacguccaagaccgacgucagcuccagcgugaucaccucccugggcgccaucgugagcugcuacgggaagaccaagugcacggcgagcaacaagaaccgcggcaucaucaagaccuucuccaacgggugcgacuacgucagcaacaagggcguggacaccguguccgucggcaacacccuguacugcgugaacaagcaggagggccagagccucuacgugaagggggagcccaucaucaacuucuacgacccgcuggucuuccccuccgacgaguucgacgccagcaucucccaggugaacgagaagaucaaccagagccuggccuucauccggaaguccgacgagcuccugcacaacgugaacgucggcaagagcaccacgaacaucaugaucaccaccaucaucaucgugaucaucgugauccugcugcuccugaucgccgucgggcuguuccucuacugcaaggcccgcugaggacuaguggaagcauuuuccuggcugauuaaaagaaauuacucagcuauggucaucuguuccuguuagaaggcuaugcagcauauuauauacuaugcgcauguuaugaaaugcauaauaaaaaauuuuaaaaaaucuaaaagaucuaaaaaaaaaaaaaaaaaaaaaaaaaaaaaaaaaaaaaaaaaaaaaaaaaaaaaaaaaaaaaaaaugcaucccccccccccccccccccccccccccccccaaaggcucuuuucagagccaccagaauu

SEQ ID NO: 14407 - RNA, 1943 nt, Artificial Sequence
  mRNA product Design c-2 comprising derived and/or modified sequence from HRSV(Memphis-37)__AIY60640.1__F-del_DSCav1_mut1 (opt1)
gggagacuccugucgggcggaaguaggaggaguagaguuuaaaaacaguacucuuuuuccgguucgggacguaguugaagcaacgacaagccggauaaccgcucuugagacaggaagcuuaccauggagcugcccauccucaagaccaacgccaucaccacgauccuggccgcggugacccugugcuucgccagcucccagaacaucaccgaggaguucuaccagagcacgugcuccgccgucagcaagggcuaccucggggcccugcgcaccggcugguacaccuccgugaucaccaucgagcugagcaacaucaaggagaacaagugcaacgggaccgacgccaaggugaagcucaucaagcaggagcuggacaaguacaagaacgcggucacggagcugcagcuccugaugcaguccaccccggccgccggcagcggguccgccaucugcagcggcaucgcggugugcaaggugcugcaccucgagggcgaggucaacaagaucaagaacgcccugcuguccaccaacaaggccguggugagccucuccaacggggucagcgugcugaccuucaaggugcuggaccucaagaacuacaucgacaagcagcugcugcccauccucaacaagcaguccugcagcauccccaacaucgagacggucaucgaguuccagcagaagaacaaccggcugcuggagaucacccgcgaguucuccgugaacgccggcgugaccacccccgucagcacguacaugcucaccaacuccgagcugcugagccucaucaacgacaugccgaucaccaacgaccagaagaagcugaugagcaacaacgugcagaucgugcggcagcaguccuacagcaucaugugcaucaucaaggaggagguccuggccuacguggugcagcucccccuguacggggucaucgacacccccugcuggaagcugcacacgagcccccucugcaccaccaacaccaaggagggcuccaacaucugccugacgcgcaccgaccgggggugguacugcgacaacgcgggcuccgugagcuucuucccgcaggccgagaccugcaaggugcaguccaaccgcgucuucugcgacaccaugaacagccugacgcuccccuccgaggugaaccugugcaacaucgacaucuucaaccccaaguacgacugcaagaucaugaccagcaagaccgacgucuccagcuccgugaucaccagccugggcgccaucguguccugcuacgggaagacgaagugcaccgccagcaacaagaaccggggcaucaucaagaccuucuccaacgggugcgacuacgucagcaacaagggcguggacaccguguccgucggcaacacgcucuacugcgugaacaagcaggaggggcagagccuguacgugaagggcgagcccaucaucaacuucuacgacccgcuggucuuccccagcgacgaguucgacgccuccaucagccaggugaacgagaagaucaaccagucccucgcguucauccgcaagagcgacgagcugcugcacaacgugaacgucgggaaguccaccaccaacaucaugaucaccaccaucaucaucgugaucaucgugauccuccugcugcucaucgccgucggccuguuccuguacugcaaggcccggugaggacuaguggaagcauuuuccuggcugauuaaaagaaauuacucagcuauggucaucuguuccuguuagaaggcuaugcagcauauuauauacuaugcgcauguuaugaaaugcauaauaaaaaauuuuaaaaaaucuaaaagaucuaaaaaaaaaaaaaaaaaaaaaaaaaaaaaaaaaaaaaaaaaaaaaaaaaaaaaaaaaaaaaaaaugcaucccccccccccccccccccccccccccccccaaaggcucuuuucagagccaccagaauu

SEQ ID NO: 14408 - RNA, 1943 nt, Artificial Sequence
  mRNA product Design c-2 comprising derived and/or modified sequence from HRSV(Memphis-37)__AIY60640.1__F-del_DSCav1_mut1 (opt2)
gggagacuccugucgggcggaaguaggaggaguagaguuuaaaaacaguacucuuuuuccgguucgggacguaguugaagcaacgacaagccggauaaccgcucuugagacaggaagcuuaccauggagcuccccauccucaagaccaacgccaucaccaccauccucgccgccgucacccucugcuucgccuccucccagaacaucaccgaggaguucuaccaguccaccugcuccgccgucuccaagggcuaccucggcgcccuccgcaccggcugguacaccuccgucaucaccaucgagcucuccaacaucaaggagaacaagugcaacggcaccgacgccaaggucaagcucaucaagcaggagcucgacaaguacaagaacgccgucaccgagcuccagcuccucaugcaguccacccccgccgccggcuccggcuccgccaucugcuccggcaucgccgucugcaagguccuccaccucgagggcgaggucaacaagaucaagaacgcccuccucuccaccaacaaggccgucgucucccucuccaacggcgucuccguccucaccuucaagguccucgaccucaagaacuacaucgacaagcagcuccuccccauccucaacaagcaguccugcuccauccccaacaucgagaccgucaucgaguuccagcagaagaacaaccgccuccucgagaucacccgcgaguucuccgucaacgccggcgucaccacccccgucuccaccuacaugcucaccaacuccgagcuccucucccucaucaacgacaugcccaucaccaacgaccagaagaagcucauguccaacaacguccagaucguccgccagcaguccuacuccaucaugugcaucaucaaggaggagguccucgccuacgucguccagcucccccucuacggcgucaucgacacccccugcuggaagcuccacaccuccccccucugcaccaccaacaccaaggagggcuccaacaucugccucacccgcaccgaccgcggcugguacugcgacaacgccggcuccgucuccuucuucccccaggccgagaccugcaagguccaguccaaccgcgucuucugcgacaccaugaacucccucacccuccccuccgaggucaaccucugcaacaucgacaucuucaaccccaaguacgacugcaagaucaugaccuccaagaccgacgucuccuccuccgucaucaccucccucggcgccaucgucuccugcuacggcaagaccaagugcaccgccuccaacaagaaccgcggcaucaucaagaccuucuccaacggcugcgacuacgucuccaacaagggcgucgacaccgucuccgucggcaacacccucuacugcgucaacaagcaggagggccagucccucuacgucaagggcgagcccaucaucaacuucuacgacccccucgucuuccccuccgacgaguucgacgccuccaucucccaggucaacgagaagaucaaccagucccucgccuucauccgcaaguccgacgagcuccuccacaacgucaacgucggcaaguccaccaccaacaucaugaucaccaccaucaucaucgucaucaucgucauccuccuccuccucaucgccgucggccucuuccucuacugcaaggcccgcugaggacuaguggaagcauuuuccuggcugauuaaaagaaauuacucagcuauggucaucuguuccuguuagaaggcuaugcagcauauuauauacuaugcgcauguuaugaaaugcauaauaaaaaauuuuaaaaaaucuaaaagaucuaaaaaaaaaaaaaaaaaaaaaaaaaaaaaaaaaaaaaaaaaaaaaaaaaaaaaaaaaaaaaaaaugcaucccccccccccccccccccccccccccccccaaaggcucuuuucagagccaccagaauu

SEQ ID NO: 14409 - RNA, 1943 nt, Artificial Sequence
  mRNA product Design c-2 comprising derived and/or modified sequence from HRSV(Memphis-37)__AIY60640.1__F-del_DSCav1_mut1 (opt3)
gggagacuccugucgggcggaaguaggaggaguagaguuuaaaaacaguacucuuuuuccgguucgggacguaguugaagcaacgacaagccggauaaccgcucuugagacaggaagcuuaccauggagcugcccauccucaagaccaacgccauuacaacuauacuugcugcagugacgcugugcuucgccagcucccagaauaucaccgaagaguuuuaccaaucuacauguucagcggucaguaaaggcuauuugggggcuuuaagaacuggaugguacaccagcguuauuacaaucgaacuguccaacauuaaggagaauaaaugcaacgguaccgacgccaaggugaaacuaaucaagcaggaacucgauaaguauaaaaaugcaguaacugagcugcagcuucugaugcagucuacuccugccgcuggcucggggucagcaauauguagcggaaucgccgugugcaaggucuugcaccucgagggcgaagugaacaaaauuaagaaugcucugcugaguaccaacaaagccguugugucccucucuaauggugucagcguguuaacguucaagguacuggaccuuaagaacuacaucgauaaacaauugcugccaauucuaaauaagcaguccuguucaaucccgaacauagagacuguuauugaauuucagcagaaaaauaacaggcuccuggagaucacccgggaguucagugugaaugcgggggucacaacucccgugagcaccuauaugcuuacaaacucugaacuguugucccucauuaacgacaugccuaucaccaaugaucaaaagaaacugaugucaaacaaugugcagaucguccgccagcagagcuacaguauuaugugcauaaucaaggaggaaguuuuagcauaugugguacaacugccacucuacggagugauugacacgcccuguuggaaacuucauacuucuccucugugcacaaccaacacuaaggagggcuccaauaucuguuugacacgaaccgaucguggcugguacugcgacaacgccgggagcgucucguuuuucccacaggcugaaacguguaaggugcagucuaauagaguguuuugcgauaccaugaacucccuaacacugcccucagagguuaaucucugcaacauagacauuuucaauccuaaauaugauuguaagaucaugacaaguaaaaccgacgucagcuccucugugaucacaagccugggagccauuguaucaugcuacgguaagacuaaauguaccgcaaguaacaagaauaggggcaucauuaagacauuuuccaacgggugcgauuauguuagcaauaaaggaguggacaccgucucugugggcaacacucuuuacugugucaacaagcaagagggucagucacuguaugugaaaggggaaccaauaaucaauuucuacgacccguugguuuuucccagugaugaguucgacgcuagcauuucccaggugaacgaaaagaucaaucagucucucgccuuuauccggaaaucggaugagcuguuacacaacguaaaugucggaaagagcacgacaaacauuaugauaaccacuaucauuaucgugauuaucguuauacugcuacuccugaucgcggugggccuuuucuuguauugcaaggcccgcugaggacuaguggaagcauuuuccuggcugauuaaaagaaauuacucagcuauggucaucuguuccuguuagaaggcuaugcagcauauuauauacuaugcgcauguuaugaaaugcauaauaaaaaauuuuaaaaaaucuaaaagaucuaaaaaaaaaaaaaaaaaaaaaaaaaaaaaaaaaaaaaaaaaaaaaaaaaaaaaaaaaaaaaaaaugcaucccccccccccccccccccccccccccccccaaaggcucuuuucagagccaccagaauu

SEQ ID NO: 14410 - RNA, 1943 nt, Artificial Sequence
  mRNA product Design c-2 comprising derived and/or modified sequence from HRSV(Memphis-37)__AIY60640.1__F-del_DSCav1_mut1 (opt4)
gggagacuccugucgggcggaaguaggaggaguagaguuuaaaaacaguacucuuuuuccgguucgggacguaguugaagcaacgacaagccggauaaccgcucuugagacaggaagcuuaccauggagcugcccauccugaagaccaacgccaucaccaccauccuggccgccgugacccugugcuucgccagcagccagaacaucaccgaggaguucuaccagagcaccugcagcgccgugagcaagggcuaccugggcgcccugagaaccggcugguacaccagcgugaucaccaucgagcugagcaacaucaaggagaacaagugcaacggcaccgacgccaaggugaagcugaucaagcaggagcuggacaaguacaagaacgccgugaccgagcugcagcugcugaugcagagcacccccgccgccggcagcggcagcgccaucugcagcggcaucgccgugugcaaggugcugcaccuggagggcgaggugaacaagaucaagaacgcccugcugagcaccaacaaggccguggugagccugagcaacggcgugagcgugcugaccuucaaggugcuggaccugaagaacuacaucgacaagcagcugcugcccauccugaacaagcagagcugcagcauccccaacaucgagaccgugaucgaguuccagcagaagaacaacagacugcuggagaucaccagagaguucagcgugaacgccggcgugaccacccccgugagcaccuacaugcugaccaacagcgagcugcugagccugaucaacgacaugcccaucaccaacgaccagaagaagcugaugagcaacaacgugcagaucgugagacagcagagcuacagcaucaugugcaucaucaaggaggaggugcuggccuacguggugcagcugccccuguacggcgugaucgacacccccugcuggaagcugcacaccagcccccugugcaccaccaacaccaaggagggcagcaacaucugccugaccagaaccgacagaggcugguacugcgacaacgccggcagcgugagcuucuucccccaggccgagaccugcaaggugcagagcaacagaguguucugcgacaccaugaacagccugacccugcccagcgaggugaaccugugcaacaucgacaucuucaaccccaaguacgacugcaagaucaugaccagcaagaccgacgugagcagcagcgugaucaccagccugggcgccaucgugagcugcuacggcaagaccaagugcaccgccagcaacaagaacagaggcaucaucaagaccuucagcaacggcugcgacuacgugagcaacaagggcguggacaccgugagcgugggcaacacccuguacugcgugaacaagcaggagggccagagccuguacgugaagggcgagcccaucaucaacuucuacgacccccugguguuccccagcgacgaguucgacgccagcaucagccaggugaacgagaagaucaaccagagccuggccuucaucagaaagagcgacgagcugcugcacaacgugaacgugggcaagagcaccaccaacaucaugaucaccaccaucaucaucgugaucaucgugauccugcugcugcugaucgccgugggccuguuccuguacugcaaggccagaugaggacuaguggaagcauuuuccuggcugauuaaaagaaauuacucagcuauggucaucuguuccuguuagaaggcuaugcagcauauuauauacuaugcgcauguuaugaaaugcauaauaaaaaauuuuaaaaaaucuaaaagaucuaaaaaaaaaaaaaaaaaaaaaaaaaaaaaaaaaaaaaaaaaaaaaaaaaaaaaaaaaaaaaaaaugcaucccccccccccccccccccccccccccccccaaaggcucuuuucagagccaccagaauu

SEQ ID NO: 14411 - RNA, 1943 nt, Artificial Sequence
  mRNA product Design c-2 comprising derived and/or modified sequence from HRSV(Memphis-37)__AIY60640.1__F-del_DSCav1_mut1 (opt5)
gggagacuccugucgggcggaaguaggaggaguagaguuuaaaaacaguacucuuuuuccgguucgggacguaguugaagcaacgacaagccggauaaccgcucuugagacaggaagcuuaccauggagcugcccauccucaagaccaacgccauuacaacgauccuggcugccgugacccuuugcuucgcgagcucccagaauauuacagaagaguuuuaccaaucuaccuguagcgcugucuccaaaggcuaucugggggcccucagaacaggaugguacaccucuguuaucacaauugaacugagcaacaucaaggagaauaaaugcaacggcaccgacgccaaggugaaacuuaucaagcaggaacuggauaaguauaaaaaugcugugacggagcuccagcugcugaugcaguccaccccugccgcugggucuggaagcgccauuuguuccggcaucgcggucugcaaggugcuccaccuggagggggaaguuaacaaaauuaagaaugcccuucugagcacaaacaaagcuguggucucucucuccaauggagugagcguucugaccuucaaggugcuugaccugaagaacuacaucgauaaacaacuccugccgauucugaauaagcagucuuguuccauccccaacauugagacagucaucgaauuucagcagaaaaauaaccggcuccuggagaucacccgcgaguucagcgugaaugccggcgugacgacaccugucucuaccuauaugcuuacaaacuccgaacugcucagccugauuaacgacaugcccaucaccaaugaucaaaagaaacuuauguccaacaauguucagauugugagacagcagucuuacagcaucaugugcauuaucaaggaggaagugcuggcuuaugucgugcaacucccucuguacggcguuaucgacacccccuguuggaaacugcauacauccccucucugcacgaccaacacaaaggaggggagcaauauuugucugacccggacagaucgcggaugguacugcgacaacgccggcucuguguccuuuuucccgcaggcggaaaccuguaagguccagagcaauagaguguuuugcgauacgaugaacucucuuacacugcccagcgagguuaaucucugcaacaucgacauuuucaauccuaaauaugauuguaagaucaugaccuccaaaaccgacgugucuagcuccgucauuacaagccugggggccaucgugucuugcuacggaaagaccaaauguacagcuuccaacaagaaucggggcaucauuaagacguuuagcaacgggugcgauuaugucucuaauaaaggaguggacaccguuuccgugggcaacacacuuuacugugucaacaagcaagagggccagagccuguaugugaaaggggaacccaucauuaauuucuacgacccucucguuuuucccuccgaugaguucgacgccucuaucagccaggugaacgaaaagauuaaucagucccuggcuuuuauccgcaaaucugaugagcugcuccacaacgucaaugugggaaagagcaccacaaacauuaugaucaccacgaucauuaucgugauuaucguuauucugcuucugcucaucgccgucggccuguuccuguauugcaaggccagaugaggacuaguggaagcauuuuccuggcugauuaaaagaaauuacucagcuauggucaucuguuccuguuagaaggcuaugcagcauauuauauacuaugcgcauguuaugaaaugcauaauaaaaaauuuuaaaaaaucuaaaagaucuaaaaaaaaaaaaaaaaaaaaaaaaaaaaaaaaaaaaaaaaaaaaaaaaaaaaaaaaaaaaaaaaugcaucccccccccccccccccccccccccccccccaaaggcucuuuucagagccaccagaauu

SEQ ID NO: 14412 - RNA, 1943 nt, Artificial Sequence
  mRNA product Design c-2 comprising derived and/or modified sequence from HRSV(Memphis-37)__AIY60640.1__F-del_DSCav1_mut1 (opt6)
gggagacuccugucgggcggaaguaggaggaguagaguuuaaaaacaguacucuuuuuccgguucgggacguaguugaagcaacgacaagccggauaaccgcucuugagacaggaagcuuaccauggaauuaccaauacuaaaaacaaacgcaauaacaacaauucuagcagcaguaacauuaugcuuugcaucaucccaaaacaucacagaagaauuuuaucaaucaaccugcucagcaguuuccaaaggauacuuaggagcauuaagaacugguugguacacuucaguaaucaccaucgaacucucaaacaucaaggaaaacaaaugcaacggaacagacgcaaaaguuaaacucauaaaacaagaacuugacaaauacaaaaacgccguaacagaacuacaacuucucaugcaaucaacacccgcagcaggauccggaucagccauaugcucaggcauagcaguauguaaaguauuacaucuugaaggugaaguaaacaaaauaaaaaacgcacuucuaucaaccaacaaagcaguaguaucacuaucaaacggaguauccgucuuaacauuuaaaguucuagaccucaaaaacuauauagacaaacaauuacugccaauccucaauaaacaaucaugcucaauaccaaacaucgaaacaguaauagaauuucaacaaaaaaacaacagacuacuagaaauaacaagagaauuuuccgucaacgccggcguaacuacuccaguaucaacauauaugcuaaccaacucagaacuccuaucccucauaaacgacaugccaauaacuaaugaucaaaaaaaacuaaugucaaacaauguacaaauaguuagacaacaaucauacucaaucaugugcauaauaaaagaagaaguacuagcauacgucguccaacuaccccuauacggaguaauagacacaccuugcuggaaacuacacacaucaccccuaugcacaacaaauacaaaagaagguuccaacaucugccuaacaagaacugauagaggaugguacugcgacaacgccggaucaguaucauucuucccucaagcugaaaccugcaaaguacaaucaaacagaguauuuugcgauacaaugaacucccuaacacuucccucagaaguuaaucuuuguaauauagauauauucaacccaaaauacgacugcaaaauaaugacaaguaaaacagacguauccucaucuguaauuacaucacuaggagccauaguaucuugcuacggcaaaaccaaaugcacagcaucaaacaaaaacagagguauuaucaaaaccuucucaaacggaugugacuacguuucaaacaaaggaguagacacaguaucagucggaaacacccuauacuguguuaacaaacaagaaggacaaucacuguacguaaaaggagaacccauaauaaauuucuacgacccacuuguauuuccaucagacgaauuugaugcaucaaucucacaaguaaaugaaaaaauaaaccaaucauuagcauucauaagaaaaucugacgaguuacuacacaacguaaauguuggcaaaucaacaaccaauauaaugauaacaacaauaauaauaguaauaauagucauauuacuccuccucauagccgucggauuauucuuauacugcaaagcaagauaaggacuaguggaagcauuuuccuggcugauuaaaagaaauuacucagcuauggucaucuguuccuguuagaaggcuaugcagcauauuauauacuaugcgcauguuaugaaaugcauaauaaaaaauuuuaaaaaaucuaaaagaucuaaaaaaaaaaaaaaaaaaaaaaaaaaaaaaaaaaaaaaaaaaaaaaaaaaaaaaaaaaaaaaaaugcaucccccccccccccccccccccccccccccccaaaggcucuuuucagagccaccagaauu

SEQ ID NO: 14413 - RNA, 1943 nt, Artificial Sequence
  mRNA product Design c-2 comprising derived and/or modified sequence from HRSV(Memphis-37)__AIY60640.1__F-del_DSCav1_mut1 (opt11)
gggagacuccugucgggcggaaguaggaggaguagaguuuaaaaacaguacucuuuuuccgguucgggacguaguugaagcaacgacaagccggauaaccgcucuugagacaggaagcuuaccauggaacuccccauacuaaaaaccaacgccaucacaacaauccucgccgccgucacacucugcuucgccagcucccaaaacaucaccgaagaguucuaucaaucaaccugcuccgcagucucaaagggauaccucggagcccuccgcaccggaugguacacuuccgucaucacaauagaacucuccaacaucaaagaaaacaaaugcaacggcaccgacgcaaaagucaagcucaucaaacaagaacucgacaaauauaaaaacgccgucaccgaacuccaacuacucaugcaauccacacccgcggccggcucaggcagcgccaucugcucaggcaucgccgucugcaaaguccuccaccucgaaggcgaagucaacaaaaucaaaaacgcccuucuuucaaccaacaaggcaguaguaucccucucaaacggcgucagcguccugaccuucaaaguccuagaccucaaaaacuacauagauaaacaacuccuccccauacugaacaaacaaucgugcuccauccccaauaucgaaaccgucauagaguuccagcagaaaaacaacagacuucucgaaauaacccgagaguucucaguaaacgccggagucaccacacccguaagcaccuacaugcucacaaacucagaacuccuaucccucaucaacgacaugcccaucaccaacgaccagaaaaagcuaauguccaacaacguccaaauaguacgccaacaaagcuacucgauaaugugcaucaucaaggaagaaguacucgccuacgucguccaacucccccucuacggcguaaucgacacacccugcuggaaacuccacacguccccacucugcacaacaaacacaaaagaaggauccaacauaugccuaacccgcaccgacaggggcugguacugcgacaacgcaggcucagucagcuucuuuccccaagccgaaacaugcaaaguccaauccaaccgugucuucugcgacaccaugaacucgcucacccuacccucggaagucaaucucugcaacaucgacaucuucaacccaaaauacgacuguaaaaucaugaccagcaaaacagacguuucuuccagcgucaucacaucacucggcgcgaucguaucaugcuauggcaaaacaaagugcaccgcuagcaauaaaaaccgaggaaucauaaaaaccuucagcaacggcugcgacuacguauccaacaaaggcgucgacaccguauccgucggaaacacccucuacugcgucaacaagcaagaaggacaaucacucuacgucaaaggcgaaccaaucauaaacuucuacgacccacucguauuccccucagacgaguucgacgcauccaucucccaagucaacgaaaagaucaaccaaucucucgccuuuauacgcaaaagcgacgaacuccuucacaacguaaacgucggcaaaagcaccacuaacauaaugaucaccacaaucauaauaguaaucaucguaauacuccuccuacucaucgccgugggccuauuccucuauugcaaagcccgauaaggacuaguggaagcauuuuccuggcugauuaaaagaaauuacucagcuauggucaucuguuccuguuagaaggcuaugcagcauauuauauacuaugcgcauguuaugaaaugcauaauaaaaaauuuuaaaaaaucuaaaagaucuaaaaaaaaaaaaaaaaaaaaaaaaaaaaaaaaaaaaaaaaaaaaaaaaaaaaaaaaaaaaaaaaugcaucccccccccccccccccccccccccccccccaaaggcucuuuucagagccaccagaauu

SEQ ID NO: 14414 - RNA, 1920 nt, Artificial Sequence
  mRNA product Design c-3 comprising derived and/or modified sequence from HRSV(Memphis-37)__AIY60640.1__F-del_DSCav1_mut1 (opt1)
gggagaguccgcucagccagguugcagaagcggcuuagcguguguccuaaucuucucucugcguguagguaggccugugccgcaaacaagcuuaccauggagcugcccauccucaagaccaacgccaucaccacgauccuggccgcggugacccugugcuucgccagcucccagaacaucaccgaggaguucuaccagagcacgugcuccgccgucagcaagggcuaccucggcgcccugcgcaccgggugguacaccagcgugaucaccaucgagcuguccaacaucaaggagaacaagugcaacggcaccgacgccaaggugaagcucaucaagcaggagcuggacaaguacaagaacgcggucacggagcugcagcuccugaugcagagcaccccggccgccggcuccgggagcgcgaucugcuccggcaucgccgucugcaaggugcugcaccucgagggcgaggugaacaagaucaagaacgcccugcuguccaccaacaaggccgucgugagccucuccaacggggugagcguccugaccuucaaggugcuggaccucaagaacuacaucgacaagcagcugcugcccauccugaacaagcagagcugcuccauccccaacaucgagaccgucaucgaguuccagcagaagaacaaccgccuccuggagaucacgcgggaguucagcgugaacgcgggcgugaccacccccgucuccaccuacaugcugacgaacagcgagcuccugucccugaucaacgacaugccgaucaccaacgaccagaagaagcucaugagcaacaacgugcagaucgugcgccagcaguccuacagcaucaugugcaucaucaaggaggagguccuggccuacguggugcagcugccccucuacggggucaucgacacccccugcuggaagcugcacaccagcccccugugcacgaccaacaccaaggagggcuccaacaucugccucacccggacggaccgcgggugguacugcgacaacgccggcagcguguccuucuucccgcaggccgagaccugcaagguccagagcaaccggguguucugcgacaccaugaacucccugacccugcccagcgaggugaaccucugcaacaucgacaucuucaaccccaaguacgacugcaagaucaugacguccaagaccgacgucagcuccagcgugaucaccucccugggcgccaucgugagcugcuacgggaagaccaagugcacggcgagcaacaagaaccgcggcaucaucaagaccuucuccaacgggugcgacuacgucagcaacaagggcguggacaccguguccgucggcaacacccuguacugcgugaacaagcaggagggccagagccucuacgugaagggggagcccaucaucaacuucuacgacccgcuggucuuccccuccgacgaguucgacgccagcaucucccaggugaacgagaagaucaaccagagccuggccuucauccggaaguccgacgagcuccugcacaacgugaacgucggcaagagcaccacgaacaucaugaucaccaccaucaucaucgugaucaucgugauccugcugcuccugaucgccgucgggcuguuccucuacugcaaggcccgcugaggacuaguacuggcugcaucucccuuuccucuguccuccauccuucucccaggauggugaagggggaccugguacccagugauccccaccccaggauccuaaaucaugacuuaccugcuaauaaaaacucauuggaaaagugagaagaucuaaaaaaaaaaaaaaaaaaaaaaaaaaaaaaaaaaaaaaaaaaaaaaaaaaaaaaaaaaaaaaaaugcaucccccccccccccccccccccccccccccccaaaggcucuuuucagagccaccagaauu

SEQ ID NO: 14415 - RNA, 1920 nt, Artificial Sequence
  mRNA product Design c-3 comprising derived and/or modified sequence from HRSV(Memphis-37)__AIY60640.1__F-del_DSCav1_mut1 (opt1)
gggagaguccgcucagccagguugcagaagcggcuuagcguguguccuaaucuucucucugcguguagguaggccugugccgcaaacaagcuuaccauggagcugcccauccucaagaccaacgccaucaccacgauccuggccgcggugacccugugcuucgccagcucccagaacaucaccgaggaguucuaccagagcacgugcuccgccgucagcaagggcuaccucggggcccugcgcaccggcugguacaccuccgugaucaccaucgagcugagcaacaucaaggagaacaagugcaacgggaccgacgccaaggugaagcucaucaagcaggagcuggacaaguacaagaacgcggucacggagcugcagcuccugaugcaguccaccccggccgccggcagcggguccgccaucugcagcggcaucgcggugugcaaggugcugcaccucgagggcgaggucaacaagaucaagaacgcccugcuguccaccaacaaggccguggugagccucuccaacggggucagcgugcugaccuucaaggugcuggaccucaagaacuacaucgacaagcagcugcugcccauccucaacaagcaguccugcagcauccccaacaucgagacggucaucgaguuccagcagaagaacaaccggcugcuggagaucacccgcgaguucuccgugaacgccggcgugaccacccccgucagcacguacaugcucaccaacuccgagcugcugagccucaucaacgacaugccgaucaccaacgaccagaagaagcugaugagcaacaacgugcagaucgugcggcagcaguccuacagcaucaugugcaucaucaaggaggagguccuggccuacguggugcagcucccccuguacggggucaucgacacccccugcuggaagcugcacacgagcccccucugcaccaccaacaccaaggagggcuccaacaucugccugacgcgcaccgaccgggggugguacugcgacaacgcgggcuccgugagcuucuucccgcaggccgagaccugcaaggugcaguccaaccgcgucuucugcgacaccaugaacagccugacgcuccccuccgaggugaaccugugcaacaucgacaucuucaaccccaaguacgacugcaagaucaugaccagcaagaccgacgucuccagcuccgugaucaccagccugggcgccaucguguccugcuacgggaagacgaagugcaccgccagcaacaagaaccggggcaucaucaagaccuucuccaacgggugcgacuacgucagcaacaagggcguggacaccguguccgucggcaacacgcucuacugcgugaacaagcaggaggggcagagccuguacgugaagggcgagcccaucaucaacuucuacgacccgcuggucuuccccagcgacgaguucgacgccuccaucagccaggugaacgagaagaucaaccagucccucgcguucauccgcaagagcgacgagcugcugcacaacgugaacgucgggaaguccaccaccaacaucaugaucaccaccaucaucaucgugaucaucgugauccuccugcugcucaucgccgucggccuguuccuguacugcaaggcccggugaggacuaguacuggcugcaucucccuuuccucuguccuccauccuucucccaggauggugaagggggaccugguacccagugauccccaccccaggauccuaaaucaugacuuaccugcuaauaaaaacucauuggaaaagugagaagaucuaaaaaaaaaaaaaaaaaaaaaaaaaaaaaaaaaaaaaaaaaaaaaaaaaaaaaaaaaaaaaaaaugcaucccccccccccccccccccccccccccccccaaaggcucuuuucagagccaccagaauu

SEQ ID NO: 14416 - RNA, 1920 nt, Artificial Sequence
  mRNA product Design c-3 comprising derived and/or modified sequence from HRSV(Memphis-37)__AIY60640.1__F-del_DSCav1_mut1 (opt2)
gggagaguccgcucagccagguugcagaagcggcuuagcguguguccuaaucuucucucugcguguagguaggccugugccgcaaacaagcuuaccauggagcuccccauccucaagaccaacgccaucaccaccauccucgccgccgucacccucugcuucgccuccucccagaacaucaccgaggaguucuaccaguccaccugcuccgccgucuccaagggcuaccucggcgcccuccgcaccggcugguacaccuccgucaucaccaucgagcucuccaacaucaaggagaacaagugcaacggcaccgacgccaaggucaagcucaucaagcaggagcucgacaaguacaagaacgccgucaccgagcuccagcuccucaugcaguccacccccgccgccggcuccggcuccgccaucugcuccggcaucgccgucugcaagguccuccaccucgagggcgaggucaacaagaucaagaacgcccuccucuccaccaacaaggccgucgucucccucuccaacggcgucuccguccucaccuucaagguccucgaccucaagaacuacaucgacaagcagcuccuccccauccucaacaagcaguccugcuccauccccaacaucgagaccgucaucgaguuccagcagaagaacaaccgccuccucgagaucacccgcgaguucuccgucaacgccggcgucaccacccccgucuccaccuacaugcucaccaacuccgagcuccucucccucaucaacgacaugcccaucaccaacgaccagaagaagcucauguccaacaacguccagaucguccgccagcaguccuacuccaucaugugcaucaucaaggaggagguccucgccuacgucguccagcucccccucuacggcgucaucgacacccccugcuggaagcuccacaccuccccccucugcaccaccaacaccaaggagggcuccaacaucugccucacccgcaccgaccgcggcugguacugcgacaacgccggcuccgucuccuucuucccccaggccgagaccugcaagguccaguccaaccgcgucuucugcgacaccaugaacucccucacccuccccuccgaggucaaccucugcaacaucgacaucuucaaccccaaguacgacugcaagaucaugaccuccaagaccgacgucuccuccuccgucaucaccucccucggcgccaucgucuccugcuacggcaagaccaagugcaccgccuccaacaagaaccgcggcaucaucaagaccuucuccaacggcugcgacuacgucuccaacaagggcgucgacaccgucuccgucggcaacacccucuacugcgucaacaagcaggagggccagucccucuacgucaagggcgagcccaucaucaacuucuacgacccccucgucuuccccuccgacgaguucgacgccuccaucucccaggucaacgagaagaucaaccagucccucgccuucauccgcaaguccgacgagcuccuccacaacgucaacgucggcaaguccaccaccaacaucaugaucaccaccaucaucaucgucaucaucgucauccuccuccuccucaucgccgucggccucuuccucuacugcaaggcccgcugaggacuaguacuggcugcaucucccuuuccucuguccuccauccuucucccaggauggugaagggggaccugguacccagugauccccaccccaggauccuaaaucaugacuuaccugcuaauaaaaacucauuggaaaagugagaagaucuaaaaaaaaaaaaaaaaaaaaaaaaaaaaaaaaaaaaaaaaaaaaaaaaaaaaaaaaaaaaaaaaugcaucccccccccccccccccccccccccccccccaaaggcucuuuucagagccaccagaauu

SEQ ID NO: 14417 - RNA, 1920 nt, Artificial Sequence
  mRNA product Design c-3 comprising derived and/or modified sequence from HRSV(Memphis-37)__AIY60640.1__F-del_DSCav1_mut1 (opt3)
gggagaguccgcucagccagguugcagaagcggcuuagcguguguccuaaucuucucucugcguguagguaggccugugccgcaaacaagcuuaccauggagcugcccauccucaagaccaacgccauuacaacuauacuugcugcagugacgcugugcuucgccagcucccagaauaucaccgaagaguuuuaccaaucuacauguucagcggucaguaaaggcuauuugggggcuuuaagaacuggaugguacaccagcguuauuacaaucgaacuguccaacauuaaggagaauaaaugcaacgguaccgacgccaaggugaaacuaaucaagcaggaacucgauaaguauaaaaaugcaguaacugagcugcagcuucugaugcagucuacuccugccgcuggcucggggucagcaauauguagcggaaucgccgugugcaaggucuugcaccucgagggcgaagugaacaaaauuaagaaugcucugcugaguaccaacaaagccguugugucccucucuaauggugucagcguguuaacguucaagguacuggaccuuaagaacuacaucgauaaacaauugcugccaauucuaaauaagcaguccuguucaaucccgaacauagagacuguuauugaauuucagcagaaaaauaacaggcuccuggagaucacccgggaguucagugugaaugcgggggucacaacucccgugagcaccuauaugcuuacaaacucugaacuguugucccucauuaacgacaugccuaucaccaaugaucaaaagaaacugaugucaaacaaugugcagaucguccgccagcagagcuacaguauuaugugcauaaucaaggaggaaguuuuagcauaugugguacaacugccacucuacggagugauugacacgcccuguuggaaacuucauacuucuccucugugcacaaccaacacuaaggagggcuccaauaucuguuugacacgaaccgaucguggcugguacugcgacaacgccgggagcgucucguuuuucccacaggcugaaacguguaaggugcagucuaauagaguguuuugcgauaccaugaacucccuaacacugcccucagagguuaaucucugcaacauagacauuuucaauccuaaauaugauuguaagaucaugacaaguaaaaccgacgucagcuccucugugaucacaagccugggagccauuguaucaugcuacgguaagacuaaauguaccgcaaguaacaagaauaggggcaucauuaagacauuuuccaacgggugcgauuauguuagcaauaaaggaguggacaccgucucugugggcaacacucuuuacugugucaacaagcaagagggucagucacuguaugugaaaggggaaccaauaaucaauuucuacgacccguugguuuuucccagugaugaguucgacgcuagcauuucccaggugaacgaaaagaucaaucagucucucgccuuuauccggaaaucggaugagcuguuacacaacguaaaugucggaaagagcacgacaaacauuaugauaaccacuaucauuaucgugauuaucguuauacugcuacuccugaucgcggugggccuuuucuuguauugcaaggcccgcugaggacuaguacuggcugcaucucccuuuccucuguccuccauccuucucccaggauggugaagggggaccugguacccagugauccccaccccaggauccuaaaucaugacuuaccugcuaauaaaaacucauuggaaaagugagaagaucuaaaaaaaaaaaaaaaaaaaaaaaaaaaaaaaaaaaaaaaaaaaaaaaaaaaaaaaaaaaaaaaaugcaucccccccccccccccccccccccccccccccaaaggcucuuuucagagccaccagaauu

SEQ ID NO: 14418 - RNA, 1920 nt, Artificial Sequence
  mRNA product Design c-3 comprising derived and/or modified sequence from HRSV(Memphis-37)__AIY60640.1__F-del_DSCav1_mut1 (opt4)
gggagaguccgcucagccagguugcagaagcggcuuagcguguguccuaaucuucucucugcguguagguaggccugugccgcaaacaagcuuaccauggagcugcccauccugaagaccaacgccaucaccaccauccuggccgccgugacccugugcuucgccagcagccagaacaucaccgaggaguucuaccagagcaccugcagcgccgugagcaagggcuaccugggcgcccugagaaccggcugguacaccagcgugaucaccaucgagcugagcaacaucaaggagaacaagugcaacggcaccgacgccaaggugaagcugaucaagcaggagcuggacaaguacaagaacgccgugaccgagcugcagcugcugaugcagagcacccccgccgccggcagcggcagcgccaucugcagcggcaucgccgugugcaaggugcugcaccuggagggcgaggugaacaagaucaagaacgcccugcugagcaccaacaaggccguggugagccugagcaacggcgugagcgugcugaccuucaaggugcuggaccugaagaacuacaucgacaagcagcugcugcccauccugaacaagcagagcugcagcauccccaacaucgagaccgugaucgaguuccagcagaagaacaacagacugcuggagaucaccagagaguucagcgugaacgccggcgugaccacccccgugagcaccuacaugcugaccaacagcgagcugcugagccugaucaacgacaugcccaucaccaacgaccagaagaagcugaugagcaacaacgugcagaucgugagacagcagagcuacagcaucaugugcaucaucaaggaggaggugcuggccuacguggugcagcugccccuguacggcgugaucgacacccccugcuggaagcugcacaccagcccccugugcaccaccaacaccaaggagggcagcaacaucugccugaccagaaccgacagaggcugguacugcgacaacgccggcagcgugagcuucuucccccaggccgagaccugcaaggugcagagcaacagaguguucugcgacaccaugaacagccugacccugcccagcgaggugaaccugugcaacaucgacaucuucaaccccaaguacgacugcaagaucaugaccagcaagaccgacgugagcagcagcgugaucaccagccugggcgccaucgugagcugcuacggcaagaccaagugcaccgccagcaacaagaacagaggcaucaucaagaccuucagcaacggcugcgacuacgugagcaacaagggcguggacaccgugagcgugggcaacacccuguacugcgugaacaagcaggagggccagagccuguacgugaagggcgagcccaucaucaacuucuacgacccccugguguuccccagcgacgaguucgacgccagcaucagccaggugaacgagaagaucaaccagagccuggccuucaucagaaagagcgacgagcugcugcacaacgugaacgugggcaagagcaccaccaacaucaugaucaccaccaucaucaucgugaucaucgugauccugcugcugcugaucgccgugggccuguuccuguacugcaaggccagaugaggacuaguacuggcugcaucucccuuuccucuguccuccauccuucucccaggauggugaagggggaccugguacccagugauccccaccccaggauccuaaaucaugacuuaccugcuaauaaaaacucauuggaaaagugagaagaucuaaaaaaaaaaaaaaaaaaaaaaaaaaaaaaaaaaaaaaaaaaaaaaaaaaaaaaaaaaaaaaaaugcaucccccccccccccccccccccccccccccccaaaggcucuuuucagagccaccagaauu

SEQ ID NO: 14419 - RNA, 1920 nt, Artificial Sequence
  mRNA product Design c-3 comprising derived and/or modified sequence from HRSV(Memphis-37)__AIY60640.1__F-del_DSCav1_mut1 (opt5)
gggagaguccgcucagccagguugcagaagcggcuuagcguguguccuaaucuucucucugcguguagguaggccugugccgcaaacaagcuuaccauggagcugcccauccucaagaccaacgccauuacaacgauccuggcugccgugacccuuugcuucgcgagcucccagaauauuacagaagaguuuuaccaaucuaccuguagcgcugucuccaaaggcuaucugggggcccucagaacaggaugguacaccucuguuaucacaauugaacugagcaacaucaaggagaauaaaugcaacggcaccgacgccaaggugaaacuuaucaagcaggaacuggauaaguauaaaaaugcugugacggagcuccagcugcugaugcaguccaccccugccgcugggucuggaagcgccauuuguuccggcaucgcggucugcaaggugcuccaccuggagggggaaguuaacaaaauuaagaaugcccuucugagcacaaacaaagcuguggucucucucuccaauggagugagcguucugaccuucaaggugcuugaccugaagaacuacaucgauaaacaacuccugccgauucugaauaagcagucuuguuccauccccaacauugagacagucaucgaauuucagcagaaaaauaaccggcuccuggagaucacccgcgaguucagcgugaaugccggcgugacgacaccugucucuaccuauaugcuuacaaacuccgaacugcucagccugauuaacgacaugcccaucaccaaugaucaaaagaaacuuauguccaacaauguucagauugugagacagcagucuuacagcaucaugugcauuaucaaggaggaagugcuggcuuaugucgugcaacucccucuguacggcguuaucgacacccccuguuggaaacugcauacauccccucucugcacgaccaacacaaaggaggggagcaauauuugucugacccggacagaucgcggaugguacugcgacaacgccggcucuguguccuuuuucccgcaggcggaaaccuguaagguccagagcaauagaguguuuugcgauacgaugaacucucuuacacugcccagcgagguuaaucucugcaacaucgacauuuucaauccuaaauaugauuguaagaucaugaccuccaaaaccgacgugucuagcuccgucauuacaagccugggggccaucgugucuugcuacggaaagaccaaauguacagcuuccaacaagaaucggggcaucauuaagacguuuagcaacgggugcgauuaugucucuaauaaaggaguggacaccguuuccgugggcaacacacuuuacugugucaacaagcaagagggccagagccuguaugugaaaggggaacccaucauuaauuucuacgacccucucguuuuucccuccgaugaguucgacgccucuaucagccaggugaacgaaaagauuaaucagucccuggcuuuuauccgcaaaucugaugagcugcuccacaacgucaaugugggaaagagcaccacaaacauuaugaucaccacgaucauuaucgugauuaucguuauucugcuucugcucaucgccgucggccuguuccuguauugcaaggccagaugaggacuaguacuggcugcaucucccuuuccucuguccuccauccuucucccaggauggugaagggggaccugguacccagugauccccaccccaggauccuaaaucaugacuuaccugcuaauaaaaacucauuggaaaagugagaagaucuaaaaaaaaaaaaaaaaaaaaaaaaaaaaaaaaaaaaaaaaaaaaaaaaaaaaaaaaaaaaaaaaugcaucccccccccccccccccccccccccccccccaaaggcucuuuucagagccaccagaauu

SEQ ID NO: 14420 - RNA, 1920 nt, Artificial Sequence
  mRNA product Design c-3 comprising derived and/or modified sequence from HRSV(Memphis-37)__AIY60640.1__F-del_DSCav1_mut1 (opt6)
gggagaguccgcucagccagguugcagaagcggcuuagcguguguccuaaucuucucucugcguguagguaggccugugccgcaaacaagcuuaccauggaauuaccaauacuaaaaacaaacgcaauaacaacaauucuagcagcaguaacauuaugcuuugcaucaucccaaaacaucacagaagaauuuuaucaaucaaccugcucagcaguuuccaaaggauacuuaggagcauuaagaacugguugguacacuucaguaaucaccaucgaacucucaaacaucaaggaaaacaaaugcaacggaacagacgcaaaaguuaaacucauaaaacaagaacuugacaaauacaaaaacgccguaacagaacuacaacuucucaugcaaucaacacccgcagcaggauccggaucagccauaugcucaggcauagcaguauguaaaguauuacaucuugaaggugaaguaaacaaaauaaaaaacgcacuucuaucaaccaacaaagcaguaguaucacuaucaaacggaguauccgucuuaacauuuaaaguucuagaccucaaaaacuauauagacaaacaauuacugccaauccucaauaaacaaucaugcucaauaccaaacaucgaaacaguaauagaauuucaacaaaaaaacaacagacuacuagaaauaacaagagaauuuuccgucaacgccggcguaacuacuccaguaucaacauauaugcuaaccaacucagaacuccuaucccucauaaacgacaugccaauaacuaaugaucaaaaaaaacuaaugucaaacaauguacaaauaguuagacaacaaucauacucaaucaugugcauaauaaaagaagaaguacuagcauacgucguccaacuaccccuauacggaguaauagacacaccuugcuggaaacuacacacaucaccccuaugcacaacaaauacaaaagaagguuccaacaucugccuaacaagaacugauagaggaugguacugcgacaacgccggaucaguaucauucuucccucaagcugaaaccugcaaaguacaaucaaacagaguauuuugcgauacaaugaacucccuaacacuucccucagaaguuaaucuuuguaauauagauauauucaacccaaaauacgacugcaaaauaaugacaaguaaaacagacguauccucaucuguaauuacaucacuaggagccauaguaucuugcuacggcaaaaccaaaugcacagcaucaaacaaaaacagagguauuaucaaaaccuucucaaacggaugugacuacguuucaaacaaaggaguagacacaguaucagucggaaacacccuauacuguguuaacaaacaagaaggacaaucacuguacguaaaaggagaacccauaauaaauuucuacgacccacuuguauuuccaucagacgaauuugaugcaucaaucucacaaguaaaugaaaaaauaaaccaaucauuagcauucauaagaaaaucugacgaguuacuacacaacguaaauguuggcaaaucaacaaccaauauaaugauaacaacaauaauaauaguaauaauagucauauuacuccuccucauagccgucggauuauucuuauacugcaaagcaagauaaggacuaguacuggcugcaucucccuuuccucuguccuccauccuucucccaggauggugaagggggaccugguacccagugauccccaccccaggauccuaaaucaugacuuaccugcuaauaaaaacucauuggaaaagugagaagaucuaaaaaaaaaaaaaaaaaaaaaaaaaaaaaaaaaaaaaaaaaaaaaaaaaaaaaaaaaaaaaaaaugcaucccccccccccccccccccccccccccccccaaaggcucuuuucagagccaccagaauu

SEQ ID NO: 14421 - RNA, 1920 nt, Artificial Sequence
  mRNA product Design c-3 comprising derived and/or modified sequence from HRSV(Memphis-37)__AIY60640.1__F-del_DSCav1_mut1 (opt11)
gggagaguccgcucagccagguugcagaagcggcuuagcguguguccuaaucuucucucugcguguagguaggccugugccgcaaacaagcuuaccauggaacuccccauacuaaaaaccaacgccaucacaacaauccucgccgccgucacacucugcuucgccagcucccaaaacaucaccgaagaguucuaucaaucaaccugcuccgcagucucaaagggauaccucggagcccuccgcaccggaugguacacuuccgucaucacaauagaacucuccaacaucaaagaaaacaaaugcaacggcaccgacgcaaaagucaagcucaucaaacaagaacucgacaaauauaaaaacgccgucaccgaacuccaacuacucaugcaauccacacccgcggccggcucaggcagcgccaucugcucaggcaucgccgucugcaaaguccuccaccucgaaggcgaagucaacaaaaucaaaaacgcccuucuuucaaccaacaaggcaguaguaucccucucaaacggcgucagcguccugaccuucaaaguccuagaccucaaaaacuacauagauaaacaacuccuccccauacugaacaaacaaucgugcuccauccccaauaucgaaaccgucauagaguuccagcagaaaaacaacagacuucucgaaauaacccgagaguucucaguaaacgccggagucaccacacccguaagcaccuacaugcucacaaacucagaacuccuaucccucaucaacgacaugcccaucaccaacgaccagaaaaagcuaauguccaacaacguccaaauaguacgccaacaaagcuacucgauaaugugcaucaucaaggaagaaguacucgccuacgucguccaacucccccucuacggcguaaucgacacacccugcuggaaacuccacacguccccacucugcacaacaaacacaaaagaaggauccaacauaugccuaacccgcaccgacaggggcugguacugcgacaacgcaggcucagucagcuucuuuccccaagccgaaacaugcaaaguccaauccaaccgugucuucugcgacaccaugaacucgcucacccuacccucggaagucaaucucugcaacaucgacaucuucaacccaaaauacgacuguaaaaucaugaccagcaaaacagacguuucuuccagcgucaucacaucacucggcgcgaucguaucaugcuauggcaaaacaaagugcaccgcuagcaauaaaaaccgaggaaucauaaaaaccuucagcaacggcugcgacuacguauccaacaaaggcgucgacaccguauccgucggaaacacccucuacugcgucaacaagcaagaaggacaaucacucuacgucaaaggcgaaccaaucauaaacuucuacgacccacucguauuccccucagacgaguucgacgcauccaucucccaagucaacgaaaagaucaaccaaucucucgccuuuauacgcaaaagcgacgaacuccuucacaacguaaacgucggcaaaagcaccacuaacauaaugaucaccacaaucauaauaguaaucaucguaauacuccuccuacucaucgccgugggccuauuccucuauugcaaagcccgauaaggacuaguacuggcugcaucucccuuuccucuguccuccauccuucucccaggauggugaagggggaccugguacccagugauccccaccccaggauccuaaaucaugacuuaccugcuaauaaaaacucauuggaaaagugagaagaucuaaaaaaaaaaaaaaaaaaaaaaaaaaaaaaaaaaaaaaaaaaaaaaaaaaaaaaaaaaaaaaaaugcaucccccccccccccccccccccccccccccccaaaggcucuuuucagagccaccagaauu

SEQ ID NO: 14422 - RNA, 1916 nt, Artificial Sequence
  mRNA product Design c-4 comprising derived and/or modified sequence from HRSV(Memphis-37)__AIY60640.1__F-del_DSCav1_mut1 (opt1)
gggagaguccgcucagccagguugcagaagcggcuuagcguguguccuaaucuucucucugcguguagguaggccugugccgcaaacaagcuuaccauggagcugcccauccucaagaccaacgccaucaccacgauccuggccgcggugacccugugcuucgccagcucccagaacaucaccgaggaguucuaccagagcacgugcuccgccgucagcaagggcuaccucggcgcccugcgcaccgggugguacaccagcgugaucaccaucgagcuguccaacaucaaggagaacaagugcaacggcaccgacgccaaggugaagcucaucaagcaggagcuggacaaguacaagaacgcggucacggagcugcagcuccugaugcagagcaccccggccgccggcuccgggagcgcgaucugcuccggcaucgccgucugcaaggugcugcaccucgagggcgaggugaacaagaucaagaacgcccugcuguccaccaacaaggccgucgugagccucuccaacggggugagcguccugaccuucaaggugcuggaccucaagaacuacaucgacaagcagcugcugcccauccugaacaagcagagcugcuccauccccaacaucgagaccgucaucgaguuccagcagaagaacaaccgccuccuggagaucacgcgggaguucagcgugaacgcgggcgugaccacccccgucuccaccuacaugcugacgaacagcgagcuccugucccugaucaacgacaugccgaucaccaacgaccagaagaagcucaugagcaacaacgugcagaucgugcgccagcaguccuacagcaucaugugcaucaucaaggaggagguccuggccuacguggugcagcugccccucuacggggucaucgacacccccugcuggaagcugcacaccagcccccugugcacgaccaacaccaaggagggcuccaacaucugccucacccggacggaccgcgggugguacugcgacaacgccggcagcguguccuucuucccgcaggccgagaccugcaagguccagagcaaccggguguucugcgacaccaugaacucccugacccugcccagcgaggugaaccucugcaacaucgacaucuucaaccccaaguacgacugcaagaucaugacguccaagaccgacgucagcuccagcgugaucaccucccugggcgccaucgugagcugcuacgggaagaccaagugcacggcgagcaacaagaaccgcggcaucaucaagaccuucuccaacgggugcgacuacgucagcaacaagggcguggacaccguguccgucggcaacacccuguacugcgugaacaagcaggagggccagagccucuacgugaagggggagcccaucaucaacuucuacgacccgcuggucuuccccuccgacgaguucgacgccagcaucucccaggugaacgagaagaucaaccagagccuggccuucauccggaaguccgacgagcuccugcacaacgugaacgucggcaagagcaccacgaacaucaugaucaccaccaucaucaucgugaucaucgugauccugcugcuccugaucgccgucgggcuguuccucuacugcaaggcccgcugaggacuaguggaagcauuuuccuggcugauuaaaagaaauuacucagcuauggucaucuguuccuguuagaaggcuaugcagcauauuauauacuaugcgcauguuaugaaaugcauaauaaaaaauuuuaaaaaaucuaaaagaucuaaaaaaaaaaaaaaaaaaaaaaaaaaaaaaaaaaaaaaaaaaaaaaaaaaaaaaaaaaaaaaaaugcaucccccccccccccccccccccccccccccccaaaggcucuuuucagagccaccagaauu

SEQ ID NO: 14423 - RNA, 1916 nt, Artificial Sequence
  mRNA product Design c-4 comprising derived and/or modified sequence from HRSV(Memphis-37)__AIY60640.1__F-del_DSCav1_mut1 (opt1)
gggagaguccgcucagccagguugcagaagcggcuuagcguguguccuaaucuucucucugcguguagguaggccugugccgcaaacaagcuuaccauggagcugcccauccucaagaccaacgccaucaccacgauccuggccgcggugacccugugcuucgccagcucccagaacaucaccgaggaguucuaccagagcacgugcuccgccgucagcaagggcuaccucggggcccugcgcaccggcugguacaccuccgugaucaccaucgagcugagcaacaucaaggagaacaagugcaacgggaccgacgccaaggugaagcucaucaagcaggagcuggacaaguacaagaacgcggucacggagcugcagcuccugaugcaguccaccccggccgccggcagcggguccgccaucugcagcggcaucgcggugugcaaggugcugcaccucgagggcgaggucaacaagaucaagaacgcccugcuguccaccaacaaggccguggugagccucuccaacggggucagcgugcugaccuucaaggugcuggaccucaagaacuacaucgacaagcagcugcugcccauccucaacaagcaguccugcagcauccccaacaucgagacggucaucgaguuccagcagaagaacaaccggcugcuggagaucacccgcgaguucuccgugaacgccggcgugaccacccccgucagcacguacaugcucaccaacuccgagcugcugagccucaucaacgacaugccgaucaccaacgaccagaagaagcugaugagcaacaacgugcagaucgugcggcagcaguccuacagcaucaugugcaucaucaaggaggagguccuggccuacguggugcagcucccccuguacggggucaucgacacccccugcuggaagcugcacacgagcccccucugcaccaccaacaccaaggagggcuccaacaucugccugacgcgcaccgaccgggggugguacugcgacaacgcgggcuccgugagcuucuucccgcaggccgagaccugcaaggugcaguccaaccgcgucuucugcgacaccaugaacagccugacgcuccccuccgaggugaaccugugcaacaucgacaucuucaaccccaaguacgacugcaagaucaugaccagcaagaccgacgucuccagcuccgugaucaccagccugggcgccaucguguccugcuacgggaagacgaagugcaccgccagcaacaagaaccggggcaucaucaagaccuucuccaacgggugcgacuacgucagcaacaagggcguggacaccguguccgucggcaacacgcucuacugcgugaacaagcaggaggggcagagccuguacgugaagggcgagcccaucaucaacuucuacgacccgcuggucuuccccagcgacgaguucgacgccuccaucagccaggugaacgagaagaucaaccagucccucgcguucauccgcaagagcgacgagcugcugcacaacgugaacgucgggaaguccaccaccaacaucaugaucaccaccaucaucaucgugaucaucgugauccuccugcugcucaucgccgucggccuguuccuguacugcaaggcccggugaggacuaguggaagcauuuuccuggcugauuaaaagaaauuacucagcuauggucaucuguuccuguuagaaggcuaugcagcauauuauauacuaugcgcauguuaugaaaugcauaauaaaaaauuuuaaaaaaucuaaaagaucuaaaaaaaaaaaaaaaaaaaaaaaaaaaaaaaaaaaaaaaaaaaaaaaaaaaaaaaaaaaaaaaaugcaucccccccccccccccccccccccccccccccaaaggcucuuuucagagccaccagaauu

SEQ ID NO: 14424 - RNA, 1916 nt, Artificial Sequence
  mRNA product Design c-4 comprising derived and/or modified sequence from HRSV(Memphis-37)__AIY60640.1__F-del_DSCav1_mut1 (opt2)
gggagaguccgcucagccagguugcagaagcggcuuagcguguguccuaaucuucucucugcguguagguaggccugugccgcaaacaagcuuaccauggagcuccccauccucaagaccaacgccaucaccaccauccucgccgccgucacccucugcuucgccuccucccagaacaucaccgaggaguucuaccaguccaccugcuccgccgucuccaagggcuaccucggcgcccuccgcaccggcugguacaccuccgucaucaccaucgagcucuccaacaucaaggagaacaagugcaacggcaccgacgccaaggucaagcucaucaagcaggagcucgacaaguacaagaacgccgucaccgagcuccagcuccucaugcaguccacccccgccgccggcuccggcuccgccaucugcuccggcaucgccgucugcaagguccuccaccucgagggcgaggucaacaagaucaagaacgcccuccucuccaccaacaaggccgucgucucccucuccaacggcgucuccguccucaccuucaagguccucgaccucaagaacuacaucgacaagcagcuccuccccauccucaacaagcaguccugcuccauccccaacaucgagaccgucaucgaguuccagcagaagaacaaccgccuccucgagaucacccgcgaguucuccgucaacgccggcgucaccacccccgucuccaccuacaugcucaccaacuccgagcuccucucccucaucaacgacaugcccaucaccaacgaccagaagaagcucauguccaacaacguccagaucguccgccagcaguccuacuccaucaugugcaucaucaaggaggagguccucgccuacgucguccagcucccccucuacggcgucaucgacacccccugcuggaagcuccacaccuccccccucugcaccaccaacaccaaggagggcuccaacaucugccucacccgcaccgaccgcggcugguacugcgacaacgccggcuccgucuccuucuucccccaggccgagaccugcaagguccaguccaaccgcgucuucugcgacaccaugaacucccucacccuccccuccgaggucaaccucugcaacaucgacaucuucaaccccaaguacgacugcaagaucaugaccuccaagaccgacgucuccuccuccgucaucaccucccucggcgccaucgucuccugcuacggcaagaccaagugcaccgccuccaacaagaaccgcggcaucaucaagaccuucuccaacggcugcgacuacgucuccaacaagggcgucgacaccgucuccgucggcaacacccucuacugcgucaacaagcaggagggccagucccucuacgucaagggcgagcccaucaucaacuucuacgacccccucgucuuccccuccgacgaguucgacgccuccaucucccaggucaacgagaagaucaaccagucccucgccuucauccgcaaguccgacgagcuccuccacaacgucaacgucggcaaguccaccaccaacaucaugaucaccaccaucaucaucgucaucaucgucauccuccuccuccucaucgccgucggccucuuccucuacugcaaggcccgcugaggacuaguggaagcauuuuccuggcugauuaaaagaaauuacucagcuauggucaucuguuccuguuagaaggcuaugcagcauauuauauacuaugcgcauguuaugaaaugcauaauaaaaaauuuuaaaaaaucuaaaagaucuaaaaaaaaaaaaaaaaaaaaaaaaaaaaaaaaaaaaaaaaaaaaaaaaaaaaaaaaaaaaaaaaugcaucccccccccccccccccccccccccccccccaaaggcucuuuucagagccaccagaauu

SEQ ID NO: 14425 - RNA, 1916 nt, Artificial Sequence
  mRNA product Design c-4 comprising derived and/or modified sequence from HRSV(Memphis-37)__AIY60640.1__F-del_DSCav1_mut1 (opt3)
gggagaguccgcucagccagguugcagaagcggcuuagcguguguccuaaucuucucucugcguguagguaggccugugccgcaaacaagcuuaccauggagcugcccauccucaagaccaacgccauuacaacuauacuugcugcagugacgcugugcuucgccagcucccagaauaucaccgaagaguuuuaccaaucuacauguucagcggucaguaaaggcuauuugggggcuuuaagaacuggaugguacaccagcguuauuacaaucgaacuguccaacauuaaggagaauaaaugcaacgguaccgacgccaaggugaaacuaaucaagcaggaacucgauaaguauaaaaaugcaguaacugagcugcagcuucugaugcagucuacuccugccgcuggcucggggucagcaauauguagcggaaucgccgugugcaaggucuugcaccucgagggcgaagugaacaaaauuaagaaugcucugcugaguaccaacaaagccguugugucccucucuaauggugucagcguguuaacguucaagguacuggaccuuaagaacuacaucgauaaacaauugcugccaauucuaaauaagcaguccuguucaaucccgaacauagagacuguuauugaauuucagcagaaaaauaacaggcuccuggagaucacccgggaguucagugugaaugcgggggucacaacucccgugagcaccuauaugcuuacaaacucugaacuguugucccucauuaacgacaugccuaucaccaaugaucaaaagaaacugaugucaaacaaugugcagaucguccgccagcagagcuacaguauuaugugcauaaucaaggaggaaguuuuagcauaugugguacaacugccacucuacggagugauugacacgcccuguuggaaacuucauacuucuccucugugcacaaccaacacuaaggagggcuccaauaucuguuugacacgaaccgaucguggcugguacugcgacaacgccgggagcgucucguuuuucccacaggcugaaacguguaaggugcagucuaauagaguguuuugcgauaccaugaacucccuaacacugcccucagagguuaaucucugcaacauagacauuuucaauccuaaauaugauuguaagaucaugacaaguaaaaccgacgucagcuccucugugaucacaagccugggagccauuguaucaugcuacgguaagacuaaauguaccgcaaguaacaagaauaggggcaucauuaagacauuuuccaacgggugcgauuauguuagcaauaaaggaguggacaccgucucugugggcaacacucuuuacugugucaacaagcaagagggucagucacuguaugugaaaggggaaccaauaaucaauuucuacgacccguugguuuuucccagugaugaguucgacgcuagcauuucccaggugaacgaaaagaucaaucagucucucgccuuuauccggaaaucggaugagcuguuacacaacguaaaugucggaaagagcacgacaaacauuaugauaaccacuaucauuaucgugauuaucguuauacugcuacuccugaucgcggugggccuuuucuuguauugcaaggcccgcugaggacuaguggaagcauuuuccuggcugauuaaaagaaauuacucagcuauggucaucuguuccuguuagaaggcuaugcagcauauuauauacuaugcgcauguuaugaaaugcauaauaaaaaauuuuaaaaaaucuaaaagaucuaaaaaaaaaaaaaaaaaaaaaaaaaaaaaaaaaaaaaaaaaaaaaaaaaaaaaaaaaaaaaaaaugcaucccccccccccccccccccccccccccccccaaaggcucuuuucagagccaccagaauu

SEQ ID NO: 14426 - RNA, 1916 nt, Artificial Sequence
  mRNA product Design c-4 comprising derived and/or modified sequence from HRSV(Memphis-37)__AIY60640.1__F-del_DSCav1_mut1 (opt4)
gggagaguccgcucagccagguugcagaagcggcuuagcguguguccuaaucuucucucugcguguagguaggccugugccgcaaacaagcuuaccauggagcugcccauccugaagaccaacgccaucaccaccauccuggccgccgugacccugugcuucgccagcagccagaacaucaccgaggaguucuaccagagcaccugcagcgccgugagcaagggcuaccugggcgcccugagaaccggcugguacaccagcgugaucaccaucgagcugagcaacaucaaggagaacaagugcaacggcaccgacgccaaggugaagcugaucaagcaggagcuggacaaguacaagaacgccgugaccgagcugcagcugcugaugcagagcacccccgccgccggcagcggcagcgccaucugcagcggcaucgccgugugcaaggugcugcaccuggagggcgaggugaacaagaucaagaacgcccugcugagcaccaacaaggccguggugagccugagcaacggcgugagcgugcugaccuucaaggugcuggaccugaagaacuacaucgacaagcagcugcugcccauccugaacaagcagagcugcagcauccccaacaucgagaccgugaucgaguuccagcagaagaacaacagacugcuggagaucaccagagaguucagcgugaacgccggcgugaccacccccgugagcaccuacaugcugaccaacagcgagcugcugagccugaucaacgacaugcccaucaccaacgaccagaagaagcugaugagcaacaacgugcagaucgugagacagcagagcuacagcaucaugugcaucaucaaggaggaggugcuggccuacguggugcagcugccccuguacggcgugaucgacacccccugcuggaagcugcacaccagcccccugugcaccaccaacaccaaggagggcagcaacaucugccugaccagaaccgacagaggcugguacugcgacaacgccggcagcgugagcuucuucccccaggccgagaccugcaaggugcagagcaacagaguguucugcgacaccaugaacagccugacccugcccagcgaggugaaccugugcaacaucgacaucuucaaccccaaguacgacugcaagaucaugaccagcaagaccgacgugagcagcagcgugaucaccagccugggcgccaucgugagcugcuacggcaagaccaagugcaccgccagcaacaagaacagaggcaucaucaagaccuucagcaacggcugcgacuacgugagcaacaagggcguggacaccgugagcgugggcaacacccuguacugcgugaacaagcaggagggccagagccuguacgugaagggcgagcccaucaucaacuucuacgacccccugguguuccccagcgacgaguucgacgccagcaucagccaggugaacgagaagaucaaccagagccuggccuucaucagaaagagcgacgagcugcugcacaacgugaacgugggcaagagcaccaccaacaucaugaucaccaccaucaucaucgugaucaucgugauccugcugcugcugaucgccgugggccuguuccuguacugcaaggccagaugaggacuaguggaagcauuuuccuggcugauuaaaagaaauuacucagcuauggucaucuguuccuguuagaaggcuaugcagcauauuauauacuaugcgcauguuaugaaaugcauaauaaaaaauuuuaaaaaaucuaaaagaucuaaaaaaaaaaaaaaaaaaaaaaaaaaaaaaaaaaaaaaaaaaaaaaaaaaaaaaaaaaaaaaaaugcaucccccccccccccccccccccccccccccccaaaggcucuuuucagagccaccagaauu

SEQ ID NO: 14427 - RNA, 1916 nt, Artificial Sequence
  mRNA product Design c-4 comprising derived and/or modified sequence from HRSV(Memphis-37)__AIY60640.1__F-del_DSCav1_mut1 (opt5)
gggagaguccgcucagccagguugcagaagcggcuuagcguguguccuaaucuucucucugcguguagguaggccugugccgcaaacaagcuuaccauggagcugcccauccucaagaccaacgccauuacaacgauccuggcugccgugacccuuugcuucgcgagcucccagaauauuacagaagaguuuuaccaaucuaccuguagcgcugucuccaaaggcuaucugggggcccucagaacaggaugguacaccucuguuaucacaauugaacugagcaacaucaaggagaauaaaugcaacggcaccgacgccaaggugaaacuuaucaagcaggaacuggauaaguauaaaaaugcugugacggagcuccagcugcugaugcaguccaccccugccgcugggucuggaagcgccauuuguuccggcaucgcggucugcaaggugcuccaccuggagggggaaguuaacaaaauuaagaaugcccuucugagcacaaacaaagcuguggucucucucuccaauggagugagcguucugaccuucaaggugcuugaccugaagaacuacaucgauaaacaacuccugccgauucugaauaagcagucuuguuccauccccaacauugagacagucaucgaauuucagcagaaaaauaaccggcuccuggagaucacccgcgaguucagcgugaaugccggcgugacgacaccugucucuaccuauaugcuuacaaacuccgaacugcucagccugauuaacgacaugcccaucaccaaugaucaaaagaaacuuauguccaacaauguucagauugugagacagcagucuuacagcaucaugugcauuaucaaggaggaagugcuggcuuaugucgugcaacucccucuguacggcguuaucgacacccccuguuggaaacugcauacauccccucucugcacgaccaacacaaaggaggggagcaauauuugucugacccggacagaucgcggaugguacugcgacaacgccggcucuguguccuuuuucccgcaggcggaaaccuguaagguccagagcaauagaguguuuugcgauacgaugaacucucuuacacugcccagcgagguuaaucucugcaacaucgacauuuucaauccuaaauaugauuguaagaucaugaccuccaaaaccgacgugucuagcuccgucauuacaagccugggggccaucgugucuugcuacggaaagaccaaauguacagcuuccaacaagaaucggggcaucauuaagacguuuagcaacgggugcgauuaugucucuaauaaaggaguggacaccguuuccgugggcaacacacuuuacugugucaacaagcaagagggccagagccuguaugugaaaggggaacccaucauuaauuucuacgacccucucguuuuucccuccgaugaguucgacgccucuaucagccaggugaacgaaaagauuaaucagucccuggcuuuuauccgcaaaucugaugagcugcuccacaacgucaaugugggaaagagcaccacaaacauuaugaucaccacgaucauuaucgugauuaucguuauucugcuucugcucaucgccgucggccuguuccuguauugcaaggccagaugaggacuaguggaagcauuuuccuggcugauuaaaagaaauuacucagcuauggucaucuguuccuguuagaaggcuaugcagcauauuauauacuaugcgcauguuaugaaaugcauaauaaaaaauuuuaaaaaaucuaaaagaucuaaaaaaaaaaaaaaaaaaaaaaaaaaaaaaaaaaaaaaaaaaaaaaaaaaaaaaaaaaaaaaaaugcaucccccccccccccccccccccccccccccccaaaggcucuuuucagagccaccagaauu

SEQ ID NO: 14428 - RNA, 1916 nt, Artificial Sequence
  mRNA product Design c-4 comprising derived and/or modified sequence from HRSV(Memphis-37)__AIY60640.1__F-del_DSCav1_mut1 (opt6)
gggagaguccgcucagccagguugcagaagcggcuuagcguguguccuaaucuucucucugcguguagguaggccugugccgcaaacaagcuuaccauggaauuaccaauacuaaaaacaaacgcaauaacaacaauucuagcagcaguaacauuaugcuuugcaucaucccaaaacaucacagaagaauuuuaucaaucaaccugcucagcaguuuccaaaggauacuuaggagcauuaagaacugguugguacacuucaguaaucaccaucgaacucucaaacaucaaggaaaacaaaugcaacggaacagacgcaaaaguuaaacucauaaaacaagaacuugacaaauacaaaaacgccguaacagaacuacaacuucucaugcaaucaacacccgcagcaggauccggaucagccauaugcucaggcauagcaguauguaaaguauuacaucuugaaggugaaguaaacaaaauaaaaaacgcacuucuaucaaccaacaaagcaguaguaucacuaucaaacggaguauccgucuuaacauuuaaaguucuagaccucaaaaacuauauagacaaacaauuacugccaauccucaauaaacaaucaugcucaauaccaaacaucgaaacaguaauagaauuucaacaaaaaaacaacagacuacuagaaauaacaagagaauuuuccgucaacgccggcguaacuacuccaguaucaacauauaugcuaaccaacucagaacuccuaucccucauaaacgacaugccaauaacuaaugaucaaaaaaaacuaaugucaaacaauguacaaauaguuagacaacaaucauacucaaucaugugcauaauaaaagaagaaguacuagcauacgucguccaacuaccccuauacggaguaauagacacaccuugcuggaaacuacacacaucaccccuaugcacaacaaauacaaaagaagguuccaacaucugccuaacaagaacugauagaggaugguacugcgacaacgccggaucaguaucauucuucccucaagcugaaaccugcaaaguacaaucaaacagaguauuuugcgauacaaugaacucccuaacacuucccucagaaguuaaucuuuguaauauagauauauucaacccaaaauacgacugcaaaauaaugacaaguaaaacagacguauccucaucuguaauuacaucacuaggagccauaguaucuugcuacggcaaaaccaaaugcacagcaucaaacaaaaacagagguauuaucaaaaccuucucaaacggaugugacuacguuucaaacaaaggaguagacacaguaucagucggaaacacccuauacuguguuaacaaacaagaaggacaaucacuguacguaaaaggagaacccauaauaaauuucuacgacccacuuguauuuccaucagacgaauuugaugcaucaaucucacaaguaaaugaaaaaauaaaccaaucauuagcauucauaagaaaaucugacgaguuacuacacaacguaaauguuggcaaaucaacaaccaauauaaugauaacaacaauaauaauaguaauaauagucauauuacuccuccucauagccgucggauuauucuuauacugcaaagcaagauaaggacuaguggaagcauuuuccuggcugauuaaaagaaauuacucagcuauggucaucuguuccuguuagaaggcuaugcagcauauuauauacuaugcgcauguuaugaaaugcauaauaaaaaauuuuaaaaaaucuaaaagaucuaaaaaaaaaaaaaaaaaaaaaaaaaaaaaaaaaaaaaaaaaaaaaaaaaaaaaaaaaaaaaaaaugcaucccccccccccccccccccccccccccccccaaaggcucuuuucagagccaccagaauu

SEQ ID NO: 14429 - RNA, 1916 nt, Artificial Sequence
  mRNA product Design c-4 comprising derived and/or modified sequence from HRSV(Memphis-37)__AIY60640.1__F-del_DSCav1_mut1 (opt11)
gggagaguccgcucagccagguugcagaagcggcuuagcguguguccuaaucuucucucugcguguagguaggccugugccgcaaacaagcuuaccauggaacuccccauacuaaaaaccaacgccaucacaacaauccucgccgccgucacacucugcuucgccagcucccaaaacaucaccgaagaguucuaucaaucaaccugcuccgcagucucaaagggauaccucggagcccuccgcaccggaugguacacuuccgucaucacaauagaacucuccaacaucaaagaaaacaaaugcaacggcaccgacgcaaaagucaagcucaucaaacaagaacucgacaaauauaaaaacgccgucaccgaacuccaacuacucaugcaauccacacccgcggccggcucaggcagcgccaucugcucaggcaucgccgucugcaaaguccuccaccucgaaggcgaagucaacaaaaucaaaaacgcccuucuuucaaccaacaaggcaguaguaucccucucaaacggcgucagcguccugaccuucaaaguccuagaccucaaaaacuacauagauaaacaacuccuccccauacugaacaaacaaucgugcuccauccccaauaucgaaaccgucauagaguuccagcagaaaaacaacagacuucucgaaauaacccgagaguucucaguaaacgccggagucaccacacccguaagcaccuacaugcucacaaacucagaacuccuaucccucaucaacgacaugcccaucaccaacgaccagaaaaagcuaauguccaacaacguccaaauaguacgccaacaaagcuacucgauaaugugcaucaucaaggaagaaguacucgccuacgucguccaacucccccucuacggcguaaucgacacacccugcuggaaacuccacacguccccacucugcacaacaaacacaaaagaaggauccaacauaugccuaacccgcaccgacaggggcugguacugcgacaacgcaggcucagucagcuucuuuccccaagccgaaacaugcaaaguccaauccaaccgugucuucugcgacaccaugaacucgcucacccuacccucggaagucaaucucugcaacaucgacaucuucaacccaaaauacgacuguaaaaucaugaccagcaaaacagacguuucuuccagcgucaucacaucacucggcgcgaucguaucaugcuauggcaaaacaaagugcaccgcuagcaauaaaaaccgaggaaucauaaaaaccuucagcaacggcugcgacuacguauccaacaaaggcgucgacaccguauccgucggaaacacccucuacugcgucaacaagcaagaaggacaaucacucuacgucaaaggcgaaccaaucauaaacuucuacgacccacucguauuccccucagacgaguucgacgcauccaucucccaagucaacgaaaagaucaaccaaucucucgccuuuauacgcaaaagcgacgaacuccuucacaacguaaacgucggcaaaagcaccacuaacauaaugaucaccacaaucauaauaguaaucaucguaauacuccuccuacucaucgccgugggccuauuccucuauugcaaagcccgauaaggacuaguggaagcauuuuccuggcugauuaaaagaaauuacucagcuauggucaucuguuccuguuagaaggcuaugcagcauauuauauacuaugcgcauguuaugaaaugcauaauaaaaaauuuuaaaaaaucuaaaagaucuaaaaaaaaaaaaaaaaaaaaaaaaaaaaaaaaaaaaaaaaaaaaaaaaaaaaaaaaaaaaaaaaugcaucccccccccccccccccccccccccccccccaaaggcucuuuucagagccaccagaauu

SEQ ID NO: 14430 - RNA, 1834 nt, Artificial Sequence
  mRNA product Design c-5 comprising derived and/or modified sequence from HRSV(Memphis-37)__AIY60640.1__F-del_DSCav1_mut1 (opt1)
gggagagcggcucggccauuuugucccagucaguccggaggcugcggcugcagaaguaccgccugcggaguaacugcaaagaagcuuaccauggagcugcccauccucaagaccaacgccaucaccacgauccuggccgcggugacccugugcuucgccagcucccagaacaucaccgaggaguucuaccagagcacgugcuccgccgucagcaagggcuaccucggcgcccugcgcaccgggugguacaccagcgugaucaccaucgagcuguccaacaucaaggagaacaagugcaacggcaccgacgccaaggugaagcucaucaagcaggagcuggacaaguacaagaacgcggucacggagcugcagcuccugaugcagagcaccccggccgccggcuccgggagcgcgaucugcuccggcaucgccgucugcaaggugcugcaccucgagggcgaggugaacaagaucaagaacgcccugcuguccaccaacaaggccgucgugagccucuccaacggggugagcguccugaccuucaaggugcuggaccucaagaacuacaucgacaagcagcugcugcccauccugaacaagcagagcugcuccauccccaacaucgagaccgucaucgaguuccagcagaagaacaaccgccuccuggagaucacgcgggaguucagcgugaacgcgggcgugaccacccccgucuccaccuacaugcugacgaacagcgagcuccugucccugaucaacgacaugccgaucaccaacgaccagaagaagcucaugagcaacaacgugcagaucgugcgccagcaguccuacagcaucaugugcaucaucaaggaggagguccuggccuacguggugcagcugccccucuacggggucaucgacacccccugcuggaagcugcacaccagcccccugugcacgaccaacaccaaggagggcuccaacaucugccucacccggacggaccgcgggugguacugcgacaacgccggcagcguguccuucuucccgcaggccgagaccugcaagguccagagcaaccggguguucugcgacaccaugaacucccugacccugcccagcgaggugaaccucugcaacaucgacaucuucaaccccaaguacgacugcaagaucaugacguccaagaccgacgucagcuccagcgugaucaccucccugggcgccaucgugagcugcuacgggaagaccaagugcacggcgagcaacaagaaccgcggcaucaucaagaccuucuccaacgggugcgacuacgucagcaacaagggcguggacaccguguccgucggcaacacccuguacugcgugaacaagcaggagggccagagccucuacgugaagggggagcccaucaucaacuucuacgacccgcuggucuuccccuccgacgaguucgacgccagcaucucccaggugaacgagaagaucaaccagagccuggccuucauccggaaguccgacgagcuccugcacaacgugaacgucggcaagagcaccacgaacaucaugaucaccaccaucaucaucgugaucaucgugauccugcugcuccugaucgccgucgggcuguuccucuacugcaaggcccgcugaggacuagucccuguucccagagcccacuuuuuuuucuuuuuuugaaauaaaauagccugucuuucagaucuaaaaaaaaaaaaaaaaaaaaaaaaaaaaaaaaaaaaaaaaaaaaaaaaaaaaaaaaaaaaaaaaugcaucccccccccccccccccccccccccccccccaaaggcucuuuucagagccaccagaauu

SEQ ID NO: 14431 - RNA, 1834 nt, Artificial Sequence
  mRNA product Design c-5 comprising derived and/or modified sequence from HRSV(Memphis-37)__AIY60640.1__F-del_DSCav1_mut1 (opt1)
gggagagcggcucggccauuuugucccagucaguccggaggcugcggcugcagaaguaccgccugcggaguaacugcaaagaagcuuaccauggagcugcccauccucaagaccaacgccaucaccacgauccuggccgcggugacccugugcuucgccagcucccagaacaucaccgaggaguucuaccagagcacgugcuccgccgucagcaagggcuaccucggggcccugcgcaccggcugguacaccuccgugaucaccaucgagcugagcaacaucaaggagaacaagugcaacgggaccgacgccaaggugaagcucaucaagcaggagcuggacaaguacaagaacgcggucacggagcugcagcuccugaugcaguccaccccggccgccggcagcggguccgccaucugcagcggcaucgcggugugcaaggugcugcaccucgagggcgaggucaacaagaucaagaacgcccugcuguccaccaacaaggccguggugagccucuccaacggggucagcgugcugaccuucaaggugcuggaccucaagaacuacaucgacaagcagcugcugcccauccucaacaagcaguccugcagcauccccaacaucgagacggucaucgaguuccagcagaagaacaaccggcugcuggagaucacccgcgaguucuccgugaacgccggcgugaccacccccgucagcacguacaugcucaccaacuccgagcugcugagccucaucaacgacaugccgaucaccaacgaccagaagaagcugaugagcaacaacgugcagaucgugcggcagcaguccuacagcaucaugugcaucaucaaggaggagguccuggccuacguggugcagcucccccuguacggggucaucgacacccccugcuggaagcugcacacgagcccccucugcaccaccaacaccaaggagggcuccaacaucugccugacgcgcaccgaccgggggugguacugcgacaacgcgggcuccgugagcuucuucccgcaggccgagaccugcaaggugcaguccaaccgcgucuucugcgacaccaugaacagccugacgcuccccuccgaggugaaccugugcaacaucgacaucuucaaccccaaguacgacugcaagaucaugaccagcaagaccgacgucuccagcuccgugaucaccagccugggcgccaucguguccugcuacgggaagacgaagugcaccgccagcaacaagaaccggggcaucaucaagaccuucuccaacgggugcgacuacgucagcaacaagggcguggacaccguguccgucggcaacacgcucuacugcgugaacaagcaggaggggcagagccuguacgugaagggcgagcccaucaucaacuucuacgacccgcuggucuuccccagcgacgaguucgacgccuccaucagccaggugaacgagaagaucaaccagucccucgcguucauccgcaagagcgacgagcugcugcacaacgugaacgucgggaaguccaccaccaacaucaugaucaccaccaucaucaucgugaucaucgugauccuccugcugcucaucgccgucggccuguuccuguacugcaaggcccggugaggacuagucccuguucccagagcccacuuuuuuuucuuuuuuugaaauaaaauagccugucuuucagaucuaaaaaaaaaaaaaaaaaaaaaaaaaaaaaaaaaaaaaaaaaaaaaaaaaaaaaaaaaaaaaaaaugcaucccccccccccccccccccccccccccccccaaaggcucuuuucagagccaccagaauu

SEQ ID NO: 14432 - RNA, 1834 nt, Artificial Sequence
  mRNA product Design c-5 comprising derived and/or modified sequence from HRSV(Memphis-37)__AIY60640.1__F-del_DSCav1_mut1 (opt2)
gggagagcggcucggccauuuugucccagucaguccggaggcugcggcugcagaaguaccgccugcggaguaacugcaaagaagcuuaccauggagcuccccauccucaagaccaacgccaucaccaccauccucgccgccgucacccucugcuucgccuccucccagaacaucaccgaggaguucuaccaguccaccugcuccgccgucuccaagggcuaccucggcgcccuccgcaccggcugguacaccuccgucaucaccaucgagcucuccaacaucaaggagaacaagugcaacggcaccgacgccaaggucaagcucaucaagcaggagcucgacaaguacaagaacgccgucaccgagcuccagcuccucaugcaguccacccccgccgccggcuccggcuccgccaucugcuccggcaucgccgucugcaagguccuccaccucgagggcgaggucaacaagaucaagaacgcccuccucuccaccaacaaggccgucgucucccucuccaacggcgucuccguccucaccuucaagguccucgaccucaagaacuacaucgacaagcagcuccuccccauccucaacaagcaguccugcuccauccccaacaucgagaccgucaucgaguuccagcagaagaacaaccgccuccucgagaucacccgcgaguucuccgucaacgccggcgucaccacccccgucuccaccuacaugcucaccaacuccgagcuccucucccucaucaacgacaugcccaucaccaacgaccagaagaagcucauguccaacaacguccagaucguccgccagcaguccuacuccaucaugugcaucaucaaggaggagguccucgccuacgucguccagcucccccucuacggcgucaucgacacccccugcuggaagcuccacaccuccccccucugcaccaccaacaccaaggagggcuccaacaucugccucacccgcaccgaccgcggcugguacugcgacaacgccggcuccgucuccuucuucccccaggccgagaccugcaagguccaguccaaccgcgucuucugcgacaccaugaacucccucacccuccccuccgaggucaaccucugcaacaucgacaucuucaaccccaaguacgacugcaagaucaugaccuccaagaccgacgucuccuccuccgucaucaccucccucggcgccaucgucuccugcuacggcaagaccaagugcaccgccuccaacaagaaccgcggcaucaucaagaccuucuccaacggcugcgacuacgucuccaacaagggcgucgacaccgucuccgucggcaacacccucuacugcgucaacaagcaggagggccagucccucuacgucaagggcgagcccaucaucaacuucuacgacccccucgucuuccccuccgacgaguucgacgccuccaucucccaggucaacgagaagaucaaccagucccucgccuucauccgcaaguccgacgagcuccuccacaacgucaacgucggcaaguccaccaccaacaucaugaucaccaccaucaucaucgucaucaucgucauccuccuccuccucaucgccgucggccucuuccucuacugcaaggcccgcugaggacuagucccuguucccagagcccacuuuuuuuucuuuuuuugaaauaaaauagccugucuuucagaucuaaaaaaaaaaaaaaaaaaaaaaaaaaaaaaaaaaaaaaaaaaaaaaaaaaaaaaaaaaaaaaaaugcaucccccccccccccccccccccccccccccccaaaggcucuuuucagagccaccagaauu

SEQ ID NO: 14433 - RNA, 1834 nt, Artificial Sequence
  mRNA product Design c-5 comprising derived and/or modified sequence from HRSV(Memphis-37)__AIY60640.1__F-del_DSCav1_mut1 (opt3)
gggagagcggcucggccauuuugucccagucaguccggaggcugcggcugcagaaguaccgccugcggaguaacugcaaagaagcuuaccauggagcugcccauccucaagaccaacgccauuacaacuauacuugcugcagugacgcugugcuucgccagcucccagaauaucaccgaagaguuuuaccaaucuacauguucagcggucaguaaaggcuauuugggggcuuuaagaacuggaugguacaccagcguuauuacaaucgaacuguccaacauuaaggagaauaaaugcaacgguaccgacgccaaggugaaacuaaucaagcaggaacucgauaaguauaaaaaugcaguaacugagcugcagcuucugaugcagucuacuccugccgcuggcucggggucagcaauauguagcggaaucgccgugugcaaggucuugcaccucgagggcgaagugaacaaaauuaagaaugcucugcugaguaccaacaaagccguugugucccucucuaauggugucagcguguuaacguucaagguacuggaccuuaagaacuacaucgauaaacaauugcugccaauucuaaauaagcaguccuguucaaucccgaacauagagacuguuauugaauuucagcagaaaaauaacaggcuccuggagaucacccgggaguucagugugaaugcgggggucacaacucccgugagcaccuauaugcuuacaaacucugaacuguugucccucauuaacgacaugccuaucaccaaugaucaaaagaaacugaugucaaacaaugugcagaucguccgccagcagagcuacaguauuaugugcauaaucaaggaggaaguuuuagcauaugugguacaacugccacucuacggagugauugacacgcccuguuggaaacuucauacuucuccucugugcacaaccaacacuaaggagggcuccaauaucuguuugacacgaaccgaucguggcugguacugcgacaacgccgggagcgucucguuuuucccacaggcugaaacguguaaggugcagucuaauagaguguuuugcgauaccaugaacucccuaacacugcccucagagguuaaucucugcaacauagacauuuucaauccuaaauaugauuguaagaucaugacaaguaaaaccgacgucagcuccucugugaucacaagccugggagccauuguaucaugcuacgguaagacuaaauguaccgcaaguaacaagaauaggggcaucauuaagacauuuuccaacgggugcgauuauguuagcaauaaaggaguggacaccgucucugugggcaacacucuuuacugugucaacaagcaagagggucagucacuguaugugaaaggggaaccaauaaucaauuucuacgacccguugguuuuucccagugaugaguucgacgcuagcauuucccaggugaacgaaaagaucaaucagucucucgccuuuauccggaaaucggaugagcuguuacacaacguaaaugucggaaagagcacgacaaacauuaugauaaccacuaucauuaucgugauuaucguuauacugcuacuccugaucgcggugggccuuuucuuguauugcaaggcccgcugaggacuagucccuguucccagagcccacuuuuuuuucuuuuuuugaaauaaaauagccugucuuucagaucuaaaaaaaaaaaaaaaaaaaaaaaaaaaaaaaaaaaaaaaaaaaaaaaaaaaaaaaaaaaaaaaaugcaucccccccccccccccccccccccccccccccaaaggcucuuuucagagccaccagaauu

SEQ ID NO: 14434 - RNA, 1834 nt, Artificial Sequence
  mRNA product Design c-5 comprising derived and/or modified sequence from HRSV(Memphis-37)__AIY60640.1__F-del_DSCav1_mut1 (opt4)
gggagagcggcucggccauuuugucccagucaguccggaggcugcggcugcagaaguaccgccugcggaguaacugcaaagaagcuuaccauggagcugcccauccugaagaccaacgccaucaccaccauccuggccgccgugacccugugcuucgccagcagccagaacaucaccgaggaguucuaccagagcaccugcagcgccgugagcaagggcuaccugggcgcccugagaaccggcugguacaccagcgugaucaccaucgagcugagcaacaucaaggagaacaagugcaacggcaccgacgccaaggugaagcugaucaagcaggagcuggacaaguacaagaacgccgugaccgagcugcagcugcugaugcagagcacccccgccgccggcagcggcagcgccaucugcagcggcaucgccgugugcaaggugcugcaccuggagggcgaggugaacaagaucaagaacgcccugcugagcaccaacaaggccguggugagccugagcaacggcgugagcgugcugaccuucaaggugcuggaccugaagaacuacaucgacaagcagcugcugcccauccugaacaagcagagcugcagcauccccaacaucgagaccgugaucgaguuccagcagaagaacaacagacugcuggagaucaccagagaguucagcgugaacgccggcgugaccacccccgugagcaccuacaugcugaccaacagcgagcugcugagccugaucaacgacaugcccaucaccaacgaccagaagaagcugaugagcaacaacgugcagaucgugagacagcagagcuacagcaucaugugcaucaucaaggaggaggugcuggccuacguggugcagcugccccuguacggcgugaucgacacccccugcuggaagcugcacaccagcccccugugcaccaccaacaccaaggagggcagcaacaucugccugaccagaaccgacagaggcugguacugcgacaacgccggcagcgugagcuucuucccccaggccgagaccugcaaggugcagagcaacagaguguucugcgacaccaugaacagccugacccugcccagcgaggugaaccugugcaacaucgacaucuucaaccccaaguacgacugcaagaucaugaccagcaagaccgacgugagcagcagcgugaucaccagccugggcgccaucgugagcugcuacggcaagaccaagugcaccgccagcaacaagaacagaggcaucaucaagaccuucagcaacggcugcgacuacgugagcaacaagggcguggacaccgugagcgugggcaacacccuguacugcgugaacaagcaggagggccagagccuguacgugaagggcgagcccaucaucaacuucuacgacccccugguguuccccagcgacgaguucgacgccagcaucagccaggugaacgagaagaucaaccagagccuggccuucaucagaaagagcgacgagcugcugcacaacgugaacgugggcaagagcaccaccaacaucaugaucaccaccaucaucaucgugaucaucgugauccugcugcugcugaucgccgugggccuguuccuguacugcaaggccagaugaggacuagucccuguucccagagcccacuuuuuuuucuuuuuuugaaauaaaauagccugucuuucagaucuaaaaaaaaaaaaaaaaaaaaaaaaaaaaaaaaaaaaaaaaaaaaaaaaaaaaaaaaaaaaaaaaugcaucccccccccccccccccccccccccccccccaaaggcucuuuucagagccaccagaauu

SEQ ID NO: 14435 - RNA, 1834 nt, Artificial Sequence
  mRNA product Design c-5 comprising derived and/or modified sequence from HRSV(Memphis-37)__AIY60640.1__F-del_DSCav1_mut1 (opt5)
gggagagcggcucggccauuuugucccagucaguccggaggcugcggcugcagaaguaccgccugcggaguaacugcaaagaagcuuaccauggagcugcccauccucaagaccaacgccauuacaacgauccuggcugccgugacccuuugcuucgcgagcucccagaauauuacagaagaguuuuaccaaucuaccuguagcgcugucuccaaaggcuaucugggggcccucagaacaggaugguacaccucuguuaucacaauugaacugagcaacaucaaggagaauaaaugcaacggcaccgacgccaaggugaaacuuaucaagcaggaacuggauaaguauaaaaaugcugugacggagcuccagcugcugaugcaguccaccccugccgcugggucuggaagcgccauuuguuccggcaucgcggucugcaaggugcuccaccuggagggggaaguuaacaaaauuaagaaugcccuucugagcacaaacaaagcuguggucucucucuccaauggagugagcguucugaccuucaaggugcuugaccugaagaacuacaucgauaaacaacuccugccgauucugaauaagcagucuuguuccauccccaacauugagacagucaucgaauuucagcagaaaaauaaccggcuccuggagaucacccgcgaguucagcgugaaugccggcgugacgacaccugucucuaccuauaugcuuacaaacuccgaacugcucagccugauuaacgacaugcccaucaccaaugaucaaaagaaacuuauguccaacaauguucagauugugagacagcagucuuacagcaucaugugcauuaucaaggaggaagugcuggcuuaugucgugcaacucccucuguacggcguuaucgacacccccuguuggaaacugcauacauccccucucugcacgaccaacacaaaggaggggagcaauauuugucugacccggacagaucgcggaugguacugcgacaacgccggcucuguguccuuuuucccgcaggcggaaaccuguaagguccagagcaauagaguguuuugcgauacgaugaacucucuuacacugcccagcgagguuaaucucugcaacaucgacauuuucaauccuaaauaugauuguaagaucaugaccuccaaaaccgacgugucuagcuccgucauuacaagccugggggccaucgugucuugcuacggaaagaccaaauguacagcuuccaacaagaaucggggcaucauuaagacguuuagcaacgggugcgauuaugucucuaauaaaggaguggacaccguuuccgugggcaacacacuuuacugugucaacaagcaagagggccagagccuguaugugaaaggggaacccaucauuaauuucuacgacccucucguuuuucccuccgaugaguucgacgccucuaucagccaggugaacgaaaagauuaaucagucccuggcuuuuauccgcaaaucugaugagcugcuccacaacgucaaugugggaaagagcaccacaaacauuaugaucaccacgaucauuaucgugauuaucguuauucugcuucugcucaucgccgucggccuguuccuguauugcaaggccagaugaggacuagucccuguucccagagcccacuuuuuuuucuuuuuuugaaauaaaauagccugucuuucagaucuaaaaaaaaaaaaaaaaaaaaaaaaaaaaaaaaaaaaaaaaaaaaaaaaaaaaaaaaaaaaaaaaugcaucccccccccccccccccccccccccccccccaaaggcucuuuucagagccaccagaauu

SEQ ID NO: 14436 - RNA, 1834 nt, Artificial Sequence
  mRNA product Design c-5 comprising derived and/or modified sequence from HRSV(Memphis-37)__AIY60640.1__F-del_DSCav1_mut1 (opt6)
gggagagcggcucggccauuuugucccagucaguccggaggcugcggcugcagaaguaccgccugcggaguaacugcaaagaagcuuaccauggaauuaccaauacuaaaaacaaacgcaauaacaacaauucuagcagcaguaacauuaugcuuugcaucaucccaaaacaucacagaagaauuuuaucaaucaaccugcucagcaguuuccaaaggauacuuaggagcauuaagaacugguugguacacuucaguaaucaccaucgaacucucaaacaucaaggaaaacaaaugcaacggaacagacgcaaaaguuaaacucauaaaacaagaacuugacaaauacaaaaacgccguaacagaacuacaacuucucaugcaaucaacacccgcagcaggauccggaucagccauaugcucaggcauagcaguauguaaaguauuacaucuugaaggugaaguaaacaaaauaaaaaacgcacuucuaucaaccaacaaagcaguaguaucacuaucaaacggaguauccgucuuaacauuuaaaguucuagaccucaaaaacuauauagacaaacaauuacugccaauccucaauaaacaaucaugcucaauaccaaacaucgaaacaguaauagaauuucaacaaaaaaacaacagacuacuagaaauaacaagagaauuuuccgucaacgccggcguaacuacuccaguaucaacauauaugcuaaccaacucagaacuccuaucccucauaaacgacaugccaauaacuaaugaucaaaaaaaacuaaugucaaacaauguacaaauaguuagacaacaaucauacucaaucaugugcauaauaaaagaagaaguacuagcauacgucguccaacuaccccuauacggaguaauagacacaccuugcuggaaacuacacacaucaccccuaugcacaacaaauacaaaagaagguuccaacaucugccuaacaagaacugauagaggaugguacugcgacaacgccggaucaguaucauucuucccucaagcugaaaccugcaaaguacaaucaaacagaguauuuugcgauacaaugaacucccuaacacuucccucagaaguuaaucuuuguaauauagauauauucaacccaaaauacgacugcaaaauaaugacaaguaaaacagacguauccucaucuguaauuacaucacuaggagccauaguaucuugcuacggcaaaaccaaaugcacagcaucaaacaaaaacagagguauuaucaaaaccuucucaaacggaugugacuacguuucaaacaaaggaguagacacaguaucagucggaaacacccuauacuguguuaacaaacaagaaggacaaucacuguacguaaaaggagaacccauaauaaauuucuacgacccacuuguauuuccaucagacgaauuugaugcaucaaucucacaaguaaaugaaaaaauaaaccaaucauuagcauucauaagaaaaucugacgaguuacuacacaacguaaauguuggcaaaucaacaaccaauauaaugauaacaacaauaauaauaguaauaauagucauauuacuccuccucauagccgucggauuauucuuauacugcaaagcaagauaaggacuagucccuguucccagagcccacuuuuuuuucuuuuuuugaaauaaaauagccugucuuucagaucuaaaaaaaaaaaaaaaaaaaaaaaaaaaaaaaaaaaaaaaaaaaaaaaaaaaaaaaaaaaaaaaaugcaucccccccccccccccccccccccccccccccaaaggcucuuuucagagccaccagaauu

SEQ ID NO: 14437 - RNA, 1834 nt, Artificial Sequence
  mRNA product Design c-5 comprising derived and/or modified sequence from HRSV(Memphis-37)__AIY60640.1__F-del_DSCav1_mut1 (opt11)
gggagagcggcucggccauuuugucccagucaguccggaggcugcggcugcagaaguaccgccugcggaguaacugcaaagaagcuuaccauggaacuccccauacuaaaaaccaacgccaucacaacaauccucgccgccgucacacucugcuucgccagcucccaaaacaucaccgaagaguucuaucaaucaaccugcuccgcagucucaaagggauaccucggagcccuccgcaccggaugguacacuuccgucaucacaauagaacucuccaacaucaaagaaaacaaaugcaacggcaccgacgcaaaagucaagcucaucaaacaagaacucgacaaauauaaaaacgccgucaccgaacuccaacuacucaugcaauccacacccgcggccggcucaggcagcgccaucugcucaggcaucgccgucugcaaaguccuccaccucgaaggcgaagucaacaaaaucaaaaacgcccuucuuucaaccaacaaggcaguaguaucccucucaaacggcgucagcguccugaccuucaaaguccuagaccucaaaaacuacauagauaaacaacuccuccccauacugaacaaacaaucgugcuccauccccaauaucgaaaccgucauagaguuccagcagaaaaacaacagacuucucgaaauaacccgagaguucucaguaaacgccggagucaccacacccguaagcaccuacaugcucacaaacucagaacuccuaucccucaucaacgacaugcccaucaccaacgaccagaaaaagcuaauguccaacaacguccaaauaguacgccaacaaagcuacucgauaaugugcaucaucaaggaagaaguacucgccuacgucguccaacucccccucuacggcguaaucgacacacccugcuggaaacuccacacguccccacucugcacaacaaacacaaaagaaggauccaacauaugccuaacccgcaccgacaggggcugguacugcgacaacgcaggcucagucagcuucuuuccccaagccgaaacaugcaaaguccaauccaaccgugucuucugcgacaccaugaacucgcucacccuacccucggaagucaaucucugcaacaucgacaucuucaacccaaaauacgacuguaaaaucaugaccagcaaaacagacguuucuuccagcgucaucacaucacucggcgcgaucguaucaugcuauggcaaaacaaagugcaccgcuagcaauaaaaaccgaggaaucauaaaaaccuucagcaacggcugcgacuacguauccaacaaaggcgucgacaccguauccgucggaaacacccucuacugcgucaacaagcaagaaggacaaucacucuacgucaaaggcgaaccaaucauaaacuucuacgacccacucguauuccccucagacgaguucgacgcauccaucucccaagucaacgaaaagaucaaccaaucucucgccuuuauacgcaaaagcgacgaacuccuucacaacguaaacgucggcaaaagcaccacuaacauaaugaucaccacaaucauaauaguaaucaucguaauacuccuccuacucaucgccgugggccuauuccucuauugcaaagcccgauaaggacuagucccuguucccagagcccacuuuuuuuucuuuuuuugaaauaaaauagccugucuuucagaucuaaaaaaaaaaaaaaaaaaaaaaaaaaaaaaaaaaaaaaaaaaaaaaaaaaaaaaaaaaaaaaaaugcaucccccccccccccccccccccccccccccccaaaggcucuuuucagagccaccagaauu

SEQ ID NO: 14438 - RNA, 1843 nt, Artificial Sequence
  mRNA product Design d-1 comprising derived and/or modified sequence from HRSV(Memphis-37)__AIY60640.1__F-del_DSCav1_mut1 (opt1)
gggagacccgugacccggaaguuguacggcuacgcgacuuucccucccacaaacccucgcgcccuuccuuuccuacuugggcccggcagaaagcuuaccauggagcugcccauccucaagaccaacgccaucaccacgauccuggccgcggugacccugugcuucgccagcucccagaacaucaccgaggaguucuaccagagcacgugcuccgccgucagcaagggcuaccucggcgcccugcgcaccgggugguacaccagcgugaucaccaucgagcuguccaacaucaaggagaacaagugcaacggcaccgacgccaaggugaagcucaucaagcaggagcuggacaaguacaagaacgcggucacggagcugcagcuccugaugcagagcaccccggccgccggcuccgggagcgcgaucugcuccggcaucgccgucugcaaggugcugcaccucgagggcgaggugaacaagaucaagaacgcccugcuguccaccaacaaggccgucgugagccucuccaacggggugagcguccugaccuucaaggugcuggaccucaagaacuacaucgacaagcagcugcugcccauccugaacaagcagagcugcuccauccccaacaucgagaccgucaucgaguuccagcagaagaacaaccgccuccuggagaucacgcgggaguucagcgugaacgcgggcgugaccacccccgucuccaccuacaugcugacgaacagcgagcuccugucccugaucaacgacaugccgaucaccaacgaccagaagaagcucaugagcaacaacgugcagaucgugcgccagcaguccuacagcaucaugugcaucaucaaggaggagguccuggccuacguggugcagcugccccucuacggggucaucgacacccccugcuggaagcugcacaccagcccccugugcacgaccaacaccaaggagggcuccaacaucugccucacccggacggaccgcgggugguacugcgacaacgccggcagcguguccuucuucccgcaggccgagaccugcaagguccagagcaaccggguguucugcgacaccaugaacucccugacccugcccagcgaggugaaccucugcaacaucgacaucuucaaccccaaguacgacugcaagaucaugacguccaagaccgacgucagcuccagcgugaucaccucccugggcgccaucgugagcugcuacgggaagaccaagugcacggcgagcaacaagaaccgcggcaucaucaagaccuucuccaacgggugcgacuacgucagcaacaagggcguggacaccguguccgucggcaacacccuguacugcgugaacaagcaggagggccagagccucuacgugaagggggagcccaucaucaacuucuacgacccgcuggucuuccccuccgacgaguucgacgccagcaucucccaggugaacgagaagaucaaccagagccuggccuucauccggaaguccgacgagcuccugcacaacgugaacgucggcaagagcaccacgaacaucaugaucaccaccaucaucaucgugaucaucgugauccugcugcuccugaucgccgucgggcuguuccucuacugcaaggcccgcugaggacuagucccuguucccagagcccacuuuuuuuucuuuuuuugaaauaaaauagccugucuuucagaucuaaaaaaaaaaaaaaaaaaaaaaaaaaaaaaaaaaaaaaaaaaaaaaaaaaaaaaaaaaaaaaaaugcaucccccccccccccccccccccccccccccccaaaggcucuuuucagagccaccagaauu

SEQ ID NO: 14439 - RNA, 1843 nt, Artificial Sequence
  mRNA product Design d-1 comprising derived and/or modified sequence from HRSV(Memphis-37)__AIY60640.1__F-del_DSCav1_mut1 (opt1)
gggagacccgugacccggaaguuguacggcuacgcgacuuucccucccacaaacccucgcgcccuuccuuuccuacuugggcccggcagaaagcuuaccauggagcugcccauccucaagaccaacgccaucaccacgauccuggccgcggugacccugugcuucgccagcucccagaacaucaccgaggaguucuaccagagcacgugcuccgccgucagcaagggcuaccucggggcccugcgcaccggcugguacaccuccgugaucaccaucgagcugagcaacaucaaggagaacaagugcaacgggaccgacgccaaggugaagcucaucaagcaggagcuggacaaguacaagaacgcggucacggagcugcagcuccugaugcaguccaccccggccgccggcagcggguccgccaucugcagcggcaucgcggugugcaaggugcugcaccucgagggcgaggucaacaagaucaagaacgcccugcuguccaccaacaaggccguggugagccucuccaacggggucagcgugcugaccuucaaggugcuggaccucaagaacuacaucgacaagcagcugcugcccauccucaacaagcaguccugcagcauccccaacaucgagacggucaucgaguuccagcagaagaacaaccggcugcuggagaucacccgcgaguucuccgugaacgccggcgugaccacccccgucagcacguacaugcucaccaacuccgagcugcugagccucaucaacgacaugccgaucaccaacgaccagaagaagcugaugagcaacaacgugcagaucgugcggcagcaguccuacagcaucaugugcaucaucaaggaggagguccuggccuacguggugcagcucccccuguacggggucaucgacacccccugcuggaagcugcacacgagcccccucugcaccaccaacaccaaggagggcuccaacaucugccugacgcgcaccgaccgggggugguacugcgacaacgcgggcuccgugagcuucuucccgcaggccgagaccugcaaggugcaguccaaccgcgucuucugcgacaccaugaacagccugacgcuccccuccgaggugaaccugugcaacaucgacaucuucaaccccaaguacgacugcaagaucaugaccagcaagaccgacgucuccagcuccgugaucaccagccugggcgccaucguguccugcuacgggaagacgaagugcaccgccagcaacaagaaccggggcaucaucaagaccuucuccaacgggugcgacuacgucagcaacaagggcguggacaccguguccgucggcaacacgcucuacugcgugaacaagcaggaggggcagagccuguacgugaagggcgagcccaucaucaacuucuacgacccgcuggucuuccccagcgacgaguucgacgccuccaucagccaggugaacgagaagaucaaccagucccucgcguucauccgcaagagcgacgagcugcugcacaacgugaacgucgggaaguccaccaccaacaucaugaucaccaccaucaucaucgugaucaucgugauccuccugcugcucaucgccgucggccuguuccuguacugcaaggcccggugaggacuagucccuguucccagagcccacuuuuuuuucuuuuuuugaaauaaaauagccugucuuucagaucuaaaaaaaaaaaaaaaaaaaaaaaaaaaaaaaaaaaaaaaaaaaaaaaaaaaaaaaaaaaaaaaaugcaucccccccccccccccccccccccccccccccaaaggcucuuuucagagccaccagaauu

SEQ ID NO: 14440 - RNA, 1843 nt, Artificial Sequence
  mRNA product Design d-1 comprising derived and/or modified sequence from HRSV(Memphis-37)__AIY60640.1__F-del_DSCav1_mut1 (opt2)
gggagacccgugacccggaaguuguacggcuacgcgacuuucccucccacaaacccucgcgcccuuccuuuccuacuugggcccggcagaaagcuuaccauggagcuccccauccucaagaccaacgccaucaccaccauccucgccgccgucacccucugcuucgccuccucccagaacaucaccgaggaguucuaccaguccaccugcuccgccgucuccaagggcuaccucggcgcccuccgcaccggcugguacaccuccgucaucaccaucgagcucuccaacaucaaggagaacaagugcaacggcaccgacgccaaggucaagcucaucaagcaggagcucgacaaguacaagaacgccgucaccgagcuccagcuccucaugcaguccacccccgccgccggcuccggcuccgccaucugcuccggcaucgccgucugcaagguccuccaccucgagggcgaggucaacaagaucaagaacgcccuccucuccaccaacaaggccgucgucucccucuccaacggcgucuccguccucaccuucaagguccucgaccucaagaacuacaucgacaagcagcuccuccccauccucaacaagcaguccugcuccauccccaacaucgagaccgucaucgaguuccagcagaagaacaaccgccuccucgagaucacccgcgaguucuccgucaacgccggcgucaccacccccgucuccaccuacaugcucaccaacuccgagcuccucucccucaucaacgacaugcccaucaccaacgaccagaagaagcucauguccaacaacguccagaucguccgccagcaguccuacuccaucaugugcaucaucaaggaggagguccucgccuacgucguccagcucccccucuacggcgucaucgacacccccugcuggaagcuccacaccuccccccucugcaccaccaacaccaaggagggcuccaacaucugccucacccgcaccgaccgcggcugguacugcgacaacgccggcuccgucuccuucuucccccaggccgagaccugcaagguccaguccaaccgcgucuucugcgacaccaugaacucccucacccuccccuccgaggucaaccucugcaacaucgacaucuucaaccccaaguacgacugcaagaucaugaccuccaagaccgacgucuccuccuccgucaucaccucccucggcgccaucgucuccugcuacggcaagaccaagugcaccgccuccaacaagaaccgcggcaucaucaagaccuucuccaacggcugcgacuacgucuccaacaagggcgucgacaccgucuccgucggcaacacccucuacugcgucaacaagcaggagggccagucccucuacgucaagggcgagcccaucaucaacuucuacgacccccucgucuuccccuccgacgaguucgacgccuccaucucccaggucaacgagaagaucaaccagucccucgccuucauccgcaaguccgacgagcuccuccacaacgucaacgucggcaaguccaccaccaacaucaugaucaccaccaucaucaucgucaucaucgucauccuccuccuccucaucgccgucggccucuuccucuacugcaaggcccgcugaggacuagucccuguucccagagcccacuuuuuuuucuuuuuuugaaauaaaauagccugucuuucagaucuaaaaaaaaaaaaaaaaaaaaaaaaaaaaaaaaaaaaaaaaaaaaaaaaaaaaaaaaaaaaaaaaugcaucccccccccccccccccccccccccccccccaaaggcucuuuucagagccaccagaauu

SEQ ID NO: 14441 - RNA, 1843 nt, Artificial Sequence
  mRNA product Design d-1 comprising derived and/or modified sequence from HRSV(Memphis-37)__AIY60640.1__F-del_DSCav1_mut1 (opt3)
gggagacccgugacccggaaguuguacggcuacgcgacuuucccucccacaaacccucgcgcccuuccuuuccuacuugggcccggcagaaagcuuaccauggagcugcccauccucaagaccaacgccauuacaacuauacuugcugcagugacgcugugcuucgccagcucccagaauaucaccgaagaguuuuaccaaucuacauguucagcggucaguaaaggcuauuugggggcuuuaagaacuggaugguacaccagcguuauuacaaucgaacuguccaacauuaaggagaauaaaugcaacgguaccgacgccaaggugaaacuaaucaagcaggaacucgauaaguauaaaaaugcaguaacugagcugcagcuucugaugcagucuacuccugccgcuggcucggggucagcaauauguagcggaaucgccgugugcaaggucuugcaccucgagggcgaagugaacaaaauuaagaaugcucugcugaguaccaacaaagccguugugucccucucuaauggugucagcguguuaacguucaagguacuggaccuuaagaacuacaucgauaaacaauugcugccaauucuaaauaagcaguccuguucaaucccgaacauagagacuguuauugaauuucagcagaaaaauaacaggcuccuggagaucacccgggaguucagugugaaugcgggggucacaacucccgugagcaccuauaugcuuacaaacucugaacuguugucccucauuaacgacaugccuaucaccaaugaucaaaagaaacugaugucaaacaaugugcagaucguccgccagcagagcuacaguauuaugugcauaaucaaggaggaaguuuuagcauaugugguacaacugccacucuacggagugauugacacgcccuguuggaaacuucauacuucuccucugugcacaaccaacacuaaggagggcuccaauaucuguuugacacgaaccgaucguggcugguacugcgacaacgccgggagcgucucguuuuucccacaggcugaaacguguaaggugcagucuaauagaguguuuugcgauaccaugaacucccuaacacugcccucagagguuaaucucugcaacauagacauuuucaauccuaaauaugauuguaagaucaugacaaguaaaaccgacgucagcuccucugugaucacaagccugggagccauuguaucaugcuacgguaagacuaaauguaccgcaaguaacaagaauaggggcaucauuaagacauuuuccaacgggugcgauuauguuagcaauaaaggaguggacaccgucucugugggcaacacucuuuacugugucaacaagcaagagggucagucacuguaugugaaaggggaaccaauaaucaauuucuacgacccguugguuuuucccagugaugaguucgacgcuagcauuucccaggugaacgaaaagaucaaucagucucucgccuuuauccggaaaucggaugagcuguuacacaacguaaaugucggaaagagcacgacaaacauuaugauaaccacuaucauuaucgugauuaucguuauacugcuacuccugaucgcggugggccuuuucuuguauugcaaggcccgcugaggacuagucccuguucccagagcccacuuuuuuuucuuuuuuugaaauaaaauagccugucuuucagaucuaaaaaaaaaaaaaaaaaaaaaaaaaaaaaaaaaaaaaaaaaaaaaaaaaaaaaaaaaaaaaaaaugcaucccccccccccccccccccccccccccccccaaaggcucuuuucagagccaccagaauu

SEQ ID NO: 14442 - RNA, 1843 nt, Artificial Sequence
  mRNA product Design d-1 comprising derived and/or modified sequence from HRSV(Memphis-37)__AIY60640.1__F-del_DSCav1_mut1 (opt4)
gggagacccgugacccggaaguuguacggcuacgcgacuuucccucccacaaacccucgcgcccuuccuuuccuacuugggcccggcagaaagcuuaccauggagcugcccauccugaagaccaacgccaucaccaccauccuggccgccgugacccugugcuucgccagcagccagaacaucaccgaggaguucuaccagagcaccugcagcgccgugagcaagggcuaccugggcgcccugagaaccggcugguacaccagcgugaucaccaucgagcugagcaacaucaaggagaacaagugcaacggcaccgacgccaaggugaagcugaucaagcaggagcuggacaaguacaagaacgccgugaccgagcugcagcugcugaugcagagcacccccgccgccggcagcggcagcgccaucugcagcggcaucgccgugugcaaggugcugcaccuggagggcgaggugaacaagaucaagaacgcccugcugagcaccaacaaggccguggugagccugagcaacggcgugagcgugcugaccuucaaggugcuggaccugaagaacuacaucgacaagcagcugcugcccauccugaacaagcagagcugcagcauccccaacaucgagaccgugaucgaguuccagcagaagaacaacagacugcuggagaucaccagagaguucagcgugaacgccggcgugaccacccccgugagcaccuacaugcugaccaacagcgagcugcugagccugaucaacgacaugcccaucaccaacgaccagaagaagcugaugagcaacaacgugcagaucgugagacagcagagcuacagcaucaugugcaucaucaaggaggaggugcuggccuacguggugcagcugccccuguacggcgugaucgacacccccugcuggaagcugcacaccagcccccugugcaccaccaacaccaaggagggcagcaacaucugccugaccagaaccgacagaggcugguacugcgacaacgccggcagcgugagcuucuucccccaggccgagaccugcaaggugcagagcaacagaguguucugcgacaccaugaacagccugacccugcccagcgaggugaaccugugcaacaucgacaucuucaaccccaaguacgacugcaagaucaugaccagcaagaccgacgugagcagcagcgugaucaccagccugggcgccaucgugagcugcuacggcaagaccaagugcaccgccagcaacaagaacagaggcaucaucaagaccuucagcaacggcugcgacuacgugagcaacaagggcguggacaccgugagcgugggcaacacccuguacugcgugaacaagcaggagggccagagccuguacgugaagggcgagcccaucaucaacuucuacgacccccugguguuccccagcgacgaguucgacgccagcaucagccaggugaacgagaagaucaaccagagccuggccuucaucagaaagagcgacgagcugcugcacaacgugaacgugggcaagagcaccaccaacaucaugaucaccaccaucaucaucgugaucaucgugauccugcugcugcugaucgccgugggccuguuccuguacugcaaggccagaugaggacuagucccuguucccagagcccacuuuuuuuucuuuuuuugaaauaaaauagccugucuuucagaucuaaaaaaaaaaaaaaaaaaaaaaaaaaaaaaaaaaaaaaaaaaaaaaaaaaaaaaaaaaaaaaaaugcaucccccccccccccccccccccccccccccccaaaggcucuuuucagagccaccagaauu

SEQ ID NO: 14443 - RNA, 1843 nt, Artificial Sequence
  mRNA product Design d-1 comprising derived and/or modified sequence from HRSV(Memphis-37)__AIY60640.1__F-del_DSCav1_mut1 (opt5)
gggagacccgugacccggaaguuguacggcuacgcgacuuucccucccacaaacccucgcgcccuuccuuuccuacuugggcccggcagaaagcuuaccauggagcugcccauccucaagaccaacgccauuacaacgauccuggcugccgugacccuuugcuucgcgagcucccagaauauuacagaagaguuuuaccaaucuaccuguagcgcugucuccaaaggcuaucugggggcccucagaacaggaugguacaccucuguuaucacaauugaacugagcaacaucaaggagaauaaaugcaacggcaccgacgccaaggugaaacuuaucaagcaggaacuggauaaguauaaaaaugcugugacggagcuccagcugcugaugcaguccaccccugccgcugggucuggaagcgccauuuguuccggcaucgcggucugcaaggugcuccaccuggagggggaaguuaacaaaauuaagaaugcccuucugagcacaaacaaagcuguggucucucucuccaauggagugagcguucugaccuucaaggugcuugaccugaagaacuacaucgauaaacaacuccugccgauucugaauaagcagucuuguuccauccccaacauugagacagucaucgaauuucagcagaaaaauaaccggcuccuggagaucacccgcgaguucagcgugaaugccggcgugacgacaccugucucuaccuauaugcuuacaaacuccgaacugcucagccugauuaacgacaugcccaucaccaaugaucaaaagaaacuuauguccaacaauguucagauugugagacagcagucuuacagcaucaugugcauuaucaaggaggaagugcuggcuuaugucgugcaacucccucuguacggcguuaucgacacccccuguuggaaacugcauacauccccucucugcacgaccaacacaaaggaggggagcaauauuugucugacccggacagaucgcggaugguacugcgacaacgccggcucuguguccuuuuucccgcaggcggaaaccuguaagguccagagcaauagaguguuuugcgauacgaugaacucucuuacacugcccagcgagguuaaucucugcaacaucgacauuuucaauccuaaauaugauuguaagaucaugaccuccaaaaccgacgugucuagcuccgucauuacaagccugggggccaucgugucuugcuacggaaagaccaaauguacagcuuccaacaagaaucggggcaucauuaagacguuuagcaacgggugcgauuaugucucuaauaaaggaguggacaccguuuccgugggcaacacacuuuacugugucaacaagcaagagggccagagccuguaugugaaaggggaacccaucauuaauuucuacgacccucucguuuuucccuccgaugaguucgacgccucuaucagccaggugaacgaaaagauuaaucagucccuggcuuuuauccgcaaaucugaugagcugcuccacaacgucaaugugggaaagagcaccacaaacauuaugaucaccacgaucauuaucgugauuaucguuauucugcuucugcucaucgccgucggccuguuccuguauugcaaggccagaugaggacuagucccuguucccagagcccacuuuuuuuucuuuuuuugaaauaaaauagccugucuuucagaucuaaaaaaaaaaaaaaaaaaaaaaaaaaaaaaaaaaaaaaaaaaaaaaaaaaaaaaaaaaaaaaaaugcaucccccccccccccccccccccccccccccccaaaggcucuuuucagagccaccagaauu

SEQ ID NO: 14444 - RNA, 1843 nt, Artificial Sequence
  mRNA product Design d-1 comprising derived and/or modified sequence from HRSV(Memphis-37)__AIY60640.1__F-del_DSCav1_mut1 (opt6)
gggagacccgugacccggaaguuguacggcuacgcgacuuucccucccacaaacccucgcgcccuuccuuuccuacuugggcccggcagaaagcuuaccauggaauuaccaauacuaaaaacaaacgcaauaacaacaauucuagcagcaguaacauuaugcuuugcaucaucccaaaacaucacagaagaauuuuaucaaucaaccugcucagcaguuuccaaaggauacuuaggagcauuaagaacugguugguacacuucaguaaucaccaucgaacucucaaacaucaaggaaaacaaaugcaacggaacagacgcaaaaguuaaacucauaaaacaagaacuugacaaauacaaaaacgccguaacagaacuacaacuucucaugcaaucaacacccgcagcaggauccggaucagccauaugcucaggcauagcaguauguaaaguauuacaucuugaaggugaaguaaacaaaauaaaaaacgcacuucuaucaaccaacaaagcaguaguaucacuaucaaacggaguauccgucuuaacauuuaaaguucuagaccucaaaaacuauauagacaaacaauuacugccaauccucaauaaacaaucaugcucaauaccaaacaucgaaacaguaauagaauuucaacaaaaaaacaacagacuacuagaaauaacaagagaauuuuccgucaacgccggcguaacuacuccaguaucaacauauaugcuaaccaacucagaacuccuaucccucauaaacgacaugccaauaacuaaugaucaaaaaaaacuaaugucaaacaauguacaaauaguuagacaacaaucauacucaaucaugugcauaauaaaagaagaaguacuagcauacgucguccaacuaccccuauacggaguaauagacacaccuugcuggaaacuacacacaucaccccuaugcacaacaaauacaaaagaagguuccaacaucugccuaacaagaacugauagaggaugguacugcgacaacgccggaucaguaucauucuucccucaagcugaaaccugcaaaguacaaucaaacagaguauuuugcgauacaaugaacucccuaacacuucccucagaaguuaaucuuuguaauauagauauauucaacccaaaauacgacugcaaaauaaugacaaguaaaacagacguauccucaucuguaauuacaucacuaggagccauaguaucuugcuacggcaaaaccaaaugcacagcaucaaacaaaaacagagguauuaucaaaaccuucucaaacggaugugacuacguuucaaacaaaggaguagacacaguaucagucggaaacacccuauacuguguuaacaaacaagaaggacaaucacuguacguaaaaggagaacccauaauaaauuucuacgacccacuuguauuuccaucagacgaauuugaugcaucaaucucacaaguaaaugaaaaaauaaaccaaucauuagcauucauaagaaaaucugacgaguuacuacacaacguaaauguuggcaaaucaacaaccaauauaaugauaacaacaauaauaauaguaauaauagucauauuacuccuccucauagccgucggauuauucuuauacugcaaagcaagauaaggacuagucccuguucccagagcccacuuuuuuuucuuuuuuugaaauaaaauagccugucuuucagaucuaaaaaaaaaaaaaaaaaaaaaaaaaaaaaaaaaaaaaaaaaaaaaaaaaaaaaaaaaaaaaaaaugcaucccccccccccccccccccccccccccccccaaaggcucuuuucagagccaccagaauu

SEQ ID NO: 14445 - RNA, 1843 nt, Artificial Sequence
  mRNA product Design d-1 comprising derived and/or modified sequence from HRSV(Memphis-37)__AIY60640.1__F-del_DSCav1_mut1 (opt11)
gggagacccgugacccggaaguuguacggcuacgcgacuuucccucccacaaacccucgcgcccuuccuuuccuacuugggcccggcagaaagcuuaccauggaacuccccauacuaaaaaccaacgccaucacaacaauccucgccgccgucacacucugcuucgccagcucccaaaacaucaccgaagaguucuaucaaucaaccugcuccgcagucucaaagggauaccucggagcccuccgcaccggaugguacacuuccgucaucacaauagaacucuccaacaucaaagaaaacaaaugcaacggcaccgacgcaaaagucaagcucaucaaacaagaacucgacaaauauaaaaacgccgucaccgaacuccaacuacucaugcaauccacacccgcggccggcucaggcagcgccaucugcucaggcaucgccgucugcaaaguccuccaccucgaaggcgaagucaacaaaaucaaaaacgcccuucuuucaaccaacaaggcaguaguaucccucucaaacggcgucagcguccugaccuucaaaguccuagaccucaaaaacuacauagauaaacaacuccuccccauacugaacaaacaaucgugcuccauccccaauaucgaaaccgucauagaguuccagcagaaaaacaacagacuucucgaaauaacccgagaguucucaguaaacgccggagucaccacacccguaagcaccuacaugcucacaaacucagaacuccuaucccucaucaacgacaugcccaucaccaacgaccagaaaaagcuaauguccaacaacguccaaauaguacgccaacaaagcuacucgauaaugugcaucaucaaggaagaaguacucgccuacgucguccaacucccccucuacggcguaaucgacacacccugcuggaaacuccacacguccccacucugcacaacaaacacaaaagaaggauccaacauaugccuaacccgcaccgacaggggcugguacugcgacaacgcaggcucagucagcuucuuuccccaagccgaaacaugcaaaguccaauccaaccgugucuucugcgacaccaugaacucgcucacccuacccucggaagucaaucucugcaacaucgacaucuucaacccaaaauacgacuguaaaaucaugaccagcaaaacagacguuucuuccagcgucaucacaucacucggcgcgaucguaucaugcuauggcaaaacaaagugcaccgcuagcaauaaaaaccgaggaaucauaaaaaccuucagcaacggcugcgacuacguauccaacaaaggcgucgacaccguauccgucggaaacacccucuacugcgucaacaagcaagaaggacaaucacucuacgucaaaggcgaaccaaucauaaacuucuacgacccacucguauuccccucagacgaguucgacgcauccaucucccaagucaacgaaaagaucaaccaaucucucgccuuuauacgcaaaagcgacgaacuccuucacaacguaaacgucggcaaaagcaccacuaacauaaugaucaccacaaucauaauaguaaucaucguaauacuccuccuacucaucgccgugggccuauuccucuauugcaaagcccgauaaggacuagucccuguucccagagcccacuuuuuuuucuuuuuuugaaauaaaauagccugucuuucagaucuaaaaaaaaaaaaaaaaaaaaaaaaaaaaaaaaaaaaaaaaaaaaaaaaaaaaaaaaaaaaaaaaugcaucccccccccccccccccccccccccccccccaaaggcucuuuucagagccaccagaauu

SEQ ID NO: 14446 - RNA, 1898 nt, Artificial Sequence
  mRNA product Design d-2 comprising derived and/or modified sequence from HRSV(Memphis-37)__AIY60640.1__F-del_DSCav1_mut1 (opt1)
gggagagcggcucggccauuuugucccagucaguccggaggcugcggcugcagaaguaccgccugcggaguaacugcaaagaagcuuaccauggagcugcccauccucaagaccaacgccaucaccacgauccuggccgcggugacccugugcuucgccagcucccagaacaucaccgaggaguucuaccagagcacgugcuccgccgucagcaagggcuaccucggcgcccugcgcaccgggugguacaccagcgugaucaccaucgagcuguccaacaucaaggagaacaagugcaacggcaccgacgccaaggugaagcucaucaagcaggagcuggacaaguacaagaacgcggucacggagcugcagcuccugaugcagagcaccccggccgccggcuccgggagcgcgaucugcuccggcaucgccgucugcaaggugcugcaccucgagggcgaggugaacaagaucaagaacgcccugcuguccaccaacaaggccgucgugagccucuccaacggggugagcguccugaccuucaaggugcuggaccucaagaacuacaucgacaagcagcugcugcccauccugaacaagcagagcugcuccauccccaacaucgagaccgucaucgaguuccagcagaagaacaaccgccuccuggagaucacgcgggaguucagcgugaacgcgggcgugaccacccccgucuccaccuacaugcugacgaacagcgagcuccugucccugaucaacgacaugccgaucaccaacgaccagaagaagcucaugagcaacaacgugcagaucgugcgccagcaguccuacagcaucaugugcaucaucaaggaggagguccuggccuacguggugcagcugccccucuacggggucaucgacacccccugcuggaagcugcacaccagcccccugugcacgaccaacaccaaggagggcuccaacaucugccucacccggacggaccgcgggugguacugcgacaacgccggcagcguguccuucuucccgcaggccgagaccugcaagguccagagcaaccggguguucugcgacaccaugaacucccugacccugcccagcgaggugaaccucugcaacaucgacaucuucaaccccaaguacgacugcaagaucaugacguccaagaccgacgucagcuccagcgugaucaccucccugggcgccaucgugagcugcuacgggaagaccaagugcacggcgagcaacaagaaccgcggcaucaucaagaccuucuccaacgggugcgacuacgucagcaacaagggcguggacaccguguccgucggcaacacccuguacugcgugaacaagcaggagggccagagccucuacgugaagggggagcccaucaucaacuucuacgacccgcuggucuuccccuccgacgaguucgacgccagcaucucccaggugaacgagaagaucaaccagagccuggccuucauccggaaguccgacgagcuccugcacaacgugaacgucggcaagagcaccacgaacaucaugaucaccaccaucaucaucgugaucaucgugauccugcugcuccugaucgccgucgggcuguuccucuacugcaaggcccgcugaggacuaguaauaaggaaacuguaugaaugucugugggcaggaagugaagagauccuucuguaaagguuuuuggaauuaugucugcugaauaauaaacuuuuuugaaauaauaaaucugguagaaaaaugagaucuaaaaaaaaaaaaaaaaaaaaaaaaaaaaaaaaaaaaaaaaaaaaaaaaaaaaaaaaaaaaaaaaugcaucccccccccccccccccccccccccccccccaaaggcucuuuucagagccaccagaauu

SEQ ID NO: 14447 - RNA, 1898 nt, Artificial Sequence
  mRNA product Design d-2 comprising derived and/or modified sequence from HRSV(Memphis-37)__AIY60640.1__F-del_DSCav1_mut1 (opt1)
gggagagcggcucggccauuuugucccagucaguccggaggcugcggcugcagaaguaccgccugcggaguaacugcaaagaagcuuaccauggagcugcccauccucaagaccaacgccaucaccacgauccuggccgcggugacccugugcuucgccagcucccagaacaucaccgaggaguucuaccagagcacgugcuccgccgucagcaagggcuaccucggggcccugcgcaccggcugguacaccuccgugaucaccaucgagcugagcaacaucaaggagaacaagugcaacgggaccgacgccaaggugaagcucaucaagcaggagcuggacaaguacaagaacgcggucacggagcugcagcuccugaugcaguccaccccggccgccggcagcggguccgccaucugcagcggcaucgcggugugcaaggugcugcaccucgagggcgaggucaacaagaucaagaacgcccugcuguccaccaacaaggccguggugagccucuccaacggggucagcgugcugaccuucaaggugcuggaccucaagaacuacaucgacaagcagcugcugcccauccucaacaagcaguccugcagcauccccaacaucgagacggucaucgaguuccagcagaagaacaaccggcugcuggagaucacccgcgaguucuccgugaacgccggcgugaccacccccgucagcacguacaugcucaccaacuccgagcugcugagccucaucaacgacaugccgaucaccaacgaccagaagaagcugaugagcaacaacgugcagaucgugcggcagcaguccuacagcaucaugugcaucaucaaggaggagguccuggccuacguggugcagcucccccuguacggggucaucgacacccccugcuggaagcugcacacgagcccccucugcaccaccaacaccaaggagggcuccaacaucugccugacgcgcaccgaccgggggugguacugcgacaacgcgggcuccgugagcuucuucccgcaggccgagaccugcaaggugcaguccaaccgcgucuucugcgacaccaugaacagccugacgcuccccuccgaggugaaccugugcaacaucgacaucuucaaccccaaguacgacugcaagaucaugaccagcaagaccgacgucuccagcuccgugaucaccagccugggcgccaucguguccugcuacgggaagacgaagugcaccgccagcaacaagaaccggggcaucaucaagaccuucuccaacgggugcgacuacgucagcaacaagggcguggacaccguguccgucggcaacacgcucuacugcgugaacaagcaggaggggcagagccuguacgugaagggcgagcccaucaucaacuucuacgacccgcuggucuuccccagcgacgaguucgacgccuccaucagccaggugaacgagaagaucaaccagucccucgcguucauccgcaagagcgacgagcugcugcacaacgugaacgucgggaaguccaccaccaacaucaugaucaccaccaucaucaucgugaucaucgugauccuccugcugcucaucgccgucggccuguuccuguacugcaaggcccggugaggacuaguaauaaggaaacuguaugaaugucugugggcaggaagugaagagauccuucuguaaagguuuuuggaauuaugucugcugaauaauaaacuuuuuugaaauaauaaaucugguagaaaaaugagaucuaaaaaaaaaaaaaaaaaaaaaaaaaaaaaaaaaaaaaaaaaaaaaaaaaaaaaaaaaaaaaaaaugcaucccccccccccccccccccccccccccccccaaaggcucuuuucagagccaccagaauu

SEQ ID NO: 14448 - RNA, 1898 nt, Artificial Sequence
  mRNA product Design d-2 comprising derived and/or modified sequence from HRSV(Memphis-37)__AIY60640.1__F-del_DSCav1_mut1 (opt2)
gggagagcggcucggccauuuugucccagucaguccggaggcugcggcugcagaaguaccgccugcggaguaacugcaaagaagcuuaccauggagcuccccauccucaagaccaacgccaucaccaccauccucgccgccgucacccucugcuucgccuccucccagaacaucaccgaggaguucuaccaguccaccugcuccgccgucuccaagggcuaccucggcgcccuccgcaccggcugguacaccuccgucaucaccaucgagcucuccaacaucaaggagaacaagugcaacggcaccgacgccaaggucaagcucaucaagcaggagcucgacaaguacaagaacgccgucaccgagcuccagcuccucaugcaguccacccccgccgccggcuccggcuccgccaucugcuccggcaucgccgucugcaagguccuccaccucgagggcgaggucaacaagaucaagaacgcccuccucuccaccaacaaggccgucgucucccucuccaacggcgucuccguccucaccuucaagguccucgaccucaagaacuacaucgacaagcagcuccuccccauccucaacaagcaguccugcuccauccccaacaucgagaccgucaucgaguuccagcagaagaacaaccgccuccucgagaucacccgcgaguucuccgucaacgccggcgucaccacccccgucuccaccuacaugcucaccaacuccgagcuccucucccucaucaacgacaugcccaucaccaacgaccagaagaagcucauguccaacaacguccagaucguccgccagcaguccuacuccaucaugugcaucaucaaggaggagguccucgccuacgucguccagcucccccucuacggcgucaucgacacccccugcuggaagcuccacaccuccccccucugcaccaccaacaccaaggagggcuccaacaucugccucacccgcaccgaccgcggcugguacugcgacaacgccggcuccgucuccuucuucccccaggccgagaccugcaagguccaguccaaccgcgucuucugcgacaccaugaacucccucacccuccccuccgaggucaaccucugcaacaucgacaucuucaaccccaaguacgacugcaagaucaugaccuccaagaccgacgucuccuccuccgucaucaccucccucggcgccaucgucuccugcuacggcaagaccaagugcaccgccuccaacaagaaccgcggcaucaucaagaccuucuccaacggcugcgacuacgucuccaacaagggcgucgacaccgucuccgucggcaacacccucuacugcgucaacaagcaggagggccagucccucuacgucaagggcgagcccaucaucaacuucuacgacccccucgucuuccccuccgacgaguucgacgccuccaucucccaggucaacgagaagaucaaccagucccucgccuucauccgcaaguccgacgagcuccuccacaacgucaacgucggcaaguccaccaccaacaucaugaucaccaccaucaucaucgucaucaucgucauccuccuccuccucaucgccgucggccucuuccucuacugcaaggcccgcugaggacuaguaauaaggaaacuguaugaaugucugugggcaggaagugaagagauccuucuguaaagguuuuuggaauuaugucugcugaauaauaaacuuuuuugaaauaauaaaucugguagaaaaaugagaucuaaaaaaaaaaaaaaaaaaaaaaaaaaaaaaaaaaaaaaaaaaaaaaaaaaaaaaaaaaaaaaaaugcaucccccccccccccccccccccccccccccccaaaggcucuuuucagagccaccagaauu

SEQ ID NO: 14449 - RNA, 1898 nt, Artificial Sequence
  mRNA product Design d-2 comprising derived and/or modified sequence from HRSV(Memphis-37)__AIY60640.1__F-del_DSCav1_mut1 (opt3)
gggagagcggcucggccauuuugucccagucaguccggaggcugcggcugcagaaguaccgccugcggaguaacugcaaagaagcuuaccauggagcugcccauccucaagaccaacgccauuacaacuauacuugcugcagugacgcugugcuucgccagcucccagaauaucaccgaagaguuuuaccaaucuacauguucagcggucaguaaaggcuauuugggggcuuuaagaacuggaugguacaccagcguuauuacaaucgaacuguccaacauuaaggagaauaaaugcaacgguaccgacgccaaggugaaacuaaucaagcaggaacucgauaaguauaaaaaugcaguaacugagcugcagcuucugaugcagucuacuccugccgcuggcucggggucagcaauauguagcggaaucgccgugugcaaggucuugcaccucgagggcgaagugaacaaaauuaagaaugcucugcugaguaccaacaaagccguugugucccucucuaauggugucagcguguuaacguucaagguacuggaccuuaagaacuacaucgauaaacaauugcugccaauucuaaauaagcaguccuguucaaucccgaacauagagacuguuauugaauuucagcagaaaaauaacaggcuccuggagaucacccgggaguucagugugaaugcgggggucacaacucccgugagcaccuauaugcuuacaaacucugaacuguugucccucauuaacgacaugccuaucaccaaugaucaaaagaaacugaugucaaacaaugugcagaucguccgccagcagagcuacaguauuaugugcauaaucaaggaggaaguuuuagcauaugugguacaacugccacucuacggagugauugacacgcccuguuggaaacuucauacuucuccucugugcacaaccaacacuaaggagggcuccaauaucuguuugacacgaaccgaucguggcugguacugcgacaacgccgggagcgucucguuuuucccacaggcugaaacguguaaggugcagucuaauagaguguuuugcgauaccaugaacucccuaacacugcccucagagguuaaucucugcaacauagacauuuucaauccuaaauaugauuguaagaucaugacaaguaaaaccgacgucagcuccucugugaucacaagccugggagccauuguaucaugcuacgguaagacuaaauguaccgcaaguaacaagaauaggggcaucauuaagacauuuuccaacgggugcgauuauguuagcaauaaaggaguggacaccgucucugugggcaacacucuuuacugugucaacaagcaagagggucagucacuguaugugaaaggggaaccaauaaucaauuucuacgacccguugguuuuucccagugaugaguucgacgcuagcauuucccaggugaacgaaaagaucaaucagucucucgccuuuauccggaaaucggaugagcuguuacacaacguaaaugucggaaagagcacgacaaacauuaugauaaccacuaucauuaucgugauuaucguuauacugcuacuccugaucgcggugggccuuuucuuguauugcaaggcccgcugaggacuaguaauaaggaaacuguaugaaugucugugggcaggaagugaagagauccuucuguaaagguuuuuggaauuaugucugcugaauaauaaacuuuuuugaaauaauaaaucugguagaaaaaugagaucuaaaaaaaaaaaaaaaaaaaaaaaaaaaaaaaaaaaaaaaaaaaaaaaaaaaaaaaaaaaaaaaaugcaucccccccccccccccccccccccccccccccaaaggcucuuuucagagccaccagaauu

SEQ ID NO: 14450 - RNA, 1898 nt, Artificial Sequence
  mRNA product Design d-2 comprising derived and/or modified sequence from HRSV(Memphis-37)__AIY60640.1__F-del_DSCav1_mut1 (opt4)
gggagagcggcucggccauuuugucccagucaguccggaggcugcggcugcagaaguaccgccugcggaguaacugcaaagaagcuuaccauggagcugcccauccugaagaccaacgccaucaccaccauccuggccgccgugacccugugcuucgccagcagccagaacaucaccgaggaguucuaccagagcaccugcagcgccgugagcaagggcuaccugggcgcccugagaaccggcugguacaccagcgugaucaccaucgagcugagcaacaucaaggagaacaagugcaacggcaccgacgccaaggugaagcugaucaagcaggagcuggacaaguacaagaacgccgugaccgagcugcagcugcugaugcagagcacccccgccgccggcagcggcagcgccaucugcagcggcaucgccgugugcaaggugcugcaccuggagggcgaggugaacaagaucaagaacgcccugcugagcaccaacaaggccguggugagccugagcaacggcgugagcgugcugaccuucaaggugcuggaccugaagaacuacaucgacaagcagcugcugcccauccugaacaagcagagcugcagcauccccaacaucgagaccgugaucgaguuccagcagaagaacaacagacugcuggagaucaccagagaguucagcgugaacgccggcgugaccacccccgugagcaccuacaugcugaccaacagcgagcugcugagccugaucaacgacaugcccaucaccaacgaccagaagaagcugaugagcaacaacgugcagaucgugagacagcagagcuacagcaucaugugcaucaucaaggaggaggugcuggccuacguggugcagcugccccuguacggcgugaucgacacccccugcuggaagcugcacaccagcccccugugcaccaccaacaccaaggagggcagcaacaucugccugaccagaaccgacagaggcugguacugcgacaacgccggcagcgugagcuucuucccccaggccgagaccugcaaggugcagagcaacagaguguucugcgacaccaugaacagccugacccugcccagcgaggugaaccugugcaacaucgacaucuucaaccccaaguacgacugcaagaucaugaccagcaagaccgacgugagcagcagcgugaucaccagccugggcgccaucgugagcugcuacggcaagaccaagugcaccgccagcaacaagaacagaggcaucaucaagaccuucagcaacggcugcgacuacgugagcaacaagggcguggacaccgugagcgugggcaacacccuguacugcgugaacaagcaggagggccagagccuguacgugaagggcgagcccaucaucaacuucuacgacccccugguguuccccagcgacgaguucgacgccagcaucagccaggugaacgagaagaucaaccagagccuggccuucaucagaaagagcgacgagcugcugcacaacgugaacgugggcaagagcaccaccaacaucaugaucaccaccaucaucaucgugaucaucgugauccugcugcugcugaucgccgugggccuguuccuguacugcaaggccagaugaggacuaguaauaaggaaacuguaugaaugucugugggcaggaagugaagagauccuucuguaaagguuuuuggaauuaugucugcugaauaauaaacuuuuuugaaauaauaaaucugguagaaaaaugagaucuaaaaaaaaaaaaaaaaaaaaaaaaaaaaaaaaaaaaaaaaaaaaaaaaaaaaaaaaaaaaaaaaugcaucccccccccccccccccccccccccccccccaaaggcucuuuucagagccaccagaauu

SEQ ID NO: 14451 - RNA, 1898 nt, Artificial Sequence
  mRNA product Design d-2 comprising derived and/or modified sequence from HRSV(Memphis-37)__AIY60640.1__F-del_DSCav1_mut1 (opt5)
gggagagcggcucggccauuuugucccagucaguccggaggcugcggcugcagaaguaccgccugcggaguaacugcaaagaagcuuaccauggagcugcccauccucaagaccaacgccauuacaacgauccuggcugccgugacccuuugcuucgcgagcucccagaauauuacagaagaguuuuaccaaucuaccuguagcgcugucuccaaaggcuaucugggggcccucagaacaggaugguacaccucuguuaucacaauugaacugagcaacaucaaggagaauaaaugcaacggcaccgacgccaaggugaaacuuaucaagcaggaacuggauaaguauaaaaaugcugugacggagcuccagcugcugaugcaguccaccccugccgcugggucuggaagcgccauuuguuccggcaucgcggucugcaaggugcuccaccuggagggggaaguuaacaaaauuaagaaugcccuucugagcacaaacaaagcuguggucucucucuccaauggagugagcguucugaccuucaaggugcuugaccugaagaacuacaucgauaaacaacuccugccgauucugaauaagcagucuuguuccauccccaacauugagacagucaucgaauuucagcagaaaaauaaccggcuccuggagaucacccgcgaguucagcgugaaugccggcgugacgacaccugucucuaccuauaugcuuacaaacuccgaacugcucagccugauuaacgacaugcccaucaccaaugaucaaaagaaacuuauguccaacaauguucagauugugagacagcagucuuacagcaucaugugcauuaucaaggaggaagugcuggcuuaugucgugcaacucccucuguacggcguuaucgacacccccuguuggaaacugcauacauccccucucugcacgaccaacacaaaggaggggagcaauauuugucugacccggacagaucgcggaugguacugcgacaacgccggcucuguguccuuuuucccgcaggcggaaaccuguaagguccagagcaauagaguguuuugcgauacgaugaacucucuuacacugcccagcgagguuaaucucugcaacaucgacauuuucaauccuaaauaugauuguaagaucaugaccuccaaaaccgacgugucuagcuccgucauuacaagccugggggccaucgugucuugcuacggaaagaccaaauguacagcuuccaacaagaaucggggcaucauuaagacguuuagcaacgggugcgauuaugucucuaauaaaggaguggacaccguuuccgugggcaacacacuuuacugugucaacaagcaagagggccagagccuguaugugaaaggggaacccaucauuaauuucuacgacccucucguuuuucccuccgaugaguucgacgccucuaucagccaggugaacgaaaagauuaaucagucccuggcuuuuauccgcaaaucugaugagcugcuccacaacgucaaugugggaaagagcaccacaaacauuaugaucaccacgaucauuaucgugauuaucguuauucugcuucugcucaucgccgucggccuguuccuguauugcaaggccagaugaggacuaguaauaaggaaacuguaugaaugucugugggcaggaagugaagagauccuucuguaaagguuuuuggaauuaugucugcugaauaauaaacuuuuuugaaauaauaaaucugguagaaaaaugagaucuaaaaaaaaaaaaaaaaaaaaaaaaaaaaaaaaaaaaaaaaaaaaaaaaaaaaaaaaaaaaaaaaugcaucccccccccccccccccccccccccccccccaaaggcucuuuucagagccaccagaauu

SEQ ID NO: 14452 - RNA, 1898 nt, Artificial Sequence
  mRNA product Design d-2 comprising derived and/or modified sequence from HRSV(Memphis-37)__AIY60640.1__F-del_DSCav1_mut1 (opt6)
gggagagcggcucggccauuuugucccagucaguccggaggcugcggcugcagaaguaccgccugcggaguaacugcaaagaagcuuaccauggaauuaccaauacuaaaaacaaacgcaauaacaacaauucuagcagcaguaacauuaugcuuugcaucaucccaaaacaucacagaagaauuuuaucaaucaaccugcucagcaguuuccaaaggauacuuaggagcauuaagaacugguugguacacuucaguaaucaccaucgaacucucaaacaucaaggaaaacaaaugcaacggaacagacgcaaaaguuaaacucauaaaacaagaacuugacaaauacaaaaacgccguaacagaacuacaacuucucaugcaaucaacacccgcagcaggauccggaucagccauaugcucaggcauagcaguauguaaaguauuacaucuugaaggugaaguaaacaaaauaaaaaacgcacuucuaucaaccaacaaagcaguaguaucacuaucaaacggaguauccgucuuaacauuuaaaguucuagaccucaaaaacuauauagacaaacaauuacugccaauccucaauaaacaaucaugcucaauaccaaacaucgaaacaguaauagaauuucaacaaaaaaacaacagacuacuagaaauaacaagagaauuuuccgucaacgccggcguaacuacuccaguaucaacauauaugcuaaccaacucagaacuccuaucccucauaaacgacaugccaauaacuaaugaucaaaaaaaacuaaugucaaacaauguacaaauaguuagacaacaaucauacucaaucaugugcauaauaaaagaagaaguacuagcauacgucguccaacuaccccuauacggaguaauagacacaccuugcuggaaacuacacacaucaccccuaugcacaacaaauacaaaagaagguuccaacaucugccuaacaagaacugauagaggaugguacugcgacaacgccggaucaguaucauucuucccucaagcugaaaccugcaaaguacaaucaaacagaguauuuugcgauacaaugaacucccuaacacuucccucagaaguuaaucuuuguaauauagauauauucaacccaaaauacgacugcaaaauaaugacaaguaaaacagacguauccucaucuguaauuacaucacuaggagccauaguaucuugcuacggcaaaaccaaaugcacagcaucaaacaaaaacagagguauuaucaaaaccuucucaaacggaugugacuacguuucaaacaaaggaguagacacaguaucagucggaaacacccuauacuguguuaacaaacaagaaggacaaucacuguacguaaaaggagaacccauaauaaauuucuacgacccacuuguauuuccaucagacgaauuugaugcaucaaucucacaaguaaaugaaaaaauaaaccaaucauuagcauucauaagaaaaucugacgaguuacuacacaacguaaauguuggcaaaucaacaaccaauauaaugauaacaacaauaauaauaguaauaauagucauauuacuccuccucauagccgucggauuauucuuauacugcaaagcaagauaaggacuaguaauaaggaaacuguaugaaugucugugggcaggaagugaagagauccuucuguaaagguuuuuggaauuaugucugcugaauaauaaacuuuuuugaaauaauaaaucugguagaaaaaugagaucuaaaaaaaaaaaaaaaaaaaaaaaaaaaaaaaaaaaaaaaaaaaaaaaaaaaaaaaaaaaaaaaaugcaucccccccccccccccccccccccccccccccaaaggcucuuuucagagccaccagaauu

SEQ ID NO: 14453 - RNA, 1898 nt, Artificial Sequence
  mRNA product Design d-2 comprising derived and/or modified sequence from HRSV(Memphis-37)__AIY60640.1__F-del_DSCav1_mut1 (opt11)
gggagagcggcucggccauuuugucccagucaguccggaggcugcggcugcagaaguaccgccugcggaguaacugcaaagaagcuuaccauggaacuccccauacuaaaaaccaacgccaucacaacaauccucgccgccgucacacucugcuucgccagcucccaaaacaucaccgaagaguucuaucaaucaaccugcuccgcagucucaaagggauaccucggagcccuccgcaccggaugguacacuuccgucaucacaauagaacucuccaacaucaaagaaaacaaaugcaacggcaccgacgcaaaagucaagcucaucaaacaagaacucgacaaauauaaaaacgccgucaccgaacuccaacuacucaugcaauccacacccgcggccggcucaggcagcgccaucugcucaggcaucgccgucugcaaaguccuccaccucgaaggcgaagucaacaaaaucaaaaacgcccuucuuucaaccaacaaggcaguaguaucccucucaaacggcgucagcguccugaccuucaaaguccuagaccucaaaaacuacauagauaaacaacuccuccccauacugaacaaacaaucgugcuccauccccaauaucgaaaccgucauagaguuccagcagaaaaacaacagacuucucgaaauaacccgagaguucucaguaaacgccggagucaccacacccguaagcaccuacaugcucacaaacucagaacuccuaucccucaucaacgacaugcccaucaccaacgaccagaaaaagcuaauguccaacaacguccaaauaguacgccaacaaagcuacucgauaaugugcaucaucaaggaagaaguacucgccuacgucguccaacucccccucuacggcguaaucgacacacccugcuggaaacuccacacguccccacucugcacaacaaacacaaaagaaggauccaacauaugccuaacccgcaccgacaggggcugguacugcgacaacgcaggcucagucagcuucuuuccccaagccgaaacaugcaaaguccaauccaaccgugucuucugcgacaccaugaacucgcucacccuacccucggaagucaaucucugcaacaucgacaucuucaacccaaaauacgacuguaaaaucaugaccagcaaaacagacguuucuuccagcgucaucacaucacucggcgcgaucguaucaugcuauggcaaaacaaagugcaccgcuagcaauaaaaaccgaggaaucauaaaaaccuucagcaacggcugcgacuacguauccaacaaaggcgucgacaccguauccgucggaaacacccucuacugcgucaacaagcaagaaggacaaucacucuacgucaaaggcgaaccaaucauaaacuucuacgacccacucguauuccccucagacgaguucgacgcauccaucucccaagucaacgaaaagaucaaccaaucucucgccuuuauacgcaaaagcgacgaacuccuucacaacguaaacgucggcaaaagcaccacuaacauaaugaucaccacaaucauaauaguaaucaucguaauacuccuccuacucaucgccgugggccuauuccucuauugcaaagcccgauaaggacuaguaauaaggaaacuguaugaaugucugugggcaggaagugaagagauccuucuguaaagguuuuuggaauuaugucugcugaauaauaaacuuuuuugaaauaauaaaucugguagaaaaaugagaucuaaaaaaaaaaaaaaaaaaaaaaaaaaaaaaaaaaaaaaaaaaaaaaaaaaaaaaaaaaaaaaaaugcaucccccccccccccccccccccccccccccccaaaggcucuuuucagagccaccagaauu

SEQ ID NO: 14454 - RNA, 2214 nt, Artificial Sequence
  mRNA product Design d-3 comprising derived and/or modified sequence from HRSV(Memphis-37)__AIY60640.1__F-del_DSCav1_mut1 (opt1)
gggagagggcgcuuggcuugcaaggacccugagcugcggcauugaagcacacccaacccaacucgacugaagucagccucacugaaccggaucugagaaucuucucucucugggcuugccagggcucuccgaaccuagcuagcauccucuucaauuccaacuagaaagcuuaccauggagcugcccauccucaagaccaacgccaucaccacgauccuggccgcggugacccugugcuucgccagcucccagaacaucaccgaggaguucuaccagagcacgugcuccgccgucagcaagggcuaccucggcgcccugcgcaccgggugguacaccagcgugaucaccaucgagcuguccaacaucaaggagaacaagugcaacggcaccgacgccaaggugaagcucaucaagcaggagcuggacaaguacaagaacgcggucacggagcugcagcuccugaugcagagcaccccggccgccggcuccgggagcgcgaucugcuccggcaucgccgucugcaaggugcugcaccucgagggcgaggugaacaagaucaagaacgcccugcuguccaccaacaaggccgucgugagccucuccaacggggugagcguccugaccuucaaggugcuggaccucaagaacuacaucgacaagcagcugcugcccauccugaacaagcagagcugcuccauccccaacaucgagaccgucaucgaguuccagcagaagaacaaccgccuccuggagaucacgcgggaguucagcgugaacgcgggcgugaccacccccgucuccaccuacaugcugacgaacagcgagcuccugucccugaucaacgacaugccgaucaccaacgaccagaagaagcucaugagcaacaacgugcagaucgugcgccagcaguccuacagcaucaugugcaucaucaaggaggagguccuggccuacguggugcagcugccccucuacggggucaucgacacccccugcuggaagcugcacaccagcccccugugcacgaccaacaccaaggagggcuccaacaucugccucacccggacggaccgcgggugguacugcgacaacgccggcagcguguccuucuucccgcaggccgagaccugcaagguccagagcaaccggguguucugcgacaccaugaacucccugacccugcccagcgaggugaaccucugcaacaucgacaucuucaaccccaaguacgacugcaagaucaugacguccaagaccgacgucagcuccagcgugaucaccucccugggcgccaucgugagcugcuacgggaagaccaagugcacggcgagcaacaagaaccgcggcaucaucaagaccuucuccaacgggugcgacuacgucagcaacaagggcguggacaccguguccgucggcaacacccuguacugcgugaacaagcaggagggccagagccucuacgugaagggggagcccaucaucaacuucuacgacccgcuggucuuccccuccgacgaguucgacgccagcaucucccaggugaacgagaagaucaaccagagccuggccuucauccggaaguccgacgagcuccugcacaacgugaacgucggcaagagcaccacgaacaucaugaucaccaccaucaucaucgugaucaucgugauccugcugcuccugaucgccgucgggcuguuccucuacugcaaggcccgcugaggacuagugaagggaacacccaaauuuaauucagccuuaagcacaauuaauuaagagugaaacguaauuguacaagcaguuggucacccaccauagggcaugaucaacaccgcaaccuuuccuuuuucccccagugauucugaaaaaccccucuucccuucagcuugcuuagauguuccaaauuuaguaagcuuaaggcggccuacagaagaaaaagaaaaaaaaggccacaaaaguucccucucacuuucaguaaauaaaauaaaagcagcaacagaaauaaagaaauaaaugaaauucaaaaugaaauaaauauuguguugugcagcauuaaaaaaucaauaaaaauuaaaaaugagcaagaucuaaaaaaaaaaaaaaaaaaaaaaaaaaaaaaaaaaaaaaaaaaaaaaaaaaaaaaaaaaaaaaaaugcaucccccccccccccccccccccccccccccccaaaggcucuuuucagagccaccagaauu

SEQ ID NO: 14455 - RNA, 2214 nt, Artificial Sequence
  mRNA product Design d-3 comprising derived and/or modified sequence from HRSV(Memphis-37)__AIY60640.1__F-del_DSCav1_mut1 (opt1)
gggagagggcgcuuggcuugcaaggacccugagcugcggcauugaagcacacccaacccaacucgacugaagucagccucacugaaccggaucugagaaucuucucucucugggcuugccagggcucuccgaaccuagcuagcauccucuucaauuccaacuagaaagcuuaccauggagcugcccauccucaagaccaacgccaucaccacgauccuggccgcggugacccugugcuucgccagcucccagaacaucaccgaggaguucuaccagagcacgugcuccgccgucagcaagggcuaccucggggcccugcgcaccggcugguacaccuccgugaucaccaucgagcugagcaacaucaaggagaacaagugcaacgggaccgacgccaaggugaagcucaucaagcaggagcuggacaaguacaagaacgcggucacggagcugcagcuccugaugcaguccaccccggccgccggcagcggguccgccaucugcagcggcaucgcggugugcaaggugcugcaccucgagggcgaggucaacaagaucaagaacgcccugcuguccaccaacaaggccguggugagccucuccaacggggucagcgugcugaccuucaaggugcuggaccucaagaacuacaucgacaagcagcugcugcccauccucaacaagcaguccugcagcauccccaacaucgagacggucaucgaguuccagcagaagaacaaccggcugcuggagaucacccgcgaguucuccgugaacgccggcgugaccacccccgucagcacguacaugcucaccaacuccgagcugcugagccucaucaacgacaugccgaucaccaacgaccagaagaagcugaugagcaacaacgugcagaucgugcggcagcaguccuacagcaucaugugcaucaucaaggaggagguccuggccuacguggugcagcucccccuguacggggucaucgacacccccugcuggaagcugcacacgagcccccucugcaccaccaacaccaaggagggcuccaacaucugccugacgcgcaccgaccgggggugguacugcgacaacgcgggcuccgugagcuucuucccgcaggccgagaccugcaaggugcaguccaaccgcgucuucugcgacaccaugaacagccugacgcuccccuccgaggugaaccugugcaacaucgacaucuucaaccccaaguacgacugcaagaucaugaccagcaagaccgacgucuccagcuccgugaucaccagccugggcgccaucguguccugcuacgggaagacgaagugcaccgccagcaacaagaaccggggcaucaucaagaccuucuccaacgggugcgacuacgucagcaacaagggcguggacaccguguccgucggcaacacgcucuacugcgugaacaagcaggaggggcagagccuguacgugaagggcgagcccaucaucaacuucuacgacccgcuggucuuccccagcgacgaguucgacgccuccaucagccaggugaacgagaagaucaaccagucccucgcguucauccgcaagagcgacgagcugcugcacaacgugaacgucgggaaguccaccaccaacaucaugaucaccaccaucaucaucgugaucaucgugauccuccugcugcucaucgccgucggccuguuccuguacugcaaggcccggugaggacuagugaagggaacacccaaauuuaauucagccuuaagcacaauuaauuaagagugaaacguaauuguacaagcaguuggucacccaccauagggcaugaucaacaccgcaaccuuuccuuuuucccccagugauucugaaaaaccccucuucccuucagcuugcuuagauguuccaaauuuaguaagcuuaaggcggccuacagaagaaaaagaaaaaaaaggccacaaaaguucccucucacuuucaguaaauaaaauaaaagcagcaacagaaauaaagaaauaaaugaaauucaaaaugaaauaaauauuguguugugcagcauuaaaaaaucaauaaaaauuaaaaaugagcaagaucuaaaaaaaaaaaaaaaaaaaaaaaaaaaaaaaaaaaaaaaaaaaaaaaaaaaaaaaaaaaaaaaaugcaucccccccccccccccccccccccccccccccaaaggcucuuuucagagccaccagaauu

SEQ ID NO: 14456 - RNA, 2214 nt, Artificial Sequence
  mRNA product Design d-3 comprising derived and/or modified sequence from HRSV(Memphis-37)__AIY60640.1__F-del_DSCav1_mut1 (opt2)
gggagagggcgcuuggcuugcaaggacccugagcugcggcauugaagcacacccaacccaacucgacugaagucagccucacugaaccggaucugagaaucuucucucucugggcuugccagggcucuccgaaccuagcuagcauccucuucaauuccaacuagaaagcuuaccauggagcuccccauccucaagaccaacgccaucaccaccauccucgccgccgucacccucugcuucgccuccucccagaacaucaccgaggaguucuaccaguccaccugcuccgccgucuccaagggcuaccucggcgcccuccgcaccggcugguacaccuccgucaucaccaucgagcucuccaacaucaaggagaacaagugcaacggcaccgacgccaaggucaagcucaucaagcaggagcucgacaaguacaagaacgccgucaccgagcuccagcuccucaugcaguccacccccgccgccggcuccggcuccgccaucugcuccggcaucgccgucugcaagguccuccaccucgagggcgaggucaacaagaucaagaacgcccuccucuccaccaacaaggccgucgucucccucuccaacggcgucuccguccucaccuucaagguccucgaccucaagaacuacaucgacaagcagcuccuccccauccucaacaagcaguccugcuccauccccaacaucgagaccgucaucgaguuccagcagaagaacaaccgccuccucgagaucacccgcgaguucuccgucaacgccggcgucaccacccccgucuccaccuacaugcucaccaacuccgagcuccucucccucaucaacgacaugcccaucaccaacgaccagaagaagcucauguccaacaacguccagaucguccgccagcaguccuacuccaucaugugcaucaucaaggaggagguccucgccuacgucguccagcucccccucuacggcgucaucgacacccccugcuggaagcuccacaccuccccccucugcaccaccaacaccaaggagggcuccaacaucugccucacccgcaccgaccgcggcugguacugcgacaacgccggcuccgucuccuucuucccccaggccgagaccugcaagguccaguccaaccgcgucuucugcgacaccaugaacucccucacccuccccuccgaggucaaccucugcaacaucgacaucuucaaccccaaguacgacugcaagaucaugaccuccaagaccgacgucuccuccuccgucaucaccucccucggcgccaucgucuccugcuacggcaagaccaagugcaccgccuccaacaagaaccgcggcaucaucaagaccuucuccaacggcugcgacuacgucuccaacaagggcgucgacaccgucuccgucggcaacacccucuacugcgucaacaagcaggagggccagucccucuacgucaagggcgagcccaucaucaacuucuacgacccccucgucuuccccuccgacgaguucgacgccuccaucucccaggucaacgagaagaucaaccagucccucgccuucauccgcaaguccgacgagcuccuccacaacgucaacgucggcaaguccaccaccaacaucaugaucaccaccaucaucaucgucaucaucgucauccuccuccuccucaucgccgucggccucuuccucuacugcaaggcccgcugaggacuagugaagggaacacccaaauuuaauucagccuuaagcacaauuaauuaagagugaaacguaauuguacaagcaguuggucacccaccauagggcaugaucaacaccgcaaccuuuccuuuuucccccagugauucugaaaaaccccucuucccuucagcuugcuuagauguuccaaauuuaguaagcuuaaggcggccuacagaagaaaaagaaaaaaaaggccacaaaaguucccucucacuuucaguaaauaaaauaaaagcagcaacagaaauaaagaaauaaaugaaauucaaaaugaaauaaauauuguguugugcagcauuaaaaaaucaauaaaaauuaaaaaugagcaagaucuaaaaaaaaaaaaaaaaaaaaaaaaaaaaaaaaaaaaaaaaaaaaaaaaaaaaaaaaaaaaaaaaugcaucccccccccccccccccccccccccccccccaaaggcucuuuucagagccaccagaauu

SEQ ID NO: 14457 - RNA, 2214 nt, Artificial Sequence
  mRNA product Design d-3 comprising derived and/or modified sequence from HRSV(Memphis-37)__AIY60640.1__F-del_DSCav1_mut1 (opt3)
gggagagggcgcuuggcuugcaaggacccugagcugcggcauugaagcacacccaacccaacucgacugaagucagccucacugaaccggaucugagaaucuucucucucugggcuugccagggcucuccgaaccuagcuagcauccucuucaauuccaacuagaaagcuuaccauggagcugcccauccucaagaccaacgccauuacaacuauacuugcugcagugacgcugugcuucgccagcucccagaauaucaccgaagaguuuuaccaaucuacauguucagcggucaguaaaggcuauuugggggcuuuaagaacuggaugguacaccagcguuauuacaaucgaacuguccaacauuaaggagaauaaaugcaacgguaccgacgccaaggugaaacuaaucaagcaggaacucgauaaguauaaaaaugcaguaacugagcugcagcuucugaugcagucuacuccugccgcuggcucggggucagcaauauguagcggaaucgccgugugcaaggucuugcaccucgagggcgaagugaacaaaauuaagaaugcucugcugaguaccaacaaagccguugugucccucucuaauggugucagcguguuaacguucaagguacuggaccuuaagaacuacaucgauaaacaauugcugccaauucuaaauaagcaguccuguucaaucccgaacauagagacuguuauugaauuucagcagaaaaauaacaggcuccuggagaucacccgggaguucagugugaaugcgggggucacaacucccgugagcaccuauaugcuuacaaacucugaacuguugucccucauuaacgacaugccuaucaccaaugaucaaaagaaacugaugucaaacaaugugcagaucguccgccagcagagcuacaguauuaugugcauaaucaaggaggaaguuuuagcauaugugguacaacugccacucuacggagugauugacacgcccuguuggaaacuucauacuucuccucugugcacaaccaacacuaaggagggcuccaauaucuguuugacacgaaccgaucguggcugguacugcgacaacgccgggagcgucucguuuuucccacaggcugaaacguguaaggugcagucuaauagaguguuuugcgauaccaugaacucccuaacacugcccucagagguuaaucucugcaacauagacauuuucaauccuaaauaugauuguaagaucaugacaaguaaaaccgacgucagcuccucugugaucacaagccugggagccauuguaucaugcuacgguaagacuaaauguaccgcaaguaacaagaauaggggcaucauuaagacauuuuccaacgggugcgauuauguuagcaauaaaggaguggacaccgucucugugggcaacacucuuuacugugucaacaagcaagagggucagucacuguaugugaaaggggaaccaauaaucaauuucuacgacccguugguuuuucccagugaugaguucgacgcuagcauuucccaggugaacgaaaagaucaaucagucucucgccuuuauccggaaaucggaugagcuguuacacaacguaaaugucggaaagagcacgacaaacauuaugauaaccacuaucauuaucgugauuaucguuauacugcuacuccugaucgcggugggccuuuucuuguauugcaaggcccgcugaggacuagugaagggaacacccaaauuuaauucagccuuaagcacaauuaauuaagagugaaacguaauuguacaagcaguuggucacccaccauagggcaugaucaacaccgcaaccuuuccuuuuucccccagugauucugaaaaaccccucuucccuucagcuugcuuagauguuccaaauuuaguaagcuuaaggcggccuacagaagaaaaagaaaaaaaaggccacaaaaguucccucucacuuucaguaaauaaaauaaaagcagcaacagaaauaaagaaauaaaugaaauucaaaaugaaauaaauauuguguugugcagcauuaaaaaaucaauaaaaauuaaaaaugagcaagaucuaaaaaaaaaaaaaaaaaaaaaaaaaaaaaaaaaaaaaaaaaaaaaaaaaaaaaaaaaaaaaaaaugcaucccccccccccccccccccccccccccccccaaaggcucuuuucagagccaccagaauu

SEQ ID NO: 14458 - RNA, 2214 nt, Artificial Sequence
  mRNA product Design d-3 comprising derived and/or modified sequence from HRSV(Memphis-37)__AIY60640.1__F-del_DSCav1_mut1 (opt4)
gggagagggcgcuuggcuugcaaggacccugagcugcggcauugaagcacacccaacccaacucgacugaagucagccucacugaaccggaucugagaaucuucucucucugggcuugccagggcucuccgaaccuagcuagcauccucuucaauuccaacuagaaagcuuaccauggagcugcccauccugaagaccaacgccaucaccaccauccuggccgccgugacccugugcuucgccagcagccagaacaucaccgaggaguucuaccagagcaccugcagcgccgugagcaagggcuaccugggcgcccugagaaccggcugguacaccagcgugaucaccaucgagcugagcaacaucaaggagaacaagugcaacggcaccgacgccaaggugaagcugaucaagcaggagcuggacaaguacaagaacgccgugaccgagcugcagcugcugaugcagagcacccccgccgccggcagcggcagcgccaucugcagcggcaucgccgugugcaaggugcugcaccuggagggcgaggugaacaagaucaagaacgcccugcugagcaccaacaaggccguggugagccugagcaacggcgugagcgugcugaccuucaaggugcuggaccugaagaacuacaucgacaagcagcugcugcccauccugaacaagcagagcugcagcauccccaacaucgagaccgugaucgaguuccagcagaagaacaacagacugcuggagaucaccagagaguucagcgugaacgccggcgugaccacccccgugagcaccuacaugcugaccaacagcgagcugcugagccugaucaacgacaugcccaucaccaacgaccagaagaagcugaugagcaacaacgugcagaucgugagacagcagagcuacagcaucaugugcaucaucaaggaggaggugcuggccuacguggugcagcugccccuguacggcgugaucgacacccccugcuggaagcugcacaccagcccccugugcaccaccaacaccaaggagggcagcaacaucugccugaccagaaccgacagaggcugguacugcgacaacgccggcagcgugagcuucuucccccaggccgagaccugcaaggugcagagcaacagaguguucugcgacaccaugaacagccugacccugcccagcgaggugaaccugugcaacaucgacaucuucaaccccaaguacgacugcaagaucaugaccagcaagaccgacgugagcagcagcgugaucaccagccugggcgccaucgugagcugcuacggcaagaccaagugcaccgccagcaacaagaacagaggcaucaucaagaccuucagcaacggcugcgacuacgugagcaacaagggcguggacaccgugagcgugggcaacacccuguacugcgugaacaagcaggagggccagagccuguacgugaagggcgagcccaucaucaacuucuacgacccccugguguuccccagcgacgaguucgacgccagcaucagccaggugaacgagaagaucaaccagagccuggccuucaucagaaagagcgacgagcugcugcacaacgugaacgugggcaagagcaccaccaacaucaugaucaccaccaucaucaucgugaucaucgugauccugcugcugcugaucgccgugggccuguuccuguacugcaaggccagaugaggacuagugaagggaacacccaaauuuaauucagccuuaagcacaauuaauuaagagugaaacguaauuguacaagcaguuggucacccaccauagggcaugaucaacaccgcaaccuuuccuuuuucccccagugauucugaaaaaccccucuucccuucagcuugcuuagauguuccaaauuuaguaagcuuaaggcggccuacagaagaaaaagaaaaaaaaggccacaaaaguucccucucacuuucaguaaauaaaauaaaagcagcaacagaaauaaagaaauaaaugaaauucaaaaugaaauaaauauuguguugugcagcauuaaaaaaucaauaaaaauuaaaaaugagcaagaucuaaaaaaaaaaaaaaaaaaaaaaaaaaaaaaaaaaaaaaaaaaaaaaaaaaaaaaaaaaaaaaaaugcaucccccccccccccccccccccccccccccccaaaggcucuuuucagagccaccagaauu

SEQ ID NO: 14459 - RNA, 2214 nt, Artificial Sequence
  mRNA product Design d-3 comprising derived and/or modified sequence from HRSV(Memphis-37)__AIY60640.1__F-del_DSCav1_mut1 (opt5)
gggagagggcgcuuggcuugcaaggacccugagcugcggcauugaagcacacccaacccaacucgacugaagucagccucacugaaccggaucugagaaucuucucucucugggcuugccagggcucuccgaaccuagcuagcauccucuucaauuccaacuagaaagcuuaccauggagcugcccauccucaagaccaacgccauuacaacgauccuggcugccgugacccuuugcuucgcgagcucccagaauauuacagaagaguuuuaccaaucuaccuguagcgcugucuccaaaggcuaucugggggcccucagaacaggaugguacaccucuguuaucacaauugaacugagcaacaucaaggagaauaaaugcaacggcaccgacgccaaggugaaacuuaucaagcaggaacuggauaaguauaaaaaugcugugacggagcuccagcugcugaugcaguccaccccugccgcugggucuggaagcgccauuuguuccggcaucgcggucugcaaggugcuccaccuggagggggaaguuaacaaaauuaagaaugcccuucugagcacaaacaaagcuguggucucucucuccaauggagugagcguucugaccuucaaggugcuugaccugaagaacuacaucgauaaacaacuccugccgauucugaauaagcagucuuguuccauccccaacauugagacagucaucgaauuucagcagaaaaauaaccggcuccuggagaucacccgcgaguucagcgugaaugccggcgugacgacaccugucucuaccuauaugcuuacaaacuccgaacugcucagccugauuaacgacaugcccaucaccaaugaucaaaagaaacuuauguccaacaauguucagauugugagacagcagucuuacagcaucaugugcauuaucaaggaggaagugcuggcuuaugucgugcaacucccucuguacggcguuaucgacacccccuguuggaaacugcauacauccccucucugcacgaccaacacaaaggaggggagcaauauuugucugacccggacagaucgcggaugguacugcgacaacgccggcucuguguccuuuuucccgcaggcggaaaccuguaagguccagagcaauagaguguuuugcgauacgaugaacucucuuacacugcccagcgagguuaaucucugcaacaucgacauuuucaauccuaaauaugauuguaagaucaugaccuccaaaaccgacgugucuagcuccgucauuacaagccugggggccaucgugucuugcuacggaaagaccaaauguacagcuuccaacaagaaucggggcaucauuaagacguuuagcaacgggugcgauuaugucucuaauaaaggaguggacaccguuuccgugggcaacacacuuuacugugucaacaagcaagagggccagagccuguaugugaaaggggaacccaucauuaauuucuacgacccucucguuuuucccuccgaugaguucgacgccucuaucagccaggugaacgaaaagauuaaucagucccuggcuuuuauccgcaaaucugaugagcugcuccacaacgucaaugugggaaagagcaccacaaacauuaugaucaccacgaucauuaucgugauuaucguuauucugcuucugcucaucgccgucggccuguuccuguauugcaaggccagaugaggacuagugaagggaacacccaaauuuaauucagccuuaagcacaauuaauuaagagugaaacguaauuguacaagcaguuggucacccaccauagggcaugaucaacaccgcaaccuuuccuuuuucccccagugauucugaaaaaccccucuucccuucagcuugcuuagauguuccaaauuuaguaagcuuaaggcggccuacagaagaaaaagaaaaaaaaggccacaaaaguucccucucacuuucaguaaauaaaauaaaagcagcaacagaaauaaagaaauaaaugaaauucaaaaugaaauaaauauuguguugugcagcauuaaaaaaucaauaaaaauuaaaaaugagcaagaucuaaaaaaaaaaaaaaaaaaaaaaaaaaaaaaaaaaaaaaaaaaaaaaaaaaaaaaaaaaaaaaaaugcaucccccccccccccccccccccccccccccccaaaggcucuuuucagagccaccagaauu

SEQ ID NO: 14460 - RNA, 2214 nt, Artificial Sequence
  mRNA product Design d-3 comprising derived and/or modified sequence from HRSV(Memphis-37)__AIY60640.1__F-del_DSCav1_mut1 (opt6)
gggagagggcgcuuggcuugcaaggacccugagcugcggcauugaagcacacccaacccaacucgacugaagucagccucacugaaccggaucugagaaucuucucucucugggcuugccagggcucuccgaaccuagcuagcauccucuucaauuccaacuagaaagcuuaccauggaauuaccaauacuaaaaacaaacgcaauaacaacaauucuagcagcaguaacauuaugcuuugcaucaucccaaaacaucacagaagaauuuuaucaaucaaccugcucagcaguuuccaaaggauacuuaggagcauuaagaacugguugguacacuucaguaaucaccaucgaacucucaaacaucaaggaaaacaaaugcaacggaacagacgcaaaaguuaaacucauaaaacaagaacuugacaaauacaaaaacgccguaacagaacuacaacuucucaugcaaucaacacccgcagcaggauccggaucagccauaugcucaggcauagcaguauguaaaguauuacaucuugaaggugaaguaaacaaaauaaaaaacgcacuucuaucaaccaacaaagcaguaguaucacuaucaaacggaguauccgucuuaacauuuaaaguucuagaccucaaaaacuauauagacaaacaauuacugccaauccucaauaaacaaucaugcucaauaccaaacaucgaaacaguaauagaauuucaacaaaaaaacaacagacuacuagaaauaacaagagaauuuuccgucaacgccggcguaacuacuccaguaucaacauauaugcuaaccaacucagaacuccuaucccucauaaacgacaugccaauaacuaaugaucaaaaaaaacuaaugucaaacaauguacaaauaguuagacaacaaucauacucaaucaugugcauaauaaaagaagaaguacuagcauacgucguccaacuaccccuauacggaguaauagacacaccuugcuggaaacuacacacaucaccccuaugcacaacaaauacaaaagaagguuccaacaucugccuaacaagaacugauagaggaugguacugcgacaacgccggaucaguaucauucuucccucaagcugaaaccugcaaaguacaaucaaacagaguauuuugcgauacaaugaacucccuaacacuucccucagaaguuaaucuuuguaauauagauauauucaacccaaaauacgacugcaaaauaaugacaaguaaaacagacguauccucaucuguaauuacaucacuaggagccauaguaucuugcuacggcaaaaccaaaugcacagcaucaaacaaaaacagagguauuaucaaaaccuucucaaacggaugugacuacguuucaaacaaaggaguagacacaguaucagucggaaacacccuauacuguguuaacaaacaagaaggacaaucacuguacguaaaaggagaacccauaauaaauuucuacgacccacuuguauuuccaucagacgaauuugaugcaucaaucucacaaguaaaugaaaaaauaaaccaaucauuagcauucauaagaaaaucugacgaguuacuacacaacguaaauguuggcaaaucaacaaccaauauaaugauaacaacaauaauaauaguaauaauagucauauuacuccuccucauagccgucggauuauucuuauacugcaaagcaagauaaggacuagugaagggaacacccaaauuuaauucagccuuaagcacaauuaauuaagagugaaacguaauuguacaagcaguuggucacccaccauagggcaugaucaacaccgcaaccuuuccuuuuucccccagugauucugaaaaaccccucuucccuucagcuugcuuagauguuccaaauuuaguaagcuuaaggcggccuacagaagaaaaagaaaaaaaaggccacaaaaguucccucucacuuucaguaaauaaaauaaaagcagcaacagaaauaaagaaauaaaugaaauucaaaaugaaauaaauauuguguugugcagcauuaaaaaaucaauaaaaauuaaaaaugagcaagaucuaaaaaaaaaaaaaaaaaaaaaaaaaaaaaaaaaaaaaaaaaaaaaaaaaaaaaaaaaaaaaaaaugcaucccccccccccccccccccccccccccccccaaaggcucuuuucagagccaccagaauu

SEQ ID NO: 14461 - RNA, 2214 nt, Artificial Sequence
  mRNA product Design d-3 comprising derived and/or modified sequence from HRSV(Memphis-37)__AIY60640.1__F-del_DSCav1_mut1 (opt11)
gggagagggcgcuuggcuugcaaggacccugagcugcggcauugaagcacacccaacccaacucgacugaagucagccucacugaaccggaucugagaaucuucucucucugggcuugccagggcucuccgaaccuagcuagcauccucuucaauuccaacuagaaagcuuaccauggaacuccccauacuaaaaaccaacgccaucacaacaauccucgccgccgucacacucugcuucgccagcucccaaaacaucaccgaagaguucuaucaaucaaccugcuccgcagucucaaagggauaccucggagcccuccgcaccggaugguacacuuccgucaucacaauagaacucuccaacaucaaagaaaacaaaugcaacggcaccgacgcaaaagucaagcucaucaaacaagaacucgacaaauauaaaaacgccgucaccgaacuccaacuacucaugcaauccacacccgcggccggcucaggcagcgccaucugcucaggcaucgccgucugcaaaguccuccaccucgaaggcgaagucaacaaaaucaaaaacgcccuucuuucaaccaacaaggcaguaguaucccucucaaacggcgucagcguccugaccuucaaaguccuagaccucaaaaacuacauagauaaacaacuccuccccauacugaacaaacaaucgugcuccauccccaauaucgaaaccgucauagaguuccagcagaaaaacaacagacuucucgaaauaacccgagaguucucaguaaacgccggagucaccacacccguaagcaccuacaugcucacaaacucagaacuccuaucccucaucaacgacaugcccaucaccaacgaccagaaaaagcuaauguccaacaacguccaaauaguacgccaacaaagcuacucgauaaugugcaucaucaaggaagaaguacucgccuacgucguccaacucccccucuacggcguaaucgacacacccugcuggaaacuccacacguccccacucugcacaacaaacacaaaagaaggauccaacauaugccuaacccgcaccgacaggggcugguacugcgacaacgcaggcucagucagcuucuuuccccaagccgaaacaugcaaaguccaauccaaccgugucuucugcgacaccaugaacucgcucacccuacccucggaagucaaucucugcaacaucgacaucuucaacccaaaauacgacuguaaaaucaugaccagcaaaacagacguuucuuccagcgucaucacaucacucggcgcgaucguaucaugcuauggcaaaacaaagugcaccgcuagcaauaaaaaccgaggaaucauaaaaaccuucagcaacggcugcgacuacguauccaacaaaggcgucgacaccguauccgucggaaacacccucuacugcgucaacaagcaagaaggacaaucacucuacgucaaaggcgaaccaaucauaaacuucuacgacccacucguauuccccucagacgaguucgacgcauccaucucccaagucaacgaaaagaucaaccaaucucucgccuuuauacgcaaaagcgacgaacuccuucacaacguaaacgucggcaaaagcaccacuaacauaaugaucaccacaaucauaauaguaaucaucguaauacuccuccuacucaucgccgugggccuauuccucuauugcaaagcccgauaaggacuagugaagggaacacccaaauuuaauucagccuuaagcacaauuaauuaagagugaaacguaauuguacaagcaguuggucacccaccauagggcaugaucaacaccgcaaccuuuccuuuuucccccagugauucugaaaaaccccucuucccuucagcuugcuuagauguuccaaauuuaguaagcuuaaggcggccuacagaagaaaaagaaaaaaaaggccacaaaaguucccucucacuuucaguaaauaaaauaaaagcagcaacagaaauaaagaaauaaaugaaauucaaaaugaaauaaauauuguguugugcagcauuaaaaaaucaauaaaaauuaaaaaugagcaagaucuaaaaaaaaaaaaaaaaaaaaaaaaaaaaaaaaaaaaaaaaaaaaaaaaaaaaaaaaaaaaaaaaugcaucccccccccccccccccccccccccccccccaaaggcucuuuucagagccaccagaauu

SEQ ID NO: 14462 - RNA, 1897 nt, Artificial Sequence
  mRNA product Design d-4 comprising derived and/or modified sequence from HRSV(Memphis-37)__AIY60640.1__F-del_DSCav1_mut1 (opt1)
gggagagucccgcagucggcguccagcggcucugcuuguucgugugugugucguugcaggccuuauucaagcuuaccauggagcugcccauccucaagaccaacgccaucaccacgauccuggccgcggugacccugugcuucgccagcucccagaacaucaccgaggaguucuaccagagcacgugcuccgccgucagcaagggcuaccucggcgcccugcgcaccgggugguacaccagcgugaucaccaucgagcuguccaacaucaaggagaacaagugcaacggcaccgacgccaaggugaagcucaucaagcaggagcuggacaaguacaagaacgcggucacggagcugcagcuccugaugcagagcaccccggccgccggcuccgggagcgcgaucugcuccggcaucgccgucugcaaggugcugcaccucgagggcgaggugaacaagaucaagaacgcccugcuguccaccaacaaggccgucgugagccucuccaacggggugagcguccugaccuucaaggugcuggaccucaagaacuacaucgacaagcagcugcugcccauccugaacaagcagagcugcuccauccccaacaucgagaccgucaucgaguuccagcagaagaacaaccgccuccuggagaucacgcgggaguucagcgugaacgcgggcgugaccacccccgucuccaccuacaugcugacgaacagcgagcuccugucccugaucaacgacaugccgaucaccaacgaccagaagaagcucaugagcaacaacgugcagaucgugcgccagcaguccuacagcaucaugugcaucaucaaggaggagguccuggccuacguggugcagcugccccucuacggggucaucgacacccccugcuggaagcugcacaccagcccccugugcacgaccaacaccaaggagggcuccaacaucugccucacccggacggaccgcgggugguacugcgacaacgccggcagcguguccuucuucccgcaggccgagaccugcaagguccagagcaaccggguguucugcgacaccaugaacucccugacccugcccagcgaggugaaccucugcaacaucgacaucuucaaccccaaguacgacugcaagaucaugacguccaagaccgacgucagcuccagcgugaucaccucccugggcgccaucgugagcugcuacgggaagaccaagugcacggcgagcaacaagaaccgcggcaucaucaagaccuucuccaacgggugcgacuacgucagcaacaagggcguggacaccguguccgucggcaacacccuguacugcgugaacaagcaggagggccagagccucuacgugaagggggagcccaucaucaacuucuacgacccgcuggucuuccccuccgacgaguucgacgccagcaucucccaggugaacgagaagaucaaccagagccuggccuucauccggaaguccgacgagcuccugcacaacgugaacgucggcaagagcaccacgaacaucaugaucaccaccaucaucaucgugaucaucgugauccugcugcuccugaucgccgucgggcuguuccucuacugcaaggcccgcugaggacuaguggaagcauuuuccuggcugauuaaaagaaauuacucagcuauggucaucuguuccuguuagaaggcuaugcagcauauuauauacuaugcgcauguuaugaaaugcauaauaaaaaauuuuaaaaaaucuaaaagaucuaaaaaaaaaaaaaaaaaaaaaaaaaaaaaaaaaaaaaaaaaaaaaaaaaaaaaaaaaaaaaaaaugcaucccccccccccccccccccccccccccccccaaaggcucuuuucagagccaccagaauu

SEQ ID NO: 14463 - RNA, 1897 nt, Artificial Sequence
  mRNA product Design d-4 comprising derived and/or modified sequence from HRSV(Memphis-37)__AIY60640.1__F-del_DSCav1_mut1 (opt1)
gggagagucccgcagucggcguccagcggcucugcuuguucgugugugugucguugcaggccuuauucaagcuuaccauggagcugcccauccucaagaccaacgccaucaccacgauccuggccgcggugacccugugcuucgccagcucccagaacaucaccgaggaguucuaccagagcacgugcuccgccgucagcaagggcuaccucggggcccugcgcaccggcugguacaccuccgugaucaccaucgagcugagcaacaucaaggagaacaagugcaacgggaccgacgccaaggugaagcucaucaagcaggagcuggacaaguacaagaacgcggucacggagcugcagcuccugaugcaguccaccccggccgccggcagcggguccgccaucugcagcggcaucgcggugugcaaggugcugcaccucgagggcgaggucaacaagaucaagaacgcccugcuguccaccaacaaggccguggugagccucuccaacggggucagcgugcugaccuucaaggugcuggaccucaagaacuacaucgacaagcagcugcugcccauccucaacaagcaguccugcagcauccccaacaucgagacggucaucgaguuccagcagaagaacaaccggcugcuggagaucacccgcgaguucuccgugaacgccggcgugaccacccccgucagcacguacaugcucaccaacuccgagcugcugagccucaucaacgacaugccgaucaccaacgaccagaagaagcugaugagcaacaacgugcagaucgugcggcagcaguccuacagcaucaugugcaucaucaaggaggagguccuggccuacguggugcagcucccccuguacggggucaucgacacccccugcuggaagcugcacacgagcccccucugcaccaccaacaccaaggagggcuccaacaucugccugacgcgcaccgaccgggggugguacugcgacaacgcgggcuccgugagcuucuucccgcaggccgagaccugcaaggugcaguccaaccgcgucuucugcgacaccaugaacagccugacgcuccccuccgaggugaaccugugcaacaucgacaucuucaaccccaaguacgacugcaagaucaugaccagcaagaccgacgucuccagcuccgugaucaccagccugggcgccaucguguccugcuacgggaagacgaagugcaccgccagcaacaagaaccggggcaucaucaagaccuucuccaacgggugcgacuacgucagcaacaagggcguggacaccguguccgucggcaacacgcucuacugcgugaacaagcaggaggggcagagccuguacgugaagggcgagcccaucaucaacuucuacgacccgcuggucuuccccagcgacgaguucgacgccuccaucagccaggugaacgagaagaucaaccagucccucgcguucauccgcaagagcgacgagcugcugcacaacgugaacgucgggaaguccaccaccaacaucaugaucaccaccaucaucaucgugaucaucgugauccuccugcugcucaucgccgucggccuguuccuguacugcaaggcccggugaggacuaguggaagcauuuuccuggcugauuaaaagaaauuacucagcuauggucaucuguuccuguuagaaggcuaugcagcauauuauauacuaugcgcauguuaugaaaugcauaauaaaaaauuuuaaaaaaucuaaaagaucuaaaaaaaaaaaaaaaaaaaaaaaaaaaaaaaaaaaaaaaaaaaaaaaaaaaaaaaaaaaaaaaaugcaucccccccccccccccccccccccccccccccaaaggcucuuuucagagccaccagaauu

SEQ ID NO: 14464 - RNA, 1897 nt, Artificial Sequence
  mRNA product Design d-4 comprising derived and/or modified sequence from HRSV(Memphis-37)__AIY60640.1__F-del_DSCav1_mut1 (opt2)
gggagagucccgcagucggcguccagcggcucugcuuguucgugugugugucguugcaggccuuauucaagcuuaccauggagcuccccauccucaagaccaacgccaucaccaccauccucgccgccgucacccucugcuucgccuccucccagaacaucaccgaggaguucuaccaguccaccugcuccgccgucuccaagggcuaccucggcgcccuccgcaccggcugguacaccuccgucaucaccaucgagcucuccaacaucaaggagaacaagugcaacggcaccgacgccaaggucaagcucaucaagcaggagcucgacaaguacaagaacgccgucaccgagcuccagcuccucaugcaguccacccccgccgccggcuccggcuccgccaucugcuccggcaucgccgucugcaagguccuccaccucgagggcgaggucaacaagaucaagaacgcccuccucuccaccaacaaggccgucgucucccucuccaacggcgucuccguccucaccuucaagguccucgaccucaagaacuacaucgacaagcagcuccuccccauccucaacaagcaguccugcuccauccccaacaucgagaccgucaucgaguuccagcagaagaacaaccgccuccucgagaucacccgcgaguucuccgucaacgccggcgucaccacccccgucuccaccuacaugcucaccaacuccgagcuccucucccucaucaacgacaugcccaucaccaacgaccagaagaagcucauguccaacaacguccagaucguccgccagcaguccuacuccaucaugugcaucaucaaggaggagguccucgccuacgucguccagcucccccucuacggcgucaucgacacccccugcuggaagcuccacaccuccccccucugcaccaccaacaccaaggagggcuccaacaucugccucacccgcaccgaccgcggcugguacugcgacaacgccggcuccgucuccuucuucccccaggccgagaccugcaagguccaguccaaccgcgucuucugcgacaccaugaacucccucacccuccccuccgaggucaaccucugcaacaucgacaucuucaaccccaaguacgacugcaagaucaugaccuccaagaccgacgucuccuccuccgucaucaccucccucggcgccaucgucuccugcuacggcaagaccaagugcaccgccuccaacaagaaccgcggcaucaucaagaccuucuccaacggcugcgacuacgucuccaacaagggcgucgacaccgucuccgucggcaacacccucuacugcgucaacaagcaggagggccagucccucuacgucaagggcgagcccaucaucaacuucuacgacccccucgucuuccccuccgacgaguucgacgccuccaucucccaggucaacgagaagaucaaccagucccucgccuucauccgcaaguccgacgagcuccuccacaacgucaacgucggcaaguccaccaccaacaucaugaucaccaccaucaucaucgucaucaucgucauccuccuccuccucaucgccgucggccucuuccucuacugcaaggcccgcugaggacuaguggaagcauuuuccuggcugauuaaaagaaauuacucagcuauggucaucuguuccuguuagaaggcuaugcagcauauuauauacuaugcgcauguuaugaaaugcauaauaaaaaauuuuaaaaaaucuaaaagaucuaaaaaaaaaaaaaaaaaaaaaaaaaaaaaaaaaaaaaaaaaaaaaaaaaaaaaaaaaaaaaaaaugcaucccccccccccccccccccccccccccccccaaaggcucuuuucagagccaccagaauu

SEQ ID NO: 14465 - RNA, 1897 nt, Artificial Sequence
  mRNA product Design d-4 comprising derived and/or modified sequence from HRSV(Memphis-37)__AIY60640.1__F-del_DSCav1_mut1 (opt3)
gggagagucccgcagucggcguccagcggcucugcuuguucgugugugugucguugcaggccuuauucaagcuuaccauggagcugcccauccucaagaccaacgccauuacaacuauacuugcugcagugacgcugugcuucgccagcucccagaauaucaccgaagaguuuuaccaaucuacauguucagcggucaguaaaggcuauuugggggcuuuaagaacuggaugguacaccagcguuauuacaaucgaacuguccaacauuaaggagaauaaaugcaacgguaccgacgccaaggugaaacuaaucaagcaggaacucgauaaguauaaaaaugcaguaacugagcugcagcuucugaugcagucuacuccugccgcuggcucggggucagcaauauguagcggaaucgccgugugcaaggucuugcaccucgagggcgaagugaacaaaauuaagaaugcucugcugaguaccaacaaagccguugugucccucucuaauggugucagcguguuaacguucaagguacuggaccuuaagaacuacaucgauaaacaauugcugccaauucuaaauaagcaguccuguucaaucccgaacauagagacuguuauugaauuucagcagaaaaauaacaggcuccuggagaucacccgggaguucagugugaaugcgggggucacaacucccgugagcaccuauaugcuuacaaacucugaacuguugucccucauuaacgacaugccuaucaccaaugaucaaaagaaacugaugucaaacaaugugcagaucguccgccagcagagcuacaguauuaugugcauaaucaaggaggaaguuuuagcauaugugguacaacugccacucuacggagugauugacacgcccuguuggaaacuucauacuucuccucugugcacaaccaacacuaaggagggcuccaauaucuguuugacacgaaccgaucguggcugguacugcgacaacgccgggagcgucucguuuuucccacaggcugaaacguguaaggugcagucuaauagaguguuuugcgauaccaugaacucccuaacacugcccucagagguuaaucucugcaacauagacauuuucaauccuaaauaugauuguaagaucaugacaaguaaaaccgacgucagcuccucugugaucacaagccugggagccauuguaucaugcuacgguaagacuaaauguaccgcaaguaacaagaauaggggcaucauuaagacauuuuccaacgggugcgauuauguuagcaauaaaggaguggacaccgucucugugggcaacacucuuuacugugucaacaagcaagagggucagucacuguaugugaaaggggaaccaauaaucaauuucuacgacccguugguuuuucccagugaugaguucgacgcuagcauuucccaggugaacgaaaagaucaaucagucucucgccuuuauccggaaaucggaugagcuguuacacaacguaaaugucggaaagagcacgacaaacauuaugauaaccacuaucauuaucgugauuaucguuauacugcuacuccugaucgcggugggccuuuucuuguauugcaaggcccgcugaggacuaguggaagcauuuuccuggcugauuaaaagaaauuacucagcuauggucaucuguuccuguuagaaggcuaugcagcauauuauauacuaugcgcauguuaugaaaugcauaauaaaaaauuuuaaaaaaucuaaaagaucuaaaaaaaaaaaaaaaaaaaaaaaaaaaaaaaaaaaaaaaaaaaaaaaaaaaaaaaaaaaaaaaaugcaucccccccccccccccccccccccccccccccaaaggcucuuuucagagccaccagaauu

SEQ ID NO: 14466 - RNA, 1897 nt, Artificial Sequence
  mRNA product Design d-4 comprising derived and/or modified sequence from HRSV(Memphis-37)__AIY60640.1__F-del_DSCav1_mut1 (opt4)
gggagagucccgcagucggcguccagcggcucugcuuguucgugugugugucguugcaggccuuauucaagcuuaccauggagcugcccauccugaagaccaacgccaucaccaccauccuggccgccgugacccugugcuucgccagcagccagaacaucaccgaggaguucuaccagagcaccugcagcgccgugagcaagggcuaccugggcgcccugagaaccggcugguacaccagcgugaucaccaucgagcugagcaacaucaaggagaacaagugcaacggcaccgacgccaaggugaagcugaucaagcaggagcuggacaaguacaagaacgccgugaccgagcugcagcugcugaugcagagcacccccgccgccggcagcggcagcgccaucugcagcggcaucgccgugugcaaggugcugcaccuggagggcgaggugaacaagaucaagaacgcccugcugagcaccaacaaggccguggugagccugagcaacggcgugagcgugcugaccuucaaggugcuggaccugaagaacuacaucgacaagcagcugcugcccauccugaacaagcagagcugcagcauccccaacaucgagaccgugaucgaguuccagcagaagaacaacagacugcuggagaucaccagagaguucagcgugaacgccggcgugaccacccccgugagcaccuacaugcugaccaacagcgagcugcugagccugaucaacgacaugcccaucaccaacgaccagaagaagcugaugagcaacaacgugcagaucgugagacagcagagcuacagcaucaugugcaucaucaaggaggaggugcuggccuacguggugcagcugccccuguacggcgugaucgacacccccugcuggaagcugcacaccagcccccugugcaccaccaacaccaaggagggcagcaacaucugccugaccagaaccgacagaggcugguacugcgacaacgccggcagcgugagcuucuucccccaggccgagaccugcaaggugcagagcaacagaguguucugcgacaccaugaacagccugacccugcccagcgaggugaaccugugcaacaucgacaucuucaaccccaaguacgacugcaagaucaugaccagcaagaccgacgugagcagcagcgugaucaccagccugggcgccaucgugagcugcuacggcaagaccaagugcaccgccagcaacaagaacagaggcaucaucaagaccuucagcaacggcugcgacuacgugagcaacaagggcguggacaccgugagcgugggcaacacccuguacugcgugaacaagcaggagggccagagccuguacgugaagggcgagcccaucaucaacuucuacgacccccugguguuccccagcgacgaguucgacgccagcaucagccaggugaacgagaagaucaaccagagccuggccuucaucagaaagagcgacgagcugcugcacaacgugaacgugggcaagagcaccaccaacaucaugaucaccaccaucaucaucgugaucaucgugauccugcugcugcugaucgccgugggccuguuccuguacugcaaggccagaugaggacuaguggaagcauuuuccuggcugauuaaaagaaauuacucagcuauggucaucuguuccuguuagaaggcuaugcagcauauuauauacuaugcgcauguuaugaaaugcauaauaaaaaauuuuaaaaaaucuaaaagaucuaaaaaaaaaaaaaaaaaaaaaaaaaaaaaaaaaaaaaaaaaaaaaaaaaaaaaaaaaaaaaaaaugcaucccccccccccccccccccccccccccccccaaaggcucuuuucagagccaccagaauu

SEQ ID NO: 14467 - RNA, 1897 nt, Artificial Sequence
  mRNA product Design d-4 comprising derived and/or modified sequence from HRSV(Memphis-37)__AIY60640.1__F-del_DSCav1_mut1 (opt5)
gggagagucccgcagucggcguccagcggcucugcuuguucgugugugugucguugcaggccuuauucaagcuuaccauggagcugcccauccucaagaccaacgccauuacaacgauccuggcugccgugacccuuugcuucgcgagcucccagaauauuacagaagaguuuuaccaaucuaccuguagcgcugucuccaaaggcuaucugggggcccucagaacaggaugguacaccucuguuaucacaauugaacugagcaacaucaaggagaauaaaugcaacggcaccgacgccaaggugaaacuuaucaagcaggaacuggauaaguauaaaaaugcugugacggagcuccagcugcugaugcaguccaccccugccgcugggucuggaagcgccauuuguuccggcaucgcggucugcaaggugcuccaccuggagggggaaguuaacaaaauuaagaaugcccuucugagcacaaacaaagcuguggucucucucuccaauggagugagcguucugaccuucaaggugcuugaccugaagaacuacaucgauaaacaacuccugccgauucugaauaagcagucuuguuccauccccaacauugagacagucaucgaauuucagcagaaaaauaaccggcuccuggagaucacccgcgaguucagcgugaaugccggcgugacgacaccugucucuaccuauaugcuuacaaacuccgaacugcucagccugauuaacgacaugcccaucaccaaugaucaaaagaaacuuauguccaacaauguucagauugugagacagcagucuuacagcaucaugugcauuaucaaggaggaagugcuggcuuaugucgugcaacucccucuguacggcguuaucgacacccccuguuggaaacugcauacauccccucucugcacgaccaacacaaaggaggggagcaauauuugucugacccggacagaucgcggaugguacugcgacaacgccggcucuguguccuuuuucccgcaggcggaaaccuguaagguccagagcaauagaguguuuugcgauacgaugaacucucuuacacugcccagcgagguuaaucucugcaacaucgacauuuucaauccuaaauaugauuguaagaucaugaccuccaaaaccgacgugucuagcuccgucauuacaagccugggggccaucgugucuugcuacggaaagaccaaauguacagcuuccaacaagaaucggggcaucauuaagacguuuagcaacgggugcgauuaugucucuaauaaaggaguggacaccguuuccgugggcaacacacuuuacugugucaacaagcaagagggccagagccuguaugugaaaggggaacccaucauuaauuucuacgacccucucguuuuucccuccgaugaguucgacgccucuaucagccaggugaacgaaaagauuaaucagucccuggcuuuuauccgcaaaucugaugagcugcuccacaacgucaaugugggaaagagcaccacaaacauuaugaucaccacgaucauuaucgugauuaucguuauucugcuucugcucaucgccgucggccuguuccuguauugcaaggccagaugaggacuaguggaagcauuuuccuggcugauuaaaagaaauuacucagcuauggucaucuguuccuguuagaaggcuaugcagcauauuauauacuaugcgcauguuaugaaaugcauaauaaaaaauuuuaaaaaaucuaaaagaucuaaaaaaaaaaaaaaaaaaaaaaaaaaaaaaaaaaaaaaaaaaaaaaaaaaaaaaaaaaaaaaaaugcaucccccccccccccccccccccccccccccccaaaggcucuuuucagagccaccagaauu

SEQ ID NO: 14468 - RNA, 1897 nt, Artificial Sequence
  mRNA product Design d-4 comprising derived and/or modified sequence from HRSV(Memphis-37)__AIY60640.1__F-del_DSCav1_mut1 (opt6)
gggagagucccgcagucggcguccagcggcucugcuuguucgugugugugucguugcaggccuuauucaagcuuaccauggaauuaccaauacuaaaaacaaacgcaauaacaacaauucuagcagcaguaacauuaugcuuugcaucaucccaaaacaucacagaagaauuuuaucaaucaaccugcucagcaguuuccaaaggauacuuaggagcauuaagaacugguugguacacuucaguaaucaccaucgaacucucaaacaucaaggaaaacaaaugcaacggaacagacgcaaaaguuaaacucauaaaacaagaacuugacaaauacaaaaacgccguaacagaacuacaacuucucaugcaaucaacacccgcagcaggauccggaucagccauaugcucaggcauagcaguauguaaaguauuacaucuugaaggugaaguaaacaaaauaaaaaacgcacuucuaucaaccaacaaagcaguaguaucacuaucaaacggaguauccgucuuaacauuuaaaguucuagaccucaaaaacuauauagacaaacaauuacugccaauccucaauaaacaaucaugcucaauaccaaacaucgaaacaguaauagaauuucaacaaaaaaacaacagacuacuagaaauaacaagagaauuuuccgucaacgccggcguaacuacuccaguaucaacauauaugcuaaccaacucagaacuccuaucccucauaaacgacaugccaauaacuaaugaucaaaaaaaacuaaugucaaacaauguacaaauaguuagacaacaaucauacucaaucaugugcauaauaaaagaagaaguacuagcauacgucguccaacuaccccuauacggaguaauagacacaccuugcuggaaacuacacacaucaccccuaugcacaacaaauacaaaagaagguuccaacaucugccuaacaagaacugauagaggaugguacugcgacaacgccggaucaguaucauucuucccucaagcugaaaccugcaaaguacaaucaaacagaguauuuugcgauacaaugaacucccuaacacuucccucagaaguuaaucuuuguaauauagauauauucaacccaaaauacgacugcaaaauaaugacaaguaaaacagacguauccucaucuguaauuacaucacuaggagccauaguaucuugcuacggcaaaaccaaaugcacagcaucaaacaaaaacagagguauuaucaaaaccuucucaaacggaugugacuacguuucaaacaaaggaguagacacaguaucagucggaaacacccuauacuguguuaacaaacaagaaggacaaucacuguacguaaaaggagaacccauaauaaauuucuacgacccacuuguauuuccaucagacgaauuugaugcaucaaucucacaaguaaaugaaaaaauaaaccaaucauuagcauucauaagaaaaucugacgaguuacuacacaacguaaauguuggcaaaucaacaaccaauauaaugauaacaacaauaauaauaguaauaauagucauauuacuccuccucauagccgucggauuauucuuauacugcaaagcaagauaaggacuaguggaagcauuuuccuggcugauuaaaagaaauuacucagcuauggucaucuguuccuguuagaaggcuaugcagcauauuauauacuaugcgcauguuaugaaaugcauaauaaaaaauuuuaaaaaaucuaaaagaucuaaaaaaaaaaaaaaaaaaaaaaaaaaaaaaaaaaaaaaaaaaaaaaaaaaaaaaaaaaaaaaaaugcaucccccccccccccccccccccccccccccccaaaggcucuuuucagagccaccagaauu

SEQ ID NO: 14469 - RNA, 1897 nt, Artificial Sequence
  mRNA product Design d-4 comprising derived and/or modified sequence from HRSV(Memphis-37)__AIY60640.1__F-del_DSCav1_mut1 (opt11)
gggagagucccgcagucggcguccagcggcucugcuuguucgugugugugucguugcaggccuuauucaagcuuaccauggaacuccccauacuaaaaaccaacgccaucacaacaauccucgccgccgucacacucugcuucgccagcucccaaaacaucaccgaagaguucuaucaaucaaccugcuccgcagucucaaagggauaccucggagcccuccgcaccggaugguacacuuccgucaucacaauagaacucuccaacaucaaagaaaacaaaugcaacggcaccgacgcaaaagucaagcucaucaaacaagaacucgacaaauauaaaaacgccgucaccgaacuccaacuacucaugcaauccacacccgcggccggcucaggcagcgccaucugcucaggcaucgccgucugcaaaguccuccaccucgaaggcgaagucaacaaaaucaaaaacgcccuucuuucaaccaacaaggcaguaguaucccucucaaacggcgucagcguccugaccuucaaaguccuagaccucaaaaacuacauagauaaacaacuccuccccauacugaacaaacaaucgugcuccauccccaauaucgaaaccgucauagaguuccagcagaaaaacaacagacuucucgaaauaacccgagaguucucaguaaacgccggagucaccacacccguaagcaccuacaugcucacaaacucagaacuccuaucccucaucaacgacaugcccaucaccaacgaccagaaaaagcuaauguccaacaacguccaaauaguacgccaacaaagcuacucgauaaugugcaucaucaaggaagaaguacucgccuacgucguccaacucccccucuacggcguaaucgacacacccugcuggaaacuccacacguccccacucugcacaacaaacacaaaagaaggauccaacauaugccuaacccgcaccgacaggggcugguacugcgacaacgcaggcucagucagcuucuuuccccaagccgaaacaugcaaaguccaauccaaccgugucuucugcgacaccaugaacucgcucacccuacccucggaagucaaucucugcaacaucgacaucuucaacccaaaauacgacuguaaaaucaugaccagcaaaacagacguuucuuccagcgucaucacaucacucggcgcgaucguaucaugcuauggcaaaacaaagugcaccgcuagcaauaaaaaccgaggaaucauaaaaaccuucagcaacggcugcgacuacguauccaacaaaggcgucgacaccguauccgucggaaacacccucuacugcgucaacaagcaagaaggacaaucacucuacgucaaaggcgaaccaaucauaaacuucuacgacccacucguauuccccucagacgaguucgacgcauccaucucccaagucaacgaaaagaucaaccaaucucucgccuuuauacgcaaaagcgacgaacuccuucacaacguaaacgucggcaaaagcaccacuaacauaaugaucaccacaaucauaauaguaaucaucguaauacuccuccuacucaucgccgugggccuauuccucuauugcaaagcccgauaaggacuaguggaagcauuuuccuggcugauuaaaagaaauuacucagcuauggucaucuguuccuguuagaaggcuaugcagcauauuauauacuaugcgcauguuaugaaaugcauaauaaaaaauuuuaaaaaaucuaaaagaucuaaaaaaaaaaaaaaaaaaaaaaaaaaaaaaaaaaaaaaaaaaaaaaaaaaaaaaaaaaaaaaaaugcaucccccccccccccccccccccccccccccccaaaggcucuuuucagagccaccagaauu

SEQ ID NO: 14470 - RNA, 1994 nt, Artificial Sequence
  mRNA product Design d-5 comprising derived and/or modified sequence from HRSV(Memphis-37)__AIY60640.1__F-del_DSCav1_mut1 (opt1)
gggagagggcgcuuggcuugcaaggacccugagcugcggcauugaagcacacccaacccaacucgacugaagucagccucacugaaccggaucugagaaucuucucucucugggcuugccagggcucuccgaaccuagcuagcauccucuucaauuccaacuagaaagcuuaccauggagcugcccauccucaagaccaacgccaucaccacgauccuggccgcggugacccugugcuucgccagcucccagaacaucaccgaggaguucuaccagagcacgugcuccgccgucagcaagggcuaccucggcgcccugcgcaccgggugguacaccagcgugaucaccaucgagcuguccaacaucaaggagaacaagugcaacggcaccgacgccaaggugaagcucaucaagcaggagcuggacaaguacaagaacgcggucacggagcugcagcuccugaugcagagcaccccggccgccggcuccgggagcgcgaucugcuccggcaucgccgucugcaaggugcugcaccucgagggcgaggugaacaagaucaagaacgcccugcuguccaccaacaaggccgucgugagccucuccaacggggugagcguccugaccuucaaggugcuggaccucaagaacuacaucgacaagcagcugcugcccauccugaacaagcagagcugcuccauccccaacaucgagaccgucaucgaguuccagcagaagaacaaccgccuccuggagaucacgcgggaguucagcgugaacgcgggcgugaccacccccgucuccaccuacaugcugacgaacagcgagcuccugucccugaucaacgacaugccgaucaccaacgaccagaagaagcucaugagcaacaacgugcagaucgugcgccagcaguccuacagcaucaugugcaucaucaaggaggagguccuggccuacguggugcagcugccccucuacggggucaucgacacccccugcuggaagcugcacaccagcccccugugcacgaccaacaccaaggagggcuccaacaucugccucacccggacggaccgcgggugguacugcgacaacgccggcagcguguccuucuucccgcaggccgagaccugcaagguccagagcaaccggguguucugcgacaccaugaacucccugacccugcccagcgaggugaaccucugcaacaucgacaucuucaaccccaaguacgacugcaagaucaugacguccaagaccgacgucagcuccagcgugaucaccucccugggcgccaucgugagcugcuacgggaagaccaagugcacggcgagcaacaagaaccgcggcaucaucaagaccuucuccaacgggugcgacuacgucagcaacaagggcguggacaccguguccgucggcaacacccuguacugcgugaacaagcaggagggccagagccucuacgugaagggggagcccaucaucaacuucuacgacccgcuggucuuccccuccgacgaguucgacgccagcaucucccaggugaacgagaagaucaaccagagccuggccuucauccggaaguccgacgagcuccugcacaacgugaacgucggcaagagcaccacgaacaucaugaucaccaccaucaucaucgugaucaucgugauccugcugcuccugaucgccgucgggcuguuccucuacugcaaggcccgcugaggacuaguggaagcauuuuccuggcugauuaaaagaaauuacucagcuauggucaucuguuccuguuagaaggcuaugcagcauauuauauacuaugcgcauguuaugaaaugcauaauaaaaaauuuuaaaaaaucuaaaagaucuaaaaaaaaaaaaaaaaaaaaaaaaaaaaaaaaaaaaaaaaaaaaaaaaaaaaaaaaaaaaaaaaugcaucccccccccccccccccccccccccccccccaaaggcucuuuucagagccaccagaauu

SEQ ID NO: 14471 - RNA, 1994 nt, Artificial Sequence
  mRNA product Design d-5 comprising derived and/or modified sequence from HRSV(Memphis-37)__AIY60640.1__F-del_DSCav1_mut1 (opt1)
gggagagggcgcuuggcuugcaaggacccugagcugcggcauugaagcacacccaacccaacucgacugaagucagccucacugaaccggaucugagaaucuucucucucugggcuugccagggcucuccgaaccuagcuagcauccucuucaauuccaacuagaaagcuuaccauggagcugcccauccucaagaccaacgccaucaccacgauccuggccgcggugacccugugcuucgccagcucccagaacaucaccgaggaguucuaccagagcacgugcuccgccgucagcaagggcuaccucggggcccugcgcaccggcugguacaccuccgugaucaccaucgagcugagcaacaucaaggagaacaagugcaacgggaccgacgccaaggugaagcucaucaagcaggagcuggacaaguacaagaacgcggucacggagcugcagcuccugaugcaguccaccccggccgccggcagcggguccgccaucugcagcggcaucgcggugugcaaggugcugcaccucgagggcgaggucaacaagaucaagaacgcccugcuguccaccaacaaggccguggugagccucuccaacggggucagcgugcugaccuucaaggugcuggaccucaagaacuacaucgacaagcagcugcugcccauccucaacaagcaguccugcagcauccccaacaucgagacggucaucgaguuccagcagaagaacaaccggcugcuggagaucacccgcgaguucuccgugaacgccggcgugaccacccccgucagcacguacaugcucaccaacuccgagcugcugagccucaucaacgacaugccgaucaccaacgaccagaagaagcugaugagcaacaacgugcagaucgugcggcagcaguccuacagcaucaugugcaucaucaaggaggagguccuggccuacguggugcagcucccccuguacggggucaucgacacccccugcuggaagcugcacacgagcccccucugcaccaccaacaccaaggagggcuccaacaucugccugacgcgcaccgaccgggggugguacugcgacaacgcgggcuccgugagcuucuucccgcaggccgagaccugcaaggugcaguccaaccgcgucuucugcgacaccaugaacagccugacgcuccccuccgaggugaaccugugcaacaucgacaucuucaaccccaaguacgacugcaagaucaugaccagcaagaccgacgucuccagcuccgugaucaccagccugggcgccaucguguccugcuacgggaagacgaagugcaccgccagcaacaagaaccggggcaucaucaagaccuucuccaacgggugcgacuacgucagcaacaagggcguggacaccguguccgucggcaacacgcucuacugcgugaacaagcaggaggggcagagccuguacgugaagggcgagcccaucaucaacuucuacgacccgcuggucuuccccagcgacgaguucgacgccuccaucagccaggugaacgagaagaucaaccagucccucgcguucauccgcaagagcgacgagcugcugcacaacgugaacgucgggaaguccaccaccaacaucaugaucaccaccaucaucaucgugaucaucgugauccuccugcugcucaucgccgucggccuguuccuguacugcaaggcccggugaggacuaguggaagcauuuuccuggcugauuaaaagaaauuacucagcuauggucaucuguuccuguuagaaggcuaugcagcauauuauauacuaugcgcauguuaugaaaugcauaauaaaaaauuuuaaaaaaucuaaaagaucuaaaaaaaaaaaaaaaaaaaaaaaaaaaaaaaaaaaaaaaaaaaaaaaaaaaaaaaaaaaaaaaaugcaucccccccccccccccccccccccccccccccaaaggcucuuuucagagccaccagaauu

SEQ ID NO: 14472 - RNA, 1994 nt, Artificial Sequence
  mRNA product Design d-5 comprising derived and/or modified sequence from HRSV(Memphis-37)__AIY60640.1__F-del_DSCav1_mut1 (opt2)
gggagagggcgcuuggcuugcaaggacccugagcugcggcauugaagcacacccaacccaacucgacugaagucagccucacugaaccggaucugagaaucuucucucucugggcuugccagggcucuccgaaccuagcuagcauccucuucaauuccaacuagaaagcuuaccauggagcuccccauccucaagaccaacgccaucaccaccauccucgccgccgucacccucugcuucgccuccucccagaacaucaccgaggaguucuaccaguccaccugcuccgccgucuccaagggcuaccucggcgcccuccgcaccggcugguacaccuccgucaucaccaucgagcucuccaacaucaaggagaacaagugcaacggcaccgacgccaaggucaagcucaucaagcaggagcucgacaaguacaagaacgccgucaccgagcuccagcuccucaugcaguccacccccgccgccggcuccggcuccgccaucugcuccggcaucgccgucugcaagguccuccaccucgagggcgaggucaacaagaucaagaacgcccuccucuccaccaacaaggccgucgucucccucuccaacggcgucuccguccucaccuucaagguccucgaccucaagaacuacaucgacaagcagcuccuccccauccucaacaagcaguccugcuccauccccaacaucgagaccgucaucgaguuccagcagaagaacaaccgccuccucgagaucacccgcgaguucuccgucaacgccggcgucaccacccccgucuccaccuacaugcucaccaacuccgagcuccucucccucaucaacgacaugcccaucaccaacgaccagaagaagcucauguccaacaacguccagaucguccgccagcaguccuacuccaucaugugcaucaucaaggaggagguccucgccuacgucguccagcucccccucuacggcgucaucgacacccccugcuggaagcuccacaccuccccccucugcaccaccaacaccaaggagggcuccaacaucugccucacccgcaccgaccgcggcugguacugcgacaacgccggcuccgucuccuucuucccccaggccgagaccugcaagguccaguccaaccgcgucuucugcgacaccaugaacucccucacccuccccuccgaggucaaccucugcaacaucgacaucuucaaccccaaguacgacugcaagaucaugaccuccaagaccgacgucuccuccuccgucaucaccucccucggcgccaucgucuccugcuacggcaagaccaagugcaccgccuccaacaagaaccgcggcaucaucaagaccuucuccaacggcugcgacuacgucuccaacaagggcgucgacaccgucuccgucggcaacacccucuacugcgucaacaagcaggagggccagucccucuacgucaagggcgagcccaucaucaacuucuacgacccccucgucuuccccuccgacgaguucgacgccuccaucucccaggucaacgagaagaucaaccagucccucgccuucauccgcaaguccgacgagcuccuccacaacgucaacgucggcaaguccaccaccaacaucaugaucaccaccaucaucaucgucaucaucgucauccuccuccuccucaucgccgucggccucuuccucuacugcaaggcccgcugaggacuaguggaagcauuuuccuggcugauuaaaagaaauuacucagcuauggucaucuguuccuguuagaaggcuaugcagcauauuauauacuaugcgcauguuaugaaaugcauaauaaaaaauuuuaaaaaaucuaaaagaucuaaaaaaaaaaaaaaaaaaaaaaaaaaaaaaaaaaaaaaaaaaaaaaaaaaaaaaaaaaaaaaaaugcaucccccccccccccccccccccccccccccccaaaggcucuuuucagagccaccagaauu

SEQ ID NO: 14473 - RNA, 1994 nt, Artificial Sequence
  mRNA product Design d-5 comprising derived and/or modified sequence from HRSV(Memphis-37)__AIY60640.1__F-del_DSCav1_mut1 (opt3)
gggagagggcgcuuggcuugcaaggacccugagcugcggcauugaagcacacccaacccaacucgacugaagucagccucacugaaccggaucugagaaucuucucucucugggcuugccagggcucuccgaaccuagcuagcauccucuucaauuccaacuagaaagcuuaccauggagcugcccauccucaagaccaacgccauuacaacuauacuugcugcagugacgcugugcuucgccagcucccagaauaucaccgaagaguuuuaccaaucuacauguucagcggucaguaaaggcuauuugggggcuuuaagaacuggaugguacaccagcguuauuacaaucgaacuguccaacauuaaggagaauaaaugcaacgguaccgacgccaaggugaaacuaaucaagcaggaacucgauaaguauaaaaaugcaguaacugagcugcagcuucugaugcagucuacuccugccgcuggcucggggucagcaauauguagcggaaucgccgugugcaaggucuugcaccucgagggcgaagugaacaaaauuaagaaugcucugcugaguaccaacaaagccguugugucccucucuaauggugucagcguguuaacguucaagguacuggaccuuaagaacuacaucgauaaacaauugcugccaauucuaaauaagcaguccuguucaaucccgaacauagagacuguuauugaauuucagcagaaaaauaacaggcuccuggagaucacccgggaguucagugugaaugcgggggucacaacucccgugagcaccuauaugcuuacaaacucugaacuguugucccucauuaacgacaugccuaucaccaaugaucaaaagaaacugaugucaaacaaugugcagaucguccgccagcagagcuacaguauuaugugcauaaucaaggaggaaguuuuagcauaugugguacaacugccacucuacggagugauugacacgcccuguuggaaacuucauacuucuccucugugcacaaccaacacuaaggagggcuccaauaucuguuugacacgaaccgaucguggcugguacugcgacaacgccgggagcgucucguuuuucccacaggcugaaacguguaaggugcagucuaauagaguguuuugcgauaccaugaacucccuaacacugcccucagagguuaaucucugcaacauagacauuuucaauccuaaauaugauuguaagaucaugacaaguaaaaccgacgucagcuccucugugaucacaagccugggagccauuguaucaugcuacgguaagacuaaauguaccgcaaguaacaagaauaggggcaucauuaagacauuuuccaacgggugcgauuauguuagcaauaaaggaguggacaccgucucugugggcaacacucuuuacugugucaacaagcaagagggucagucacuguaugugaaaggggaaccaauaaucaauuucuacgacccguugguuuuucccagugaugaguucgacgcuagcauuucccaggugaacgaaaagaucaaucagucucucgccuuuauccggaaaucggaugagcuguuacacaacguaaaugucggaaagagcacgacaaacauuaugauaaccacuaucauuaucgugauuaucguuauacugcuacuccugaucgcggugggccuuuucuuguauugcaaggcccgcugaggacuaguggaagcauuuuccuggcugauuaaaagaaauuacucagcuauggucaucuguuccuguuagaaggcuaugcagcauauuauauacuaugcgcauguuaugaaaugcauaauaaaaaauuuuaaaaaaucuaaaagaucuaaaaaaaaaaaaaaaaaaaaaaaaaaaaaaaaaaaaaaaaaaaaaaaaaaaaaaaaaaaaaaaaugcaucccccccccccccccccccccccccccccccaaaggcucuuuucagagccaccagaauu

SEQ ID NO: 14474 - RNA, 1994 nt, Artificial Sequence
  mRNA product Design d-5 comprising derived and/or modified sequence from HRSV(Memphis-37)__AIY60640.1__F-del_DSCav1_mut1 (opt4)
gggagagggcgcuuggcuugcaaggacccugagcugcggcauugaagcacacccaacccaacucgacugaagucagccucacugaaccggaucugagaaucuucucucucugggcuugccagggcucuccgaaccuagcuagcauccucuucaauuccaacuagaaagcuuaccauggagcugcccauccugaagaccaacgccaucaccaccauccuggccgccgugacccugugcuucgccagcagccagaacaucaccgaggaguucuaccagagcaccugcagcgccgugagcaagggcuaccugggcgcccugagaaccggcugguacaccagcgugaucaccaucgagcugagcaacaucaaggagaacaagugcaacggcaccgacgccaaggugaagcugaucaagcaggagcuggacaaguacaagaacgccgugaccgagcugcagcugcugaugcagagcacccccgccgccggcagcggcagcgccaucugcagcggcaucgccgugugcaaggugcugcaccuggagggcgaggugaacaagaucaagaacgcccugcugagcaccaacaaggccguggugagccugagcaacggcgugagcgugcugaccuucaaggugcuggaccugaagaacuacaucgacaagcagcugcugcccauccugaacaagcagagcugcagcauccccaacaucgagaccgugaucgaguuccagcagaagaacaacagacugcuggagaucaccagagaguucagcgugaacgccggcgugaccacccccgugagcaccuacaugcugaccaacagcgagcugcugagccugaucaacgacaugcccaucaccaacgaccagaagaagcugaugagcaacaacgugcagaucgugagacagcagagcuacagcaucaugugcaucaucaaggaggaggugcuggccuacguggugcagcugccccuguacggcgugaucgacacccccugcuggaagcugcacaccagcccccugugcaccaccaacaccaaggagggcagcaacaucugccugaccagaaccgacagaggcugguacugcgacaacgccggcagcgugagcuucuucccccaggccgagaccugcaaggugcagagcaacagaguguucugcgacaccaugaacagccugacccugcccagcgaggugaaccugugcaacaucgacaucuucaaccccaaguacgacugcaagaucaugaccagcaagaccgacgugagcagcagcgugaucaccagccugggcgccaucgugagcugcuacggcaagaccaagugcaccgccagcaacaagaacagaggcaucaucaagaccuucagcaacggcugcgacuacgugagcaacaagggcguggacaccgugagcgugggcaacacccuguacugcgugaacaagcaggagggccagagccuguacgugaagggcgagcccaucaucaacuucuacgacccccugguguuccccagcgacgaguucgacgccagcaucagccaggugaacgagaagaucaaccagagccuggccuucaucagaaagagcgacgagcugcugcacaacgugaacgugggcaagagcaccaccaacaucaugaucaccaccaucaucaucgugaucaucgugauccugcugcugcugaucgccgugggccuguuccuguacugcaaggccagaugaggacuaguggaagcauuuuccuggcugauuaaaagaaauuacucagcuauggucaucuguuccuguuagaaggcuaugcagcauauuauauacuaugcgcauguuaugaaaugcauaauaaaaaauuuuaaaaaaucuaaaagaucuaaaaaaaaaaaaaaaaaaaaaaaaaaaaaaaaaaaaaaaaaaaaaaaaaaaaaaaaaaaaaaaaugcaucccccccccccccccccccccccccccccccaaaggcucuuuucagagccaccagaauu

SEQ ID NO: 14475 - RNA, 1994 nt, Artificial Sequence
  mRNA product Design d-5 comprising derived and/or modified sequence from HRSV(Memphis-37)__AIY60640.1__F-del_DSCav1_mut1 (opt5)
gggagagggcgcuuggcuugcaaggacccugagcugcggcauugaagcacacccaacccaacucgacugaagucagccucacugaaccggaucugagaaucuucucucucugggcuugccagggcucuccgaaccuagcuagcauccucuucaauuccaacuagaaagcuuaccauggagcugcccauccucaagaccaacgccauuacaacgauccuggcugccgugacccuuugcuucgcgagcucccagaauauuacagaagaguuuuaccaaucuaccuguagcgcugucuccaaaggcuaucugggggcccucagaacaggaugguacaccucuguuaucacaauugaacugagcaacaucaaggagaauaaaugcaacggcaccgacgccaaggugaaacuuaucaagcaggaacuggauaaguauaaaaaugcugugacggagcuccagcugcugaugcaguccaccccugccgcugggucuggaagcgccauuuguuccggcaucgcggucugcaaggugcuccaccuggagggggaaguuaacaaaauuaagaaugcccuucugagcacaaacaaagcuguggucucucucuccaauggagugagcguucugaccuucaaggugcuugaccugaagaacuacaucgauaaacaacuccugccgauucugaauaagcagucuuguuccauccccaacauugagacagucaucgaauuucagcagaaaaauaaccggcuccuggagaucacccgcgaguucagcgugaaugccggcgugacgacaccugucucuaccuauaugcuuacaaacuccgaacugcucagccugauuaacgacaugcccaucaccaaugaucaaaagaaacuuauguccaacaauguucagauugugagacagcagucuuacagcaucaugugcauuaucaaggaggaagugcuggcuuaugucgugcaacucccucuguacggcguuaucgacacccccuguuggaaacugcauacauccccucucugcacgaccaacacaaaggaggggagcaauauuugucugacccggacagaucgcggaugguacugcgacaacgccggcucuguguccuuuuucccgcaggcggaaaccuguaagguccagagcaauagaguguuuugcgauacgaugaacucucuuacacugcccagcgagguuaaucucugcaacaucgacauuuucaauccuaaauaugauuguaagaucaugaccuccaaaaccgacgugucuagcuccgucauuacaagccugggggccaucgugucuugcuacggaaagaccaaauguacagcuuccaacaagaaucggggcaucauuaagacguuuagcaacgggugcgauuaugucucuaauaaaggaguggacaccguuuccgugggcaacacacuuuacugugucaacaagcaagagggccagagccuguaugugaaaggggaacccaucauuaauuucuacgacccucucguuuuucccuccgaugaguucgacgccucuaucagccaggugaacgaaaagauuaaucagucccuggcuuuuauccgcaaaucugaugagcugcuccacaacgucaaugugggaaagagcaccacaaacauuaugaucaccacgaucauuaucgugauuaucguuauucugcuucugcucaucgccgucggccuguuccuguauugcaaggccagaugaggacuaguggaagcauuuuccuggcugauuaaaagaaauuacucagcuauggucaucuguuccuguuagaaggcuaugcagcauauuauauacuaugcgcauguuaugaaaugcauaauaaaaaauuuuaaaaaaucuaaaagaucuaaaaaaaaaaaaaaaaaaaaaaaaaaaaaaaaaaaaaaaaaaaaaaaaaaaaaaaaaaaaaaaaugcaucccccccccccccccccccccccccccccccaaaggcucuuuucagagccaccagaauu

SEQ ID NO: 14476 - RNA, 1994 nt, Artificial Sequence
  mRNA product Design d-5 comprising derived and/or modified sequence from HRSV(Memphis-37)__AIY60640.1__F-del_DSCav1_mut1 (opt6)
gggagagggcgcuuggcuugcaaggacccugagcugcggcauugaagcacacccaacccaacucgacugaagucagccucacugaaccggaucugagaaucuucucucucugggcuugccagggcucuccgaaccuagcuagcauccucuucaauuccaacuagaaagcuuaccauggaauuaccaauacuaaaaacaaacgcaauaacaacaauucuagcagcaguaacauuaugcuuugcaucaucccaaaacaucacagaagaauuuuaucaaucaaccugcucagcaguuuccaaaggauacuuaggagcauuaagaacugguugguacacuucaguaaucaccaucgaacucucaaacaucaaggaaaacaaaugcaacggaacagacgcaaaaguuaaacucauaaaacaagaacuugacaaauacaaaaacgccguaacagaacuacaacuucucaugcaaucaacacccgcagcaggauccggaucagccauaugcucaggcauagcaguauguaaaguauuacaucuugaaggugaaguaaacaaaauaaaaaacgcacuucuaucaaccaacaaagcaguaguaucacuaucaaacggaguauccgucuuaacauuuaaaguucuagaccucaaaaacuauauagacaaacaauuacugccaauccucaauaaacaaucaugcucaauaccaaacaucgaaacaguaauagaauuucaacaaaaaaacaacagacuacuagaaauaacaagagaauuuuccgucaacgccggcguaacuacuccaguaucaacauauaugcuaaccaacucagaacuccuaucccucauaaacgacaugccaauaacuaaugaucaaaaaaaacuaaugucaaacaauguacaaauaguuagacaacaaucauacucaaucaugugcauaauaaaagaagaaguacuagcauacgucguccaacuaccccuauacggaguaauagacacaccuugcuggaaacuacacacaucaccccuaugcacaacaaauacaaaagaagguuccaacaucugccuaacaagaacugauagaggaugguacugcgacaacgccggaucaguaucauucuucccucaagcugaaaccugcaaaguacaaucaaacagaguauuuugcgauacaaugaacucccuaacacuucccucagaaguuaaucuuuguaauauagauauauucaacccaaaauacgacugcaaaauaaugacaaguaaaacagacguauccucaucuguaauuacaucacuaggagccauaguaucuugcuacggcaaaaccaaaugcacagcaucaaacaaaaacagagguauuaucaaaaccuucucaaacggaugugacuacguuucaaacaaaggaguagacacaguaucagucggaaacacccuauacuguguuaacaaacaagaaggacaaucacuguacguaaaaggagaacccauaauaaauuucuacgacccacuuguauuuccaucagacgaauuugaugcaucaaucucacaaguaaaugaaaaaauaaaccaaucauuagcauucauaagaaaaucugacgaguuacuacacaacguaaauguuggcaaaucaacaaccaauauaaugauaacaacaauaauaauaguaauaauagucauauuacuccuccucauagccgucggauuauucuuauacugcaaagcaagauaaggacuaguggaagcauuuuccuggcugauuaaaagaaauuacucagcuauggucaucuguuccuguuagaaggcuaugcagcauauuauauacuaugcgcauguuaugaaaugcauaauaaaaaauuuuaaaaaaucuaaaagaucuaaaaaaaaaaaaaaaaaaaaaaaaaaaaaaaaaaaaaaaaaaaaaaaaaaaaaaaaaaaaaaaaugcaucccccccccccccccccccccccccccccccaaaggcucuuuucagagccaccagaauu

SEQ ID NO: 14477 - RNA, 1994 nt, Artificial Sequence
  mRNA product Design d-5 comprising derived and/or modified sequence from HRSV(Memphis-37)__AIY60640.1__F-del_DSCav1_mut1 (opt11)
gggagagggcgcuuggcuugcaaggacccugagcugcggcauugaagcacacccaacccaacucgacugaagucagccucacugaaccggaucugagaaucuucucucucugggcuugccagggcucuccgaaccuagcuagcauccucuucaauuccaacuagaaagcuuaccauggaacuccccauacuaaaaaccaacgccaucacaacaauccucgccgccgucacacucugcuucgccagcucccaaaacaucaccgaagaguucuaucaaucaaccugcuccgcagucucaaagggauaccucggagcccuccgcaccggaugguacacuuccgucaucacaauagaacucuccaacaucaaagaaaacaaaugcaacggcaccgacgcaaaagucaagcucaucaaacaagaacucgacaaauauaaaaacgccgucaccgaacuccaacuacucaugcaauccacacccgcggccggcucaggcagcgccaucugcucaggcaucgccgucugcaaaguccuccaccucgaaggcgaagucaacaaaaucaaaaacgcccuucuuucaaccaacaaggcaguaguaucccucucaaacggcgucagcguccugaccuucaaaguccuagaccucaaaaacuacauagauaaacaacuccuccccauacugaacaaacaaucgugcuccauccccaauaucgaaaccgucauagaguuccagcagaaaaacaacagacuucucgaaauaacccgagaguucucaguaaacgccggagucaccacacccguaagcaccuacaugcucacaaacucagaacuccuaucccucaucaacgacaugcccaucaccaacgaccagaaaaagcuaauguccaacaacguccaaauaguacgccaacaaagcuacucgauaaugugcaucaucaaggaagaaguacucgccuacgucguccaacucccccucuacggcguaaucgacacacccugcuggaaacuccacacguccccacucugcacaacaaacacaaaagaaggauccaacauaugccuaacccgcaccgacaggggcugguacugcgacaacgcaggcucagucagcuucuuuccccaagccgaaacaugcaaaguccaauccaaccgugucuucugcgacaccaugaacucgcucacccuacccucggaagucaaucucugcaacaucgacaucuucaacccaaaauacgacuguaaaaucaugaccagcaaaacagacguuucuuccagcgucaucacaucacucggcgcgaucguaucaugcuauggcaaaacaaagugcaccgcuagcaauaaaaaccgaggaaucauaaaaaccuucagcaacggcugcgacuacguauccaacaaaggcgucgacaccguauccgucggaaacacccucuacugcgucaacaagcaagaaggacaaucacucuacgucaaaggcgaaccaaucauaaacuucuacgacccacucguauuccccucagacgaguucgacgcauccaucucccaagucaacgaaaagaucaaccaaucucucgccuuuauacgcaaaagcgacgaacuccuucacaacguaaacgucggcaaaagcaccacuaacauaaugaucaccacaaucauaauaguaaucaucguaauacuccuccuacucaucgccgugggccuauuccucuauugcaaagcccgauaaggacuaguggaagcauuuuccuggcugauuaaaagaaauuacucagcuauggucaucuguuccuguuagaaggcuaugcagcauauuauauacuaugcgcauguuaugaaaugcauaauaaaaaauuuuaaaaaaucuaaaagaucuaaaaaaaaaaaaaaaaaaaaaaaaaaaaaaaaaaaaaaaaaaaaaaaaaaaaaaaaaaaaaaaaugcaucccccccccccccccccccccccccccccccaaaggcucuuuucagagccaccagaauu

SEQ ID NO: 14478 - RNA, 1874 nt, Artificial Sequence
  mRNA product Design e-1 comprising derived and/or modified sequence from HRSV(Memphis-37)__AIY60640.1__F-del_DSCav1_mut1 (opt1)
gggagaauauaagcguuggcggagcgucgguuguagcacucugcgcgcccgcucuucugcugcuguuugucuacuuccuccugcuuccccgccgccgccgccgccaucaagcuuaccauggagcugcccauccucaagaccaacgccaucaccacgauccuggccgcggugacccugugcuucgccagcucccagaacaucaccgaggaguucuaccagagcacgugcuccgccgucagcaagggcuaccucggcgcccugcgcaccgggugguacaccagcgugaucaccaucgagcuguccaacaucaaggagaacaagugcaacggcaccgacgccaaggugaagcucaucaagcaggagcuggacaaguacaagaacgcggucacggagcugcagcuccugaugcagagcaccccggccgccggcuccgggagcgcgaucugcuccggcaucgccgucugcaaggugcugcaccucgagggcgaggugaacaagaucaagaacgcccugcuguccaccaacaaggccgucgugagccucuccaacggggugagcguccugaccuucaaggugcuggaccucaagaacuacaucgacaagcagcugcugcccauccugaacaagcagagcugcuccauccccaacaucgagaccgucaucgaguuccagcagaagaacaaccgccuccuggagaucacgcgggaguucagcgugaacgcgggcgugaccacccccgucuccaccuacaugcugacgaacagcgagcuccugucccugaucaacgacaugccgaucaccaacgaccagaagaagcucaugagcaacaacgugcagaucgugcgccagcaguccuacagcaucaugugcaucaucaaggaggagguccuggccuacguggugcagcugccccucuacggggucaucgacacccccugcuggaagcugcacaccagcccccugugcacgaccaacaccaaggagggcuccaacaucugccucacccggacggaccgcgggugguacugcgacaacgccggcagcguguccuucuucccgcaggccgagaccugcaagguccagagcaaccggguguucugcgacaccaugaacucccugacccugcccagcgaggugaaccucugcaacaucgacaucuucaaccccaaguacgacugcaagaucaugacguccaagaccgacgucagcuccagcgugaucaccucccugggcgccaucgugagcugcuacgggaagaccaagugcacggcgagcaacaagaaccgcggcaucaucaagaccuucuccaacgggugcgacuacgucagcaacaagggcguggacaccguguccgucggcaacacccuguacugcgugaacaagcaggagggccagagccucuacgugaagggggagcccaucaucaacuucuacgacccgcuggucuuccccuccgacgaguucgacgccagcaucucccaggugaacgagaagaucaaccagagccuggccuucauccggaaguccgacgagcuccugcacaacgugaacgucggcaagagcaccacgaacaucaugaucaccaccaucaucaucgugaucaucgugauccugcugcuccugaucgccgucgggcuguuccucuacugcaaggcccgcugaggacuaguguccaccugucccuccugggcugcuggauugucucguuuuccugccaaauaaacaggaucagcgcuuuacagaucuaaaaaaaaaaaaaaaaaaaaaaaaaaaaaaaaaaaaaaaaaaaaaaaaaaaaaaaaaaaaaaaaugcaucccccccccccccccccccccccccccccccaaaggcucuuuucagagccaccagaauu

SEQ ID NO: 14479 - RNA, 1874 nt, Artificial Sequence
  mRNA product Design e-1 comprising derived and/or modified sequence from HRSV(Memphis-37)__AIY60640.1__F-del_DSCav1_mut1 (opt1)
gggagaauauaagcguuggcggagcgucgguuguagcacucugcgcgcccgcucuucugcugcuguuugucuacuuccuccugcuuccccgccgccgccgccgccaucaagcuuaccauggagcugcccauccucaagaccaacgccaucaccacgauccuggccgcggugacccugugcuucgccagcucccagaacaucaccgaggaguucuaccagagcacgugcuccgccgucagcaagggcuaccucggggcccugcgcaccggcugguacaccuccgugaucaccaucgagcugagcaacaucaaggagaacaagugcaacgggaccgacgccaaggugaagcucaucaagcaggagcuggacaaguacaagaacgcggucacggagcugcagcuccugaugcaguccaccccggccgccggcagcggguccgccaucugcagcggcaucgcggugugcaaggugcugcaccucgagggcgaggucaacaagaucaagaacgcccugcuguccaccaacaaggccguggugagccucuccaacggggucagcgugcugaccuucaaggugcuggaccucaagaacuacaucgacaagcagcugcugcccauccucaacaagcaguccugcagcauccccaacaucgagacggucaucgaguuccagcagaagaacaaccggcugcuggagaucacccgcgaguucuccgugaacgccggcgugaccacccccgucagcacguacaugcucaccaacuccgagcugcugagccucaucaacgacaugccgaucaccaacgaccagaagaagcugaugagcaacaacgugcagaucgugcggcagcaguccuacagcaucaugugcaucaucaaggaggagguccuggccuacguggugcagcucccccuguacggggucaucgacacccccugcuggaagcugcacacgagcccccucugcaccaccaacaccaaggagggcuccaacaucugccugacgcgcaccgaccgggggugguacugcgacaacgcgggcuccgugagcuucuucccgcaggccgagaccugcaaggugcaguccaaccgcgucuucugcgacaccaugaacagccugacgcuccccuccgaggugaaccugugcaacaucgacaucuucaaccccaaguacgacugcaagaucaugaccagcaagaccgacgucuccagcuccgugaucaccagccugggcgccaucguguccugcuacgggaagacgaagugcaccgccagcaacaagaaccggggcaucaucaagaccuucuccaacgggugcgacuacgucagcaacaagggcguggacaccguguccgucggcaacacgcucuacugcgugaacaagcaggaggggcagagccuguacgugaagggcgagcccaucaucaacuucuacgacccgcuggucuuccccagcgacgaguucgacgccuccaucagccaggugaacgagaagaucaaccagucccucgcguucauccgcaagagcgacgagcugcugcacaacgugaacgucgggaaguccaccaccaacaucaugaucaccaccaucaucaucgugaucaucgugauccuccugcugcucaucgccgucggccuguuccuguacugcaaggcccggugaggacuaguguccaccugucccuccugggcugcuggauugucucguuuuccugccaaauaaacaggaucagcgcuuuacagaucuaaaaaaaaaaaaaaaaaaaaaaaaaaaaaaaaaaaaaaaaaaaaaaaaaaaaaaaaaaaaaaaaugcaucccccccccccccccccccccccccccccccaaaggcucuuuucagagccaccagaauu

SEQ ID NO: 14480 - RNA, 1874 nt, Artificial Sequence
  mRNA product Design e-1 comprising derived and/or modified sequence from HRSV(Memphis-37)__AIY60640.1__F-del_DSCav1_mut1 (opt2)
gggagaauauaagcguuggcggagcgucgguuguagcacucugcgcgcccgcucuucugcugcuguuugucuacuuccuccugcuuccccgccgccgccgccgccaucaagcuuaccauggagcuccccauccucaagaccaacgccaucaccaccauccucgccgccgucacccucugcuucgccuccucccagaacaucaccgaggaguucuaccaguccaccugcuccgccgucuccaagggcuaccucggcgcccuccgcaccggcugguacaccuccgucaucaccaucgagcucuccaacaucaaggagaacaagugcaacggcaccgacgccaaggucaagcucaucaagcaggagcucgacaaguacaagaacgccgucaccgagcuccagcuccucaugcaguccacccccgccgccggcuccggcuccgccaucugcuccggcaucgccgucugcaagguccuccaccucgagggcgaggucaacaagaucaagaacgcccuccucuccaccaacaaggccgucgucucccucuccaacggcgucuccguccucaccuucaagguccucgaccucaagaacuacaucgacaagcagcuccuccccauccucaacaagcaguccugcuccauccccaacaucgagaccgucaucgaguuccagcagaagaacaaccgccuccucgagaucacccgcgaguucuccgucaacgccggcgucaccacccccgucuccaccuacaugcucaccaacuccgagcuccucucccucaucaacgacaugcccaucaccaacgaccagaagaagcucauguccaacaacguccagaucguccgccagcaguccuacuccaucaugugcaucaucaaggaggagguccucgccuacgucguccagcucccccucuacggcgucaucgacacccccugcuggaagcuccacaccuccccccucugcaccaccaacaccaaggagggcuccaacaucugccucacccgcaccgaccgcggcugguacugcgacaacgccggcuccgucuccuucuucccccaggccgagaccugcaagguccaguccaaccgcgucuucugcgacaccaugaacucccucacccuccccuccgaggucaaccucugcaacaucgacaucuucaaccccaaguacgacugcaagaucaugaccuccaagaccgacgucuccuccuccgucaucaccucccucggcgccaucgucuccugcuacggcaagaccaagugcaccgccuccaacaagaaccgcggcaucaucaagaccuucuccaacggcugcgacuacgucuccaacaagggcgucgacaccgucuccgucggcaacacccucuacugcgucaacaagcaggagggccagucccucuacgucaagggcgagcccaucaucaacuucuacgacccccucgucuuccccuccgacgaguucgacgccuccaucucccaggucaacgagaagaucaaccagucccucgccuucauccgcaaguccgacgagcuccuccacaacgucaacgucggcaaguccaccaccaacaucaugaucaccaccaucaucaucgucaucaucgucauccuccuccuccucaucgccgucggccucuuccucuacugcaaggcccgcugaggacuaguguccaccugucccuccugggcugcuggauugucucguuuuccugccaaauaaacaggaucagcgcuuuacagaucuaaaaaaaaaaaaaaaaaaaaaaaaaaaaaaaaaaaaaaaaaaaaaaaaaaaaaaaaaaaaaaaaugcaucccccccccccccccccccccccccccccccaaaggcucuuuucagagccaccagaauu

SEQ ID NO: 14481 - RNA, 1874 nt, Artificial Sequence
  mRNA product Design e-1 comprising derived and/or modified sequence from HRSV(Memphis-37)__AIY60640.1__F-del_DSCav1_mut1 (opt3)
gggagaauauaagcguuggcggagcgucgguuguagcacucugcgcgcccgcucuucugcugcuguuugucuacuuccuccugcuuccccgccgccgccgccgccaucaagcuuaccauggagcugcccauccucaagaccaacgccauuacaacuauacuugcugcagugacgcugugcuucgccagcucccagaauaucaccgaagaguuuuaccaaucuacauguucagcggucaguaaaggcuauuugggggcuuuaagaacuggaugguacaccagcguuauuacaaucgaacuguccaacauuaaggagaauaaaugcaacgguaccgacgccaaggugaaacuaaucaagcaggaacucgauaaguauaaaaaugcaguaacugagcugcagcuucugaugcagucuacuccugccgcuggcucggggucagcaauauguagcggaaucgccgugugcaaggucuugcaccucgagggcgaagugaacaaaauuaagaaugcucugcugaguaccaacaaagccguugugucccucucuaauggugucagcguguuaacguucaagguacuggaccuuaagaacuacaucgauaaacaauugcugccaauucuaaauaagcaguccuguucaaucccgaacauagagacuguuauugaauuucagcagaaaaauaacaggcuccuggagaucacccgggaguucagugugaaugcgggggucacaacucccgugagcaccuauaugcuuacaaacucugaacuguugucccucauuaacgacaugccuaucaccaaugaucaaaagaaacugaugucaaacaaugugcagaucguccgccagcagagcuacaguauuaugugcauaaucaaggaggaaguuuuagcauaugugguacaacugccacucuacggagugauugacacgcccuguuggaaacuucauacuucuccucugugcacaaccaacacuaaggagggcuccaauaucuguuugacacgaaccgaucguggcugguacugcgacaacgccgggagcgucucguuuuucccacaggcugaaacguguaaggugcagucuaauagaguguuuugcgauaccaugaacucccuaacacugcccucagagguuaaucucugcaacauagacauuuucaauccuaaauaugauuguaagaucaugacaaguaaaaccgacgucagcuccucugugaucacaagccugggagccauuguaucaugcuacgguaagacuaaauguaccgcaaguaacaagaauaggggcaucauuaagacauuuuccaacgggugcgauuauguuagcaauaaaggaguggacaccgucucugugggcaacacucuuuacugugucaacaagcaagagggucagucacuguaugugaaaggggaaccaauaaucaauuucuacgacccguugguuuuucccagugaugaguucgacgcuagcauuucccaggugaacgaaaagaucaaucagucucucgccuuuauccggaaaucggaugagcuguuacacaacguaaaugucggaaagagcacgacaaacauuaugauaaccacuaucauuaucgugauuaucguuauacugcuacuccugaucgcggugggccuuuucuuguauugcaaggcccgcugaggacuaguguccaccugucccuccugggcugcuggauugucucguuuuccugccaaauaaacaggaucagcgcuuuacagaucuaaaaaaaaaaaaaaaaaaaaaaaaaaaaaaaaaaaaaaaaaaaaaaaaaaaaaaaaaaaaaaaaugcaucccccccccccccccccccccccccccccccaaaggcucuuuucagagccaccagaauu

SEQ ID NO: 14482 - RNA, 1874 nt, Artificial Sequence
  mRNA product Design e-1 comprising derived and/or modified sequence from HRSV(Memphis-37)__AIY60640.1__F-del_DSCav1_mut1 (opt4)
gggagaauauaagcguuggcggagcgucgguuguagcacucugcgcgcccgcucuucugcugcuguuugucuacuuccuccugcuuccccgccgccgccgccgccaucaagcuuaccauggagcugcccauccugaagaccaacgccaucaccaccauccuggccgccgugacccugugcuucgccagcagccagaacaucaccgaggaguucuaccagagcaccugcagcgccgugagcaagggcuaccugggcgcccugagaaccggcugguacaccagcgugaucaccaucgagcugagcaacaucaaggagaacaagugcaacggcaccgacgccaaggugaagcugaucaagcaggagcuggacaaguacaagaacgccgugaccgagcugcagcugcugaugcagagcacccccgccgccggcagcggcagcgccaucugcagcggcaucgccgugugcaaggugcugcaccuggagggcgaggugaacaagaucaagaacgcccugcugagcaccaacaaggccguggugagccugagcaacggcgugagcgugcugaccuucaaggugcuggaccugaagaacuacaucgacaagcagcugcugcccauccugaacaagcagagcugcagcauccccaacaucgagaccgugaucgaguuccagcagaagaacaacagacugcuggagaucaccagagaguucagcgugaacgccggcgugaccacccccgugagcaccuacaugcugaccaacagcgagcugcugagccugaucaacgacaugcccaucaccaacgaccagaagaagcugaugagcaacaacgugcagaucgugagacagcagagcuacagcaucaugugcaucaucaaggaggaggugcuggccuacguggugcagcugccccuguacggcgugaucgacacccccugcuggaagcugcacaccagcccccugugcaccaccaacaccaaggagggcagcaacaucugccugaccagaaccgacagaggcugguacugcgacaacgccggcagcgugagcuucuucccccaggccgagaccugcaaggugcagagcaacagaguguucugcgacaccaugaacagccugacccugcccagcgaggugaaccugugcaacaucgacaucuucaaccccaaguacgacugcaagaucaugaccagcaagaccgacgugagcagcagcgugaucaccagccugggcgccaucgugagcugcuacggcaagaccaagugcaccgccagcaacaagaacagaggcaucaucaagaccuucagcaacggcugcgacuacgugagcaacaagggcguggacaccgugagcgugggcaacacccuguacugcgugaacaagcaggagggccagagccuguacgugaagggcgagcccaucaucaacuucuacgacccccugguguuccccagcgacgaguucgacgccagcaucagccaggugaacgagaagaucaaccagagccuggccuucaucagaaagagcgacgagcugcugcacaacgugaacgugggcaagagcaccaccaacaucaugaucaccaccaucaucaucgugaucaucgugauccugcugcugcugaucgccgugggccuguuccuguacugcaaggccagaugaggacuaguguccaccugucccuccugggcugcuggauugucucguuuuccugccaaauaaacaggaucagcgcuuuacagaucuaaaaaaaaaaaaaaaaaaaaaaaaaaaaaaaaaaaaaaaaaaaaaaaaaaaaaaaaaaaaaaaaugcaucccccccccccccccccccccccccccccccaaaggcucuuuucagagccaccagaauu

SEQ ID NO: 14483 - RNA, 1874 nt, Artificial Sequence
  mRNA product Design e-1 comprising derived and/or modified sequence from HRSV(Memphis-37)__AIY60640.1__F-del_DSCav1_mut1 (opt5)
gggagaauauaagcguuggcggagcgucgguuguagcacucugcgcgcccgcucuucugcugcuguuugucuacuuccuccugcuuccccgccgccgccgccgccaucaagcuuaccauggagcugcccauccucaagaccaacgccauuacaacgauccuggcugccgugacccuuugcuucgcgagcucccagaauauuacagaagaguuuuaccaaucuaccuguagcgcugucuccaaaggcuaucugggggcccucagaacaggaugguacaccucuguuaucacaauugaacugagcaacaucaaggagaauaaaugcaacggcaccgacgccaaggugaaacuuaucaagcaggaacuggauaaguauaaaaaugcugugacggagcuccagcugcugaugcaguccaccccugccgcugggucuggaagcgccauuuguuccggcaucgcggucugcaaggugcuccaccuggagggggaaguuaacaaaauuaagaaugcccuucugagcacaaacaaagcuguggucucucucuccaauggagugagcguucugaccuucaaggugcuugaccugaagaacuacaucgauaaacaacuccugccgauucugaauaagcagucuuguuccauccccaacauugagacagucaucgaauuucagcagaaaaauaaccggcuccuggagaucacccgcgaguucagcgugaaugccggcgugacgacaccugucucuaccuauaugcuuacaaacuccgaacugcucagccugauuaacgacaugcccaucaccaaugaucaaaagaaacuuauguccaacaauguucagauugugagacagcagucuuacagcaucaugugcauuaucaaggaggaagugcuggcuuaugucgugcaacucccucuguacggcguuaucgacacccccuguuggaaacugcauacauccccucucugcacgaccaacacaaaggaggggagcaauauuugucugacccggacagaucgcggaugguacugcgacaacgccggcucuguguccuuuuucccgcaggcggaaaccuguaagguccagagcaauagaguguuuugcgauacgaugaacucucuuacacugcccagcgagguuaaucucugcaacaucgacauuuucaauccuaaauaugauuguaagaucaugaccuccaaaaccgacgugucuagcuccgucauuacaagccugggggccaucgugucuugcuacggaaagaccaaauguacagcuuccaacaagaaucggggcaucauuaagacguuuagcaacgggugcgauuaugucucuaauaaaggaguggacaccguuuccgugggcaacacacuuuacugugucaacaagcaagagggccagagccuguaugugaaaggggaacccaucauuaauuucuacgacccucucguuuuucccuccgaugaguucgacgccucuaucagccaggugaacgaaaagauuaaucagucccuggcuuuuauccgcaaaucugaugagcugcuccacaacgucaaugugggaaagagcaccacaaacauuaugaucaccacgaucauuaucgugauuaucguuauucugcuucugcucaucgccgucggccuguuccuguauugcaaggccagaugaggacuaguguccaccugucccuccugggcugcuggauugucucguuuuccugccaaauaaacaggaucagcgcuuuacagaucuaaaaaaaaaaaaaaaaaaaaaaaaaaaaaaaaaaaaaaaaaaaaaaaaaaaaaaaaaaaaaaaaugcaucccccccccccccccccccccccccccccccaaaggcucuuuucagagccaccagaauu

SEQ ID NO: 14484 - RNA, 1874 nt, Artificial Sequence
  mRNA product Design e-1 comprising derived and/or modified sequence from HRSV(Memphis-37)__AIY60640.1__F-del_DSCav1_mut1 (opt6)
gggagaauauaagcguuggcggagcgucgguuguagcacucugcgcgcccgcucuucugcugcuguuugucuacuuccuccugcuuccccgccgccgccgccgccaucaagcuuaccauggaauuaccaauacuaaaaacaaacgcaauaacaacaauucuagcagcaguaacauuaugcuuugcaucaucccaaaacaucacagaagaauuuuaucaaucaaccugcucagcaguuuccaaaggauacuuaggagcauuaagaacugguugguacacuucaguaaucaccaucgaacucucaaacaucaaggaaaacaaaugcaacggaacagacgcaaaaguuaaacucauaaaacaagaacuugacaaauacaaaaacgccguaacagaacuacaacuucucaugcaaucaacacccgcagcaggauccggaucagccauaugcucaggcauagcaguauguaaaguauuacaucuugaaggugaaguaaacaaaauaaaaaacgcacuucuaucaaccaacaaagcaguaguaucacuaucaaacggaguauccgucuuaacauuuaaaguucuagaccucaaaaacuauauagacaaacaauuacugccaauccucaauaaacaaucaugcucaauaccaaacaucgaaacaguaauagaauuucaacaaaaaaacaacagacuacuagaaauaacaagagaauuuuccgucaacgccggcguaacuacuccaguaucaacauauaugcuaaccaacucagaacuccuaucccucauaaacgacaugccaauaacuaaugaucaaaaaaaacuaaugucaaacaauguacaaauaguuagacaacaaucauacucaaucaugugcauaauaaaagaagaaguacuagcauacgucguccaacuaccccuauacggaguaauagacacaccuugcuggaaacuacacacaucaccccuaugcacaacaaauacaaaagaagguuccaacaucugccuaacaagaacugauagaggaugguacugcgacaacgccggaucaguaucauucuucccucaagcugaaaccugcaaaguacaaucaaacagaguauuuugcgauacaaugaacucccuaacacuucccucagaaguuaaucuuuguaauauagauauauucaacccaaaauacgacugcaaaauaaugacaaguaaaacagacguauccucaucuguaauuacaucacuaggagccauaguaucuugcuacggcaaaaccaaaugcacagcaucaaacaaaaacagagguauuaucaaaaccuucucaaacggaugugacuacguuucaaacaaaggaguagacacaguaucagucggaaacacccuauacuguguuaacaaacaagaaggacaaucacuguacguaaaaggagaacccauaauaaauuucuacgacccacuuguauuuccaucagacgaauuugaugcaucaaucucacaaguaaaugaaaaaauaaaccaaucauuagcauucauaagaaaaucugacgaguuacuacacaacguaaauguuggcaaaucaacaaccaauauaaugauaacaacaauaauaauaguaauaauagucauauuacuccuccucauagccgucggauuauucuuauacugcaaagcaagauaaggacuaguguccaccugucccuccugggcugcuggauugucucguuuuccugccaaauaaacaggaucagcgcuuuacagaucuaaaaaaaaaaaaaaaaaaaaaaaaaaaaaaaaaaaaaaaaaaaaaaaaaaaaaaaaaaaaaaaaugcaucccccccccccccccccccccccccccccccaaaggcucuuuucagagccaccagaauu

SEQ ID NO: 14485 - RNA, 1874 nt, Artificial Sequence
  mRNA product Design e-1 comprising derived and/or modified sequence from HRSV(Memphis-37)__AIY60640.1__F-del_DSCav1_mut1 (opt11)
gggagaauauaagcguuggcggagcgucgguuguagcacucugcgcgcccgcucuucugcugcuguuugucuacuuccuccugcuuccccgccgccgccgccgccaucaagcuuaccauggaacuccccauacuaaaaaccaacgccaucacaacaauccucgccgccgucacacucugcuucgccagcucccaaaacaucaccgaagaguucuaucaaucaaccugcuccgcagucucaaagggauaccucggagcccuccgcaccggaugguacacuuccgucaucacaauagaacucuccaacaucaaagaaaacaaaugcaacggcaccgacgcaaaagucaagcucaucaaacaagaacucgacaaauauaaaaacgccgucaccgaacuccaacuacucaugcaauccacacccgcggccggcucaggcagcgccaucugcucaggcaucgccgucugcaaaguccuccaccucgaaggcgaagucaacaaaaucaaaaacgcccuucuuucaaccaacaaggcaguaguaucccucucaaacggcgucagcguccugaccuucaaaguccuagaccucaaaaacuacauagauaaacaacuccuccccauacugaacaaacaaucgugcuccauccccaauaucgaaaccgucauagaguuccagcagaaaaacaacagacuucucgaaauaacccgagaguucucaguaaacgccggagucaccacacccguaagcaccuacaugcucacaaacucagaacuccuaucccucaucaacgacaugcccaucaccaacgaccagaaaaagcuaauguccaacaacguccaaauaguacgccaacaaagcuacucgauaaugugcaucaucaaggaagaaguacucgccuacgucguccaacucccccucuacggcguaaucgacacacccugcuggaaacuccacacguccccacucugcacaacaaacacaaaagaaggauccaacauaugccuaacccgcaccgacaggggcugguacugcgacaacgcaggcucagucagcuucuuuccccaagccgaaacaugcaaaguccaauccaaccgugucuucugcgacaccaugaacucgcucacccuacccucggaagucaaucucugcaacaucgacaucuucaacccaaaauacgacuguaaaaucaugaccagcaaaacagacguuucuuccagcgucaucacaucacucggcgcgaucguaucaugcuauggcaaaacaaagugcaccgcuagcaauaaaaaccgaggaaucauaaaaaccuucagcaacggcugcgacuacguauccaacaaaggcgucgacaccguauccgucggaaacacccucuacugcgucaacaagcaagaaggacaaucacucuacgucaaaggcgaaccaaucauaaacuucuacgacccacucguauuccccucagacgaguucgacgcauccaucucccaagucaacgaaaagaucaaccaaucucucgccuuuauacgcaaaagcgacgaacuccuucacaacguaaacgucggcaaaagcaccacuaacauaaugaucaccacaaucauaauaguaaucaucguaauacuccuccuacucaucgccgugggccuauuccucuauugcaaagcccgauaaggacuaguguccaccugucccuccugggcugcuggauugucucguuuuccugccaaauaaacaggaucagcgcuuuacagaucuaaaaaaaaaaaaaaaaaaaaaaaaaaaaaaaaaaaaaaaaaaaaaaaaaaaaaaaaaaaaaaaaugcaucccccccccccccccccccccccccccccccaaaggcucuuuucagagccaccagaauu

SEQ ID NO: 14486 - RNA, 1856 nt, Artificial Sequence
  mRNA product Design e-2 comprising derived and/or modified sequence from HRSV(Memphis-37)__AIY60640.1__F-del_DSCav1_mut1 (opt1)
gggagacccgugacccggaaguuguacggcuacgcgacuuucccucccacaaacccucgcgcccuuccuuuccuacuugggcccggcagaaagcuuaccauggagcugcccauccucaagaccaacgccaucaccacgauccuggccgcggugacccugugcuucgccagcucccagaacaucaccgaggaguucuaccagagcacgugcuccgccgucagcaagggcuaccucggcgcccugcgcaccgggugguacaccagcgugaucaccaucgagcuguccaacaucaaggagaacaagugcaacggcaccgacgccaaggugaagcucaucaagcaggagcuggacaaguacaagaacgcggucacggagcugcagcuccugaugcagagcaccccggccgccggcuccgggagcgcgaucugcuccggcaucgccgucugcaaggugcugcaccucgagggcgaggugaacaagaucaagaacgcccugcuguccaccaacaaggccgucgugagccucuccaacggggugagcguccugaccuucaaggugcuggaccucaagaacuacaucgacaagcagcugcugcccauccugaacaagcagagcugcuccauccccaacaucgagaccgucaucgaguuccagcagaagaacaaccgccuccuggagaucacgcgggaguucagcgugaacgcgggcgugaccacccccgucuccaccuacaugcugacgaacagcgagcuccugucccugaucaacgacaugccgaucaccaacgaccagaagaagcucaugagcaacaacgugcagaucgugcgccagcaguccuacagcaucaugugcaucaucaaggaggagguccuggccuacguggugcagcugccccucuacggggucaucgacacccccugcuggaagcugcacaccagcccccugugcacgaccaacaccaaggagggcuccaacaucugccucacccggacggaccgcgggugguacugcgacaacgccggcagcguguccuucuucccgcaggccgagaccugcaagguccagagcaaccggguguucugcgacaccaugaacucccugacccugcccagcgaggugaaccucugcaacaucgacaucuucaaccccaaguacgacugcaagaucaugacguccaagaccgacgucagcuccagcgugaucaccucccugggcgccaucgugagcugcuacgggaagaccaagugcacggcgagcaacaagaaccgcggcaucaucaagaccuucuccaacgggugcgacuacgucagcaacaagggcguggacaccguguccgucggcaacacccuguacugcgugaacaagcaggagggccagagccucuacgugaagggggagcccaucaucaacuucuacgacccgcuggucuuccccuccgacgaguucgacgccagcaucucccaggugaacgagaagaucaaccagagccuggccuucauccggaaguccgacgagcuccugcacaacgugaacgucggcaagagcaccacgaacaucaugaucaccaccaucaucaucgugaucaucgugauccugcugcuccugaucgccgucgggcuguuccucuacugcaaggcccgcugaggacuaguguccaccugucccuccugggcugcuggauugucucguuuuccugccaaauaaacaggaucagcgcuuuacagaucuaaaaaaaaaaaaaaaaaaaaaaaaaaaaaaaaaaaaaaaaaaaaaaaaaaaaaaaaaaaaaaaaugcaucccccccccccccccccccccccccccccccaaaggcucuuuucagagccaccagaauu

SEQ ID NO: 14487 - RNA, 1856 nt, Artificial Sequence
  mRNA product Design e-2 comprising derived and/or modified sequence from HRSV(Memphis-37)__AIY60640.1__F-del_DSCav1_mut1 (opt1)
gggagacccgugacccggaaguuguacggcuacgcgacuuucccucccacaaacccucgcgcccuuccuuuccuacuugggcccggcagaaagcuuaccauggagcugcccauccucaagaccaacgccaucaccacgauccuggccgcggugacccugugcuucgccagcucccagaacaucaccgaggaguucuaccagagcacgugcuccgccgucagcaagggcuaccucggggcccugcgcaccggcugguacaccuccgugaucaccaucgagcugagcaacaucaaggagaacaagugcaacgggaccgacgccaaggugaagcucaucaagcaggagcuggacaaguacaagaacgcggucacggagcugcagcuccugaugcaguccaccccggccgccggcagcggguccgccaucugcagcggcaucgcggugugcaaggugcugcaccucgagggcgaggucaacaagaucaagaacgcccugcuguccaccaacaaggccguggugagccucuccaacggggucagcgugcugaccuucaaggugcuggaccucaagaacuacaucgacaagcagcugcugcccauccucaacaagcaguccugcagcauccccaacaucgagacggucaucgaguuccagcagaagaacaaccggcugcuggagaucacccgcgaguucuccgugaacgccggcgugaccacccccgucagcacguacaugcucaccaacuccgagcugcugagccucaucaacgacaugccgaucaccaacgaccagaagaagcugaugagcaacaacgugcagaucgugcggcagcaguccuacagcaucaugugcaucaucaaggaggagguccuggccuacguggugcagcucccccuguacggggucaucgacacccccugcuggaagcugcacacgagcccccucugcaccaccaacaccaaggagggcuccaacaucugccugacgcgcaccgaccgggggugguacugcgacaacgcgggcuccgugagcuucuucccgcaggccgagaccugcaaggugcaguccaaccgcgucuucugcgacaccaugaacagccugacgcuccccuccgaggugaaccugugcaacaucgacaucuucaaccccaaguacgacugcaagaucaugaccagcaagaccgacgucuccagcuccgugaucaccagccugggcgccaucguguccugcuacgggaagacgaagugcaccgccagcaacaagaaccggggcaucaucaagaccuucuccaacgggugcgacuacgucagcaacaagggcguggacaccguguccgucggcaacacgcucuacugcgugaacaagcaggaggggcagagccuguacgugaagggcgagcccaucaucaacuucuacgacccgcuggucuuccccagcgacgaguucgacgccuccaucagccaggugaacgagaagaucaaccagucccucgcguucauccgcaagagcgacgagcugcugcacaacgugaacgucgggaaguccaccaccaacaucaugaucaccaccaucaucaucgugaucaucgugauccuccugcugcucaucgccgucggccuguuccuguacugcaaggcccggugaggacuaguguccaccugucccuccugggcugcuggauugucucguuuuccugccaaauaaacaggaucagcgcuuuacagaucuaaaaaaaaaaaaaaaaaaaaaaaaaaaaaaaaaaaaaaaaaaaaaaaaaaaaaaaaaaaaaaaaugcaucccccccccccccccccccccccccccccccaaaggcucuuuucagagccaccagaauu

SEQ ID NO: 14488 - RNA, 1856 nt, Artificial Sequence
  mRNA product Design e-2 comprising derived and/or modified sequence from HRSV(Memphis-37)__AIY60640.1__F-del_DSCav1_mut1 (opt2)
gggagacccgugacccggaaguuguacggcuacgcgacuuucccucccacaaacccucgcgcccuuccuuuccuacuugggcccggcagaaagcuuaccauggagcuccccauccucaagaccaacgccaucaccaccauccucgccgccgucacccucugcuucgccuccucccagaacaucaccgaggaguucuaccaguccaccugcuccgccgucuccaagggcuaccucggcgcccuccgcaccggcugguacaccuccgucaucaccaucgagcucuccaacaucaaggagaacaagugcaacggcaccgacgccaaggucaagcucaucaagcaggagcucgacaaguacaagaacgccgucaccgagcuccagcuccucaugcaguccacccccgccgccggcuccggcuccgccaucugcuccggcaucgccgucugcaagguccuccaccucgagggcgaggucaacaagaucaagaacgcccuccucuccaccaacaaggccgucgucucccucuccaacggcgucuccguccucaccuucaagguccucgaccucaagaacuacaucgacaagcagcuccuccccauccucaacaagcaguccugcuccauccccaacaucgagaccgucaucgaguuccagcagaagaacaaccgccuccucgagaucacccgcgaguucuccgucaacgccggcgucaccacccccgucuccaccuacaugcucaccaacuccgagcuccucucccucaucaacgacaugcccaucaccaacgaccagaagaagcucauguccaacaacguccagaucguccgccagcaguccuacuccaucaugugcaucaucaaggaggagguccucgccuacgucguccagcucccccucuacggcgucaucgacacccccugcuggaagcuccacaccuccccccucugcaccaccaacaccaaggagggcuccaacaucugccucacccgcaccgaccgcggcugguacugcgacaacgccggcuccgucuccuucuucccccaggccgagaccugcaagguccaguccaaccgcgucuucugcgacaccaugaacucccucacccuccccuccgaggucaaccucugcaacaucgacaucuucaaccccaaguacgacugcaagaucaugaccuccaagaccgacgucuccuccuccgucaucaccucccucggcgccaucgucuccugcuacggcaagaccaagugcaccgccuccaacaagaaccgcggcaucaucaagaccuucuccaacggcugcgacuacgucuccaacaagggcgucgacaccgucuccgucggcaacacccucuacugcgucaacaagcaggagggccagucccucuacgucaagggcgagcccaucaucaacuucuacgacccccucgucuuccccuccgacgaguucgacgccuccaucucccaggucaacgagaagaucaaccagucccucgccuucauccgcaaguccgacgagcuccuccacaacgucaacgucggcaaguccaccaccaacaucaugaucaccaccaucaucaucgucaucaucgucauccuccuccuccucaucgccgucggccucuuccucuacugcaaggcccgcugaggacuaguguccaccugucccuccugggcugcuggauugucucguuuuccugccaaauaaacaggaucagcgcuuuacagaucuaaaaaaaaaaaaaaaaaaaaaaaaaaaaaaaaaaaaaaaaaaaaaaaaaaaaaaaaaaaaaaaaugcaucccccccccccccccccccccccccccccccaaaggcucuuuucagagccaccagaauu

SEQ ID NO: 14489 - RNA, 1856 nt, Artificial Sequence
  mRNA product Design e-2 comprising derived and/or modified sequence from HRSV(Memphis-37)__AIY60640.1__F-del_DSCav1_mut1 (opt3)
gggagacccgugacccggaaguuguacggcuacgcgacuuucccucccacaaacccucgcgcccuuccuuuccuacuugggcccggcagaaagcuuaccauggagcugcccauccucaagaccaacgccauuacaacuauacuugcugcagugacgcugugcuucgccagcucccagaauaucaccgaagaguuuuaccaaucuacauguucagcggucaguaaaggcuauuugggggcuuuaagaacuggaugguacaccagcguuauuacaaucgaacuguccaacauuaaggagaauaaaugcaacgguaccgacgccaaggugaaacuaaucaagcaggaacucgauaaguauaaaaaugcaguaacugagcugcagcuucugaugcagucuacuccugccgcuggcucggggucagcaauauguagcggaaucgccgugugcaaggucuugcaccucgagggcgaagugaacaaaauuaagaaugcucugcugaguaccaacaaagccguugugucccucucuaauggugucagcguguuaacguucaagguacuggaccuuaagaacuacaucgauaaacaauugcugccaauucuaaauaagcaguccuguucaaucccgaacauagagacuguuauugaauuucagcagaaaaauaacaggcuccuggagaucacccgggaguucagugugaaugcgggggucacaacucccgugagcaccuauaugcuuacaaacucugaacuguugucccucauuaacgacaugccuaucaccaaugaucaaaagaaacugaugucaaacaaugugcagaucguccgccagcagagcuacaguauuaugugcauaaucaaggaggaaguuuuagcauaugugguacaacugccacucuacggagugauugacacgcccuguuggaaacuucauacuucuccucugugcacaaccaacacuaaggagggcuccaauaucuguuugacacgaaccgaucguggcugguacugcgacaacgccgggagcgucucguuuuucccacaggcugaaacguguaaggugcagucuaauagaguguuuugcgauaccaugaacucccuaacacugcccucagagguuaaucucugcaacauagacauuuucaauccuaaauaugauuguaagaucaugacaaguaaaaccgacgucagcuccucugugaucacaagccugggagccauuguaucaugcuacgguaagacuaaauguaccgcaaguaacaagaauaggggcaucauuaagacauuuuccaacgggugcgauuauguuagcaauaaaggaguggacaccgucucugugggcaacacucuuuacugugucaacaagcaagagggucagucacuguaugugaaaggggaaccaauaaucaauuucuacgacccguugguuuuucccagugaugaguucgacgcuagcauuucccaggugaacgaaaagaucaaucagucucucgccuuuauccggaaaucggaugagcuguuacacaacguaaaugucggaaagagcacgacaaacauuaugauaaccacuaucauuaucgugauuaucguuauacugcuacuccugaucgcggugggccuuuucuuguauugcaaggcccgcugaggacuaguguccaccugucccuccugggcugcuggauugucucguuuuccugccaaauaaacaggaucagcgcuuuacagaucuaaaaaaaaaaaaaaaaaaaaaaaaaaaaaaaaaaaaaaaaaaaaaaaaaaaaaaaaaaaaaaaaugcaucccccccccccccccccccccccccccccccaaaggcucuuuucagagccaccagaauu

SEQ ID NO: 14490 - RNA, 1856 nt, Artificial Sequence
  mRNA product Design e-2 comprising derived and/or modified sequence from HRSV(Memphis-37)__AIY60640.1__F-del_DSCav1_mut1 (opt4)
gggagacccgugacccggaaguuguacggcuacgcgacuuucccucccacaaacccucgcgcccuuccuuuccuacuugggcccggcagaaagcuuaccauggagcugcccauccugaagaccaacgccaucaccaccauccuggccgccgugacccugugcuucgccagcagccagaacaucaccgaggaguucuaccagagcaccugcagcgccgugagcaagggcuaccugggcgcccugagaaccggcugguacaccagcgugaucaccaucgagcugagcaacaucaaggagaacaagugcaacggcaccgacgccaaggugaagcugaucaagcaggagcuggacaaguacaagaacgccgugaccgagcugcagcugcugaugcagagcacccccgccgccggcagcggcagcgccaucugcagcggcaucgccgugugcaaggugcugcaccuggagggcgaggugaacaagaucaagaacgcccugcugagcaccaacaaggccguggugagccugagcaacggcgugagcgugcugaccuucaaggugcuggaccugaagaacuacaucgacaagcagcugcugcccauccugaacaagcagagcugcagcauccccaacaucgagaccgugaucgaguuccagcagaagaacaacagacugcuggagaucaccagagaguucagcgugaacgccggcgugaccacccccgugagcaccuacaugcugaccaacagcgagcugcugagccugaucaacgacaugcccaucaccaacgaccagaagaagcugaugagcaacaacgugcagaucgugagacagcagagcuacagcaucaugugcaucaucaaggaggaggugcuggccuacguggugcagcugccccuguacggcgugaucgacacccccugcuggaagcugcacaccagcccccugugcaccaccaacaccaaggagggcagcaacaucugccugaccagaaccgacagaggcugguacugcgacaacgccggcagcgugagcuucuucccccaggccgagaccugcaaggugcagagcaacagaguguucugcgacaccaugaacagccugacccugcccagcgaggugaaccugugcaacaucgacaucuucaaccccaaguacgacugcaagaucaugaccagcaagaccgacgugagcagcagcgugaucaccagccugggcgccaucgugagcugcuacggcaagaccaagugcaccgccagcaacaagaacagaggcaucaucaagaccuucagcaacggcugcgacuacgugagcaacaagggcguggacaccgugagcgugggcaacacccuguacugcgugaacaagcaggagggccagagccuguacgugaagggcgagcccaucaucaacuucuacgacccccugguguuccccagcgacgaguucgacgccagcaucagccaggugaacgagaagaucaaccagagccuggccuucaucagaaagagcgacgagcugcugcacaacgugaacgugggcaagagcaccaccaacaucaugaucaccaccaucaucaucgugaucaucgugauccugcugcugcugaucgccgugggccuguuccuguacugcaaggccagaugaggacuaguguccaccugucccuccugggcugcuggauugucucguuuuccugccaaauaaacaggaucagcgcuuuacagaucuaaaaaaaaaaaaaaaaaaaaaaaaaaaaaaaaaaaaaaaaaaaaaaaaaaaaaaaaaaaaaaaaugcaucccccccccccccccccccccccccccccccaaaggcucuuuucagagccaccagaauu

SEQ ID NO: 14491 - RNA, 1856 nt, Artificial Sequence
  mRNA product Design e-2 comprising derived and/or modified sequence from HRSV(Memphis-37)__AIY60640.1__F-del_DSCav1_mut1 (opt5)
gggagacccgugacccggaaguuguacggcuacgcgacuuucccucccacaaacccucgcgcccuuccuuuccuacuugggcccggcagaaagcuuaccauggagcugcccauccucaagaccaacgccauuacaacgauccuggcugccgugacccuuugcuucgcgagcucccagaauauuacagaagaguuuuaccaaucuaccuguagcgcugucuccaaaggcuaucugggggcccucagaacaggaugguacaccucuguuaucacaauugaacugagcaacaucaaggagaauaaaugcaacggcaccgacgccaaggugaaacuuaucaagcaggaacuggauaaguauaaaaaugcugugacggagcuccagcugcugaugcaguccaccccugccgcugggucuggaagcgccauuuguuccggcaucgcggucugcaaggugcuccaccuggagggggaaguuaacaaaauuaagaaugcccuucugagcacaaacaaagcuguggucucucucuccaauggagugagcguucugaccuucaaggugcuugaccugaagaacuacaucgauaaacaacuccugccgauucugaauaagcagucuuguuccauccccaacauugagacagucaucgaauuucagcagaaaaauaaccggcuccuggagaucacccgcgaguucagcgugaaugccggcgugacgacaccugucucuaccuauaugcuuacaaacuccgaacugcucagccugauuaacgacaugcccaucaccaaugaucaaaagaaacuuauguccaacaauguucagauugugagacagcagucuuacagcaucaugugcauuaucaaggaggaagugcuggcuuaugucgugcaacucccucuguacggcguuaucgacacccccuguuggaaacugcauacauccccucucugcacgaccaacacaaaggaggggagcaauauuugucugacccggacagaucgcggaugguacugcgacaacgccggcucuguguccuuuuucccgcaggcggaaaccuguaagguccagagcaauagaguguuuugcgauacgaugaacucucuuacacugcccagcgagguuaaucucugcaacaucgacauuuucaauccuaaauaugauuguaagaucaugaccuccaaaaccgacgugucuagcuccgucauuacaagccugggggccaucgugucuugcuacggaaagaccaaauguacagcuuccaacaagaaucggggcaucauuaagacguuuagcaacgggugcgauuaugucucuaauaaaggaguggacaccguuuccgugggcaacacacuuuacugugucaacaagcaagagggccagagccuguaugugaaaggggaacccaucauuaauuucuacgacccucucguuuuucccuccgaugaguucgacgccucuaucagccaggugaacgaaaagauuaaucagucccuggcuuuuauccgcaaaucugaugagcugcuccacaacgucaaugugggaaagagcaccacaaacauuaugaucaccacgaucauuaucgugauuaucguuauucugcuucugcucaucgccgucggccuguuccuguauugcaaggccagaugaggacuaguguccaccugucccuccugggcugcuggauugucucguuuuccugccaaauaaacaggaucagcgcuuuacagaucuaaaaaaaaaaaaaaaaaaaaaaaaaaaaaaaaaaaaaaaaaaaaaaaaaaaaaaaaaaaaaaaaugcaucccccccccccccccccccccccccccccccaaaggcucuuuucagagccaccagaauu

SEQ ID NO: 14492 - RNA, 1856 nt, Artificial Sequence
  mRNA product Design e-2 comprising derived and/or modified sequence from HRSV(Memphis-37)__AIY60640.1__F-del_DSCav1_mut1 (opt6)
gggagacccgugacccggaaguuguacggcuacgcgacuuucccucccacaaacccucgcgcccuuccuuuccuacuugggcccggcagaaagcuuaccauggaauuaccaauacuaaaaacaaacgcaauaacaacaauucuagcagcaguaacauuaugcuuugcaucaucccaaaacaucacagaagaauuuuaucaaucaaccugcucagcaguuuccaaaggauacuuaggagcauuaagaacugguugguacacuucaguaaucaccaucgaacucucaaacaucaaggaaaacaaaugcaacggaacagacgcaaaaguuaaacucauaaaacaagaacuugacaaauacaaaaacgccguaacagaacuacaacuucucaugcaaucaacacccgcagcaggauccggaucagccauaugcucaggcauagcaguauguaaaguauuacaucuugaaggugaaguaaacaaaauaaaaaacgcacuucuaucaaccaacaaagcaguaguaucacuaucaaacggaguauccgucuuaacauuuaaaguucuagaccucaaaaacuauauagacaaacaauuacugccaauccucaauaaacaaucaugcucaauaccaaacaucgaaacaguaauagaauuucaacaaaaaaacaacagacuacuagaaauaacaagagaauuuuccgucaacgccggcguaacuacuccaguaucaacauauaugcuaaccaacucagaacuccuaucccucauaaacgacaugccaauaacuaaugaucaaaaaaaacuaaugucaaacaauguacaaauaguuagacaacaaucauacucaaucaugugcauaauaaaagaagaaguacuagcauacgucguccaacuaccccuauacggaguaauagacacaccuugcuggaaacuacacacaucaccccuaugcacaacaaauacaaaagaagguuccaacaucugccuaacaagaacugauagaggaugguacugcgacaacgccggaucaguaucauucuucccucaagcugaaaccugcaaaguacaaucaaacagaguauuuugcgauacaaugaacucccuaacacuucccucagaaguuaaucuuuguaauauagauauauucaacccaaaauacgacugcaaaauaaugacaaguaaaacagacguauccucaucuguaauuacaucacuaggagccauaguaucuugcuacggcaaaaccaaaugcacagcaucaaacaaaaacagagguauuaucaaaaccuucucaaacggaugugacuacguuucaaacaaaggaguagacacaguaucagucggaaacacccuauacuguguuaacaaacaagaaggacaaucacuguacguaaaaggagaacccauaauaaauuucuacgacccacuuguauuuccaucagacgaauuugaugcaucaaucucacaaguaaaugaaaaaauaaaccaaucauuagcauucauaagaaaaucugacgaguuacuacacaacguaaauguuggcaaaucaacaaccaauauaaugauaacaacaauaauaauaguaauaauagucauauuacuccuccucauagccgucggauuauucuuauacugcaaagcaagauaaggacuaguguccaccugucccuccugggcugcuggauugucucguuuuccugccaaauaaacaggaucagcgcuuuacagaucuaaaaaaaaaaaaaaaaaaaaaaaaaaaaaaaaaaaaaaaaaaaaaaaaaaaaaaaaaaaaaaaaugcaucccccccccccccccccccccccccccccccaaaggcucuuuucagagccaccagaauu

SEQ ID NO: 14493 - RNA, 1856 nt, Artificial Sequence
  mRNA product Design e-2 comprising derived and/or modified sequence from HRSV(Memphis-37)__AIY60640.1__F-del_DSCav1_mut1 (opt11)
gggagacccgugacccggaaguuguacggcuacgcgacuuucccucccacaaacccucgcgcccuuccuuuccuacuugggcccggcagaaagcuuaccauggaacuccccauacuaaaaaccaacgccaucacaacaauccucgccgccgucacacucugcuucgccagcucccaaaacaucaccgaagaguucuaucaaucaaccugcuccgcagucucaaagggauaccucggagcccuccgcaccggaugguacacuuccgucaucacaauagaacucuccaacaucaaagaaaacaaaugcaacggcaccgacgcaaaagucaagcucaucaaacaagaacucgacaaauauaaaaacgccgucaccgaacuccaacuacucaugcaauccacacccgcggccggcucaggcagcgccaucugcucaggcaucgccgucugcaaaguccuccaccucgaaggcgaagucaacaaaaucaaaaacgcccuucuuucaaccaacaaggcaguaguaucccucucaaacggcgucagcguccugaccuucaaaguccuagaccucaaaaacuacauagauaaacaacuccuccccauacugaacaaacaaucgugcuccauccccaauaucgaaaccgucauagaguuccagcagaaaaacaacagacuucucgaaauaacccgagaguucucaguaaacgccggagucaccacacccguaagcaccuacaugcucacaaacucagaacuccuaucccucaucaacgacaugcccaucaccaacgaccagaaaaagcuaauguccaacaacguccaaauaguacgccaacaaagcuacucgauaaugugcaucaucaaggaagaaguacucgccuacgucguccaacucccccucuacggcguaaucgacacacccugcuggaaacuccacacguccccacucugcacaacaaacacaaaagaaggauccaacauaugccuaacccgcaccgacaggggcugguacugcgacaacgcaggcucagucagcuucuuuccccaagccgaaacaugcaaaguccaauccaaccgugucuucugcgacaccaugaacucgcucacccuacccucggaagucaaucucugcaacaucgacaucuucaacccaaaauacgacuguaaaaucaugaccagcaaaacagacguuucuuccagcgucaucacaucacucggcgcgaucguaucaugcuauggcaaaacaaagugcaccgcuagcaauaaaaaccgaggaaucauaaaaaccuucagcaacggcugcgacuacguauccaacaaaggcgucgacaccguauccgucggaaacacccucuacugcgucaacaagcaagaaggacaaucacucuacgucaaaggcgaaccaaucauaaacuucuacgacccacucguauuccccucagacgaguucgacgcauccaucucccaagucaacgaaaagaucaaccaaucucucgccuuuauacgcaaaagcgacgaacuccuucacaacguaaacgucggcaaaagcaccacuaacauaaugaucaccacaaucauaauaguaaucaucguaauacuccuccuacucaucgccgugggccuauuccucuauugcaaagcccgauaaggacuaguguccaccugucccuccugggcugcuggauugucucguuuuccugccaaauaaacaggaucagcgcuuuacagaucuaaaaaaaaaaaaaaaaaaaaaaaaaaaaaaaaaaaaaaaaaaaaaaaaaaaaaaaaaaaaaaaaugcaucccccccccccccccccccccccccccccccaaaggcucuuuucagagccaccagaauu

SEQ ID NO: 14494 - RNA, 1826 nt, Artificial Sequence
  mRNA product Design e-3 comprising derived and/or modified sequence from HRSV(Memphis-37)__AIY60640.1__F-del_DSCav1_mut1 (opt1)
gggagacuuucccauucuguagcagaauuugguguugccuguggucuuggucccgcggagaagcuuaccauggagcugcccauccucaagaccaacgccaucaccacgauccuggccgcggugacccugugcuucgccagcucccagaacaucaccgaggaguucuaccagagcacgugcuccgccgucagcaagggcuaccucggcgcccugcgcaccgggugguacaccagcgugaucaccaucgagcuguccaacaucaaggagaacaagugcaacggcaccgacgccaaggugaagcucaucaagcaggagcuggacaaguacaagaacgcggucacggagcugcagcuccugaugcagagcaccccggccgccggcuccgggagcgcgaucugcuccggcaucgccgucugcaaggugcugcaccucgagggcgaggugaacaagaucaagaacgcccugcuguccaccaacaaggccgucgugagccucuccaacggggugagcguccugaccuucaaggugcuggaccucaagaacuacaucgacaagcagcugcugcccauccugaacaagcagagcugcuccauccccaacaucgagaccgucaucgaguuccagcagaagaacaaccgccuccuggagaucacgcgggaguucagcgugaacgcgggcgugaccacccccgucuccaccuacaugcugacgaacagcgagcuccugucccugaucaacgacaugccgaucaccaacgaccagaagaagcucaugagcaacaacgugcagaucgugcgccagcaguccuacagcaucaugugcaucaucaaggaggagguccuggccuacguggugcagcugccccucuacggggucaucgacacccccugcuggaagcugcacaccagcccccugugcacgaccaacaccaaggagggcuccaacaucugccucacccggacggaccgcgggugguacugcgacaacgccggcagcguguccuucuucccgcaggccgagaccugcaagguccagagcaaccggguguucugcgacaccaugaacucccugacccugcccagcgaggugaaccucugcaacaucgacaucuucaaccccaaguacgacugcaagaucaugacguccaagaccgacgucagcuccagcgugaucaccucccugggcgccaucgugagcugcuacgggaagaccaagugcacggcgagcaacaagaaccgcggcaucaucaagaccuucuccaacgggugcgacuacgucagcaacaagggcguggacaccguguccgucggcaacacccuguacugcgugaacaagcaggagggccagagccucuacgugaagggggagcccaucaucaacuucuacgacccgcuggucuuccccuccgacgaguucgacgccagcaucucccaggugaacgagaagaucaaccagagccuggccuucauccggaaguccgacgagcuccugcacaacgugaacgucggcaagagcaccacgaacaucaugaucaccaccaucaucaucgugaucaucgugauccugcugcuccugaucgccgucgggcuguuccucuacugcaaggcccgcugaggacuaguguccaccugucccuccugggcugcuggauugucucguuuuccugccaaauaaacaggaucagcgcuuuacagaucuaaaaaaaaaaaaaaaaaaaaaaaaaaaaaaaaaaaaaaaaaaaaaaaaaaaaaaaaaaaaaaaaugcaucccccccccccccccccccccccccccccccaaaggcucuuuucagagccaccagaauu

SEQ ID NO: 14495 - RNA, 1826 nt, Artificial Sequence
  mRNA product Design e-3 comprising derived and/or modified sequence from HRSV(Memphis-37)__AIY60640.1__F-del_DSCav1_mut1 (opt1)
gggagacuuucccauucuguagcagaauuugguguugccuguggucuuggucccgcggagaagcuuaccauggagcugcccauccucaagaccaacgccaucaccacgauccuggccgcggugacccugugcuucgccagcucccagaacaucaccgaggaguucuaccagagcacgugcuccgccgucagcaagggcuaccucggggcccugcgcaccggcugguacaccuccgugaucaccaucgagcugagcaacaucaaggagaacaagugcaacgggaccgacgccaaggugaagcucaucaagcaggagcuggacaaguacaagaacgcggucacggagcugcagcuccugaugcaguccaccccggccgccggcagcggguccgccaucugcagcggcaucgcggugugcaaggugcugcaccucgagggcgaggucaacaagaucaagaacgcccugcuguccaccaacaaggccguggugagccucuccaacggggucagcgugcugaccuucaaggugcuggaccucaagaacuacaucgacaagcagcugcugcccauccucaacaagcaguccugcagcauccccaacaucgagacggucaucgaguuccagcagaagaacaaccggcugcuggagaucacccgcgaguucuccgugaacgccggcgugaccacccccgucagcacguacaugcucaccaacuccgagcugcugagccucaucaacgacaugccgaucaccaacgaccagaagaagcugaugagcaacaacgugcagaucgugcggcagcaguccuacagcaucaugugcaucaucaaggaggagguccuggccuacguggugcagcucccccuguacggggucaucgacacccccugcuggaagcugcacacgagcccccucugcaccaccaacaccaaggagggcuccaacaucugccugacgcgcaccgaccgggggugguacugcgacaacgcgggcuccgugagcuucuucccgcaggccgagaccugcaaggugcaguccaaccgcgucuucugcgacaccaugaacagccugacgcuccccuccgaggugaaccugugcaacaucgacaucuucaaccccaaguacgacugcaagaucaugaccagcaagaccgacgucuccagcuccgugaucaccagccugggcgccaucguguccugcuacgggaagacgaagugcaccgccagcaacaagaaccggggcaucaucaagaccuucuccaacgggugcgacuacgucagcaacaagggcguggacaccguguccgucggcaacacgcucuacugcgugaacaagcaggaggggcagagccuguacgugaagggcgagcccaucaucaacuucuacgacccgcuggucuuccccagcgacgaguucgacgccuccaucagccaggugaacgagaagaucaaccagucccucgcguucauccgcaagagcgacgagcugcugcacaacgugaacgucgggaaguccaccaccaacaucaugaucaccaccaucaucaucgugaucaucgugauccuccugcugcucaucgccgucggccuguuccuguacugcaaggcccggugaggacuaguguccaccugucccuccugggcugcuggauugucucguuuuccugccaaauaaacaggaucagcgcuuuacagaucuaaaaaaaaaaaaaaaaaaaaaaaaaaaaaaaaaaaaaaaaaaaaaaaaaaaaaaaaaaaaaaaaugcaucccccccccccccccccccccccccccccccaaaggcucuuuucagagccaccagaauu

SEQ ID NO: 14496 - RNA, 1826 nt, Artificial Sequence
  mRNA product Design e-3 comprising derived and/or modified sequence from HRSV(Memphis-37)__AIY60640.1__F-del_DSCav1_mut1 (opt2)
gggagacuuucccauucuguagcagaauuugguguugccuguggucuuggucccgcggagaagcuuaccauggagcuccccauccucaagaccaacgccaucaccaccauccucgccgccgucacccucugcuucgccuccucccagaacaucaccgaggaguucuaccaguccaccugcuccgccgucuccaagggcuaccucggcgcccuccgcaccggcugguacaccuccgucaucaccaucgagcucuccaacaucaaggagaacaagugcaacggcaccgacgccaaggucaagcucaucaagcaggagcucgacaaguacaagaacgccgucaccgagcuccagcuccucaugcaguccacccccgccgccggcuccggcuccgccaucugcuccggcaucgccgucugcaagguccuccaccucgagggcgaggucaacaagaucaagaacgcccuccucuccaccaacaaggccgucgucucccucuccaacggcgucuccguccucaccuucaagguccucgaccucaagaacuacaucgacaagcagcuccuccccauccucaacaagcaguccugcuccauccccaacaucgagaccgucaucgaguuccagcagaagaacaaccgccuccucgagaucacccgcgaguucuccgucaacgccggcgucaccacccccgucuccaccuacaugcucaccaacuccgagcuccucucccucaucaacgacaugcccaucaccaacgaccagaagaagcucauguccaacaacguccagaucguccgccagcaguccuacuccaucaugugcaucaucaaggaggagguccucgccuacgucguccagcucccccucuacggcgucaucgacacccccugcuggaagcuccacaccuccccccucugcaccaccaacaccaaggagggcuccaacaucugccucacccgcaccgaccgcggcugguacugcgacaacgccggcuccgucuccuucuucccccaggccgagaccugcaagguccaguccaaccgcgucuucugcgacaccaugaacucccucacccuccccuccgaggucaaccucugcaacaucgacaucuucaaccccaaguacgacugcaagaucaugaccuccaagaccgacgucuccuccuccgucaucaccucccucggcgccaucgucuccugcuacggcaagaccaagugcaccgccuccaacaagaaccgcggcaucaucaagaccuucuccaacggcugcgacuacgucuccaacaagggcgucgacaccgucuccgucggcaacacccucuacugcgucaacaagcaggagggccagucccucuacgucaagggcgagcccaucaucaacuucuacgacccccucgucuuccccuccgacgaguucgacgccuccaucucccaggucaacgagaagaucaaccagucccucgccuucauccgcaaguccgacgagcuccuccacaacgucaacgucggcaaguccaccaccaacaucaugaucaccaccaucaucaucgucaucaucgucauccuccuccuccucaucgccgucggccucuuccucuacugcaaggcccgcugaggacuaguguccaccugucccuccugggcugcuggauugucucguuuuccugccaaauaaacaggaucagcgcuuuacagaucuaaaaaaaaaaaaaaaaaaaaaaaaaaaaaaaaaaaaaaaaaaaaaaaaaaaaaaaaaaaaaaaaugcaucccccccccccccccccccccccccccccccaaaggcucuuuucagagccaccagaauu

SEQ ID NO: 14497 - RNA, 1826 nt, Artificial Sequence
  mRNA product Design e-3 comprising derived and/or modified sequence from HRSV(Memphis-37)__AIY60640.1__F-del_DSCav1_mut1 (opt3)
gggagacuuucccauucuguagcagaauuugguguugccuguggucuuggucccgcggagaagcuuaccauggagcugcccauccucaagaccaacgccauuacaacuauacuugcugcagugacgcugugcuucgccagcucccagaauaucaccgaagaguuuuaccaaucuacauguucagcggucaguaaaggcuauuugggggcuuuaagaacuggaugguacaccagcguuauuacaaucgaacuguccaacauuaaggagaauaaaugcaacgguaccgacgccaaggugaaacuaaucaagcaggaacucgauaaguauaaaaaugcaguaacugagcugcagcuucugaugcagucuacuccugccgcuggcucggggucagcaauauguagcggaaucgccgugugcaaggucuugcaccucgagggcgaagugaacaaaauuaagaaugcucugcugaguaccaacaaagccguugugucccucucuaauggugucagcguguuaacguucaagguacuggaccuuaagaacuacaucgauaaacaauugcugccaauucuaaauaagcaguccuguucaaucccgaacauagagacuguuauugaauuucagcagaaaaauaacaggcuccuggagaucacccgggaguucagugugaaugcgggggucacaacucccgugagcaccuauaugcuuacaaacucugaacuguugucccucauuaacgacaugccuaucaccaaugaucaaaagaaacugaugucaaacaaugugcagaucguccgccagcagagcuacaguauuaugugcauaaucaaggaggaaguuuuagcauaugugguacaacugccacucuacggagugauugacacgcccuguuggaaacuucauacuucuccucugugcacaaccaacacuaaggagggcuccaauaucuguuugacacgaaccgaucguggcugguacugcgacaacgccgggagcgucucguuuuucccacaggcugaaacguguaaggugcagucuaauagaguguuuugcgauaccaugaacucccuaacacugcccucagagguuaaucucugcaacauagacauuuucaauccuaaauaugauuguaagaucaugacaaguaaaaccgacgucagcuccucugugaucacaagccugggagccauuguaucaugcuacgguaagacuaaauguaccgcaaguaacaagaauaggggcaucauuaagacauuuuccaacgggugcgauuauguuagcaauaaaggaguggacaccgucucugugggcaacacucuuuacugugucaacaagcaagagggucagucacuguaugugaaaggggaaccaauaaucaauuucuacgacccguugguuuuucccagugaugaguucgacgcuagcauuucccaggugaacgaaaagaucaaucagucucucgccuuuauccggaaaucggaugagcuguuacacaacguaaaugucggaaagagcacgacaaacauuaugauaaccacuaucauuaucgugauuaucguuauacugcuacuccugaucgcggugggccuuuucuuguauugcaaggcccgcugaggacuaguguccaccugucccuccugggcugcuggauugucucguuuuccugccaaauaaacaggaucagcgcuuuacagaucuaaaaaaaaaaaaaaaaaaaaaaaaaaaaaaaaaaaaaaaaaaaaaaaaaaaaaaaaaaaaaaaaugcaucccccccccccccccccccccccccccccccaaaggcucuuuucagagccaccagaauu

SEQ ID NO: 14498 - RNA, 1826 nt, Artificial Sequence
  mRNA product Design e-3 comprising derived and/or modified sequence from HRSV(Memphis-37)__AIY60640.1__F-del_DSCav1_mut1 (opt4)
gggagacuuucccauucuguagcagaauuugguguugccuguggucuuggucccgcggagaagcuuaccauggagcugcccauccugaagaccaacgccaucaccaccauccuggccgccgugacccugugcuucgccagcagccagaacaucaccgaggaguucuaccagagcaccugcagcgccgugagcaagggcuaccugggcgcccugagaaccggcugguacaccagcgugaucaccaucgagcugagcaacaucaaggagaacaagugcaacggcaccgacgccaaggugaagcugaucaagcaggagcuggacaaguacaagaacgccgugaccgagcugcagcugcugaugcagagcacccccgccgccggcagcggcagcgccaucugcagcggcaucgccgugugcaaggugcugcaccuggagggcgaggugaacaagaucaagaacgcccugcugagcaccaacaaggccguggugagccugagcaacggcgugagcgugcugaccuucaaggugcuggaccugaagaacuacaucgacaagcagcugcugcccauccugaacaagcagagcugcagcauccccaacaucgagaccgugaucgaguuccagcagaagaacaacagacugcuggagaucaccagagaguucagcgugaacgccggcgugaccacccccgugagcaccuacaugcugaccaacagcgagcugcugagccugaucaacgacaugcccaucaccaacgaccagaagaagcugaugagcaacaacgugcagaucgugagacagcagagcuacagcaucaugugcaucaucaaggaggaggugcuggccuacguggugcagcugccccuguacggcgugaucgacacccccugcuggaagcugcacaccagcccccugugcaccaccaacaccaaggagggcagcaacaucugccugaccagaaccgacagaggcugguacugcgacaacgccggcagcgugagcuucuucccccaggccgagaccugcaaggugcagagcaacagaguguucugcgacaccaugaacagccugacccugcccagcgaggugaaccugugcaacaucgacaucuucaaccccaaguacgacugcaagaucaugaccagcaagaccgacgugagcagcagcgugaucaccagccugggcgccaucgugagcugcuacggcaagaccaagugcaccgccagcaacaagaacagaggcaucaucaagaccuucagcaacggcugcgacuacgugagcaacaagggcguggacaccgugagcgugggcaacacccuguacugcgugaacaagcaggagggccagagccuguacgugaagggcgagcccaucaucaacuucuacgacccccugguguuccccagcgacgaguucgacgccagcaucagccaggugaacgagaagaucaaccagagccuggccuucaucagaaagagcgacgagcugcugcacaacgugaacgugggcaagagcaccaccaacaucaugaucaccaccaucaucaucgugaucaucgugauccugcugcugcugaucgccgugggccuguuccuguacugcaaggccagaugaggacuaguguccaccugucccuccugggcugcuggauugucucguuuuccugccaaauaaacaggaucagcgcuuuacagaucuaaaaaaaaaaaaaaaaaaaaaaaaaaaaaaaaaaaaaaaaaaaaaaaaaaaaaaaaaaaaaaaaugcaucccccccccccccccccccccccccccccccaaaggcucuuuucagagccaccagaauu

SEQ ID NO: 14499 - RNA, 1826 nt, Artificial Sequence
  mRNA product Design e-3 comprising derived and/or modified sequence from HRSV(Memphis-37)__AIY60640.1__F-del_DSCav1_mut1 (opt5)
gggagacuuucccauucuguagcagaauuugguguugccuguggucuuggucccgcggagaagcuuaccauggagcugcccauccucaagaccaacgccauuacaacgauccuggcugccgugacccuuugcuucgcgagcucccagaauauuacagaagaguuuuaccaaucuaccuguagcgcugucuccaaaggcuaucugggggcccucagaacaggaugguacaccucuguuaucacaauugaacugagcaacaucaaggagaauaaaugcaacggcaccgacgccaaggugaaacuuaucaagcaggaacuggauaaguauaaaaaugcugugacggagcuccagcugcugaugcaguccaccccugccgcugggucuggaagcgccauuuguuccggcaucgcggucugcaaggugcuccaccuggagggggaaguuaacaaaauuaagaaugcccuucugagcacaaacaaagcuguggucucucucuccaauggagugagcguucugaccuucaaggugcuugaccugaagaacuacaucgauaaacaacuccugccgauucugaauaagcagucuuguuccauccccaacauugagacagucaucgaauuucagcagaaaaauaaccggcuccuggagaucacccgcgaguucagcgugaaugccggcgugacgacaccugucucuaccuauaugcuuacaaacuccgaacugcucagccugauuaacgacaugcccaucaccaaugaucaaaagaaacuuauguccaacaauguucagauugugagacagcagucuuacagcaucaugugcauuaucaaggaggaagugcuggcuuaugucgugcaacucccucuguacggcguuaucgacacccccuguuggaaacugcauacauccccucucugcacgaccaacacaaaggaggggagcaauauuugucugacccggacagaucgcggaugguacugcgacaacgccggcucuguguccuuuuucccgcaggcggaaaccuguaagguccagagcaauagaguguuuugcgauacgaugaacucucuuacacugcccagcgagguuaaucucugcaacaucgacauuuucaauccuaaauaugauuguaagaucaugaccuccaaaaccgacgugucuagcuccgucauuacaagccugggggccaucgugucuugcuacggaaagaccaaauguacagcuuccaacaagaaucggggcaucauuaagacguuuagcaacgggugcgauuaugucucuaauaaaggaguggacaccguuuccgugggcaacacacuuuacugugucaacaagcaagagggccagagccuguaugugaaaggggaacccaucauuaauuucuacgacccucucguuuuucccuccgaugaguucgacgccucuaucagccaggugaacgaaaagauuaaucagucccuggcuuuuauccgcaaaucugaugagcugcuccacaacgucaaugugggaaagagcaccacaaacauuaugaucaccacgaucauuaucgugauuaucguuauucugcuucugcucaucgccgucggccuguuccuguauugcaaggccagaugaggacuaguguccaccugucccuccugggcugcuggauugucucguuuuccugccaaauaaacaggaucagcgcuuuacagaucuaaaaaaaaaaaaaaaaaaaaaaaaaaaaaaaaaaaaaaaaaaaaaaaaaaaaaaaaaaaaaaaaugcaucccccccccccccccccccccccccccccccaaaggcucuuuucagagccaccagaauu

SEQ ID NO: 14500 - RNA, 1826 nt, Artificial Sequence
  mRNA product Design e-3 comprising derived and/or modified sequence from HRSV(Memphis-37)__AIY60640.1__F-del_DSCav1_mut1 (opt6)
gggagacuuucccauucuguagcagaauuugguguugccuguggucuuggucccgcggagaagcuuaccauggaauuaccaauacuaaaaacaaacgcaauaacaacaauucuagcagcaguaacauuaugcuuugcaucaucccaaaacaucacagaagaauuuuaucaaucaaccugcucagcaguuuccaaaggauacuuaggagcauuaagaacugguugguacacuucaguaaucaccaucgaacucucaaacaucaaggaaaacaaaugcaacggaacagacgcaaaaguuaaacucauaaaacaagaacuugacaaauacaaaaacgccguaacagaacuacaacuucucaugcaaucaacacccgcagcaggauccggaucagccauaugcucaggcauagcaguauguaaaguauuacaucuugaaggugaaguaaacaaaauaaaaaacgcacuucuaucaaccaacaaagcaguaguaucacuaucaaacggaguauccgucuuaacauuuaaaguucuagaccucaaaaacuauauagacaaacaauuacugccaauccucaauaaacaaucaugcucaauaccaaacaucgaaacaguaauagaauuucaacaaaaaaacaacagacuacuagaaauaacaagagaauuuuccgucaacgccggcguaacuacuccaguaucaacauauaugcuaaccaacucagaacuccuaucccucauaaacgacaugccaauaacuaaugaucaaaaaaaacuaaugucaaacaauguacaaauaguuagacaacaaucauacucaaucaugugcauaauaaaagaagaaguacuagcauacgucguccaacuaccccuauacggaguaauagacacaccuugcuggaaacuacacacaucaccccuaugcacaacaaauacaaaagaagguuccaacaucugccuaacaagaacugauagaggaugguacugcgacaacgccggaucaguaucauucuucccucaagcugaaaccugcaaaguacaaucaaacagaguauuuugcgauacaaugaacucccuaacacuucccucagaaguuaaucuuuguaauauagauauauucaacccaaaauacgacugcaaaauaaugacaaguaaaacagacguauccucaucuguaauuacaucacuaggagccauaguaucuugcuacggcaaaaccaaaugcacagcaucaaacaaaaacagagguauuaucaaaaccuucucaaacggaugugacuacguuucaaacaaaggaguagacacaguaucagucggaaacacccuauacuguguuaacaaacaagaaggacaaucacuguacguaaaaggagaacccauaauaaauuucuacgacccacuuguauuuccaucagacgaauuugaugcaucaaucucacaaguaaaugaaaaaauaaaccaaucauuagcauucauaagaaaaucugacgaguuacuacacaacguaaauguuggcaaaucaacaaccaauauaaugauaacaacaauaauaauaguaauaauagucauauuacuccuccucauagccgucggauuauucuuauacugcaaagcaagauaaggacuaguguccaccugucccuccugggcugcuggauugucucguuuuccugccaaauaaacaggaucagcgcuuuacagaucuaaaaaaaaaaaaaaaaaaaaaaaaaaaaaaaaaaaaaaaaaaaaaaaaaaaaaaaaaaaaaaaaugcaucccccccccccccccccccccccccccccccaaaggcucuuuucagagccaccagaauu

SEQ ID NO: 14501 - RNA, 1826 nt, Artificial Sequence
  mRNA product Design e-3 comprising derived and/or modified sequence from HRSV(Memphis-37)__AIY60640.1__F-del_DSCav1_mut1 (opt11)
gggagacuuucccauucuguagcagaauuugguguugccuguggucuuggucccgcggagaagcuuaccauggaacuccccauacuaaaaaccaacgccaucacaacaauccucgccgccgucacacucugcuucgccagcucccaaaacaucaccgaagaguucuaucaaucaaccugcuccgcagucucaaagggauaccucggagcccuccgcaccggaugguacacuuccgucaucacaauagaacucuccaacaucaaagaaaacaaaugcaacggcaccgacgcaaaagucaagcucaucaaacaagaacucgacaaauauaaaaacgccgucaccgaacuccaacuacucaugcaauccacacccgcggccggcucaggcagcgccaucugcucaggcaucgccgucugcaaaguccuccaccucgaaggcgaagucaacaaaaucaaaaacgcccuucuuucaaccaacaaggcaguaguaucccucucaaacggcgucagcguccugaccuucaaaguccuagaccucaaaaacuacauagauaaacaacuccuccccauacugaacaaacaaucgugcuccauccccaauaucgaaaccgucauagaguuccagcagaaaaacaacagacuucucgaaauaacccgagaguucucaguaaacgccggagucaccacacccguaagcaccuacaugcucacaaacucagaacuccuaucccucaucaacgacaugcccaucaccaacgaccagaaaaagcuaauguccaacaacguccaaauaguacgccaacaaagcuacucgauaaugugcaucaucaaggaagaaguacucgccuacgucguccaacucccccucuacggcguaaucgacacacccugcuggaaacuccacacguccccacucugcacaacaaacacaaaagaaggauccaacauaugccuaacccgcaccgacaggggcugguacugcgacaacgcaggcucagucagcuucuuuccccaagccgaaacaugcaaaguccaauccaaccgugucuucugcgacaccaugaacucgcucacccuacccucggaagucaaucucugcaacaucgacaucuucaacccaaaauacgacuguaaaaucaugaccagcaaaacagacguuucuuccagcgucaucacaucacucggcgcgaucguaucaugcuauggcaaaacaaagugcaccgcuagcaauaaaaaccgaggaaucauaaaaaccuucagcaacggcugcgacuacguauccaacaaaggcgucgacaccguauccgucggaaacacccucuacugcgucaacaagcaagaaggacaaucacucuacgucaaaggcgaaccaaucauaaacuucuacgacccacucguauuccccucagacgaguucgacgcauccaucucccaagucaacgaaaagaucaaccaaucucucgccuuuauacgcaaaagcgacgaacuccuucacaacguaaacgucggcaaaagcaccacuaacauaaugaucaccacaaucauaauaguaaucaucguaauacuccuccuacucaucgccgugggccuauuccucuauugcaaagcccgauaaggacuaguguccaccugucccuccugggcugcuggauugucucguuuuccugccaaauaaacaggaucagcgcuuuacagaucuaaaaaaaaaaaaaaaaaaaaaaaaaaaaaaaaaaaaaaaaaaaaaaaaaaaaaaaaaaaaaaaaugcaucccccccccccccccccccccccccccccccaaaggcucuuuucagagccaccagaauu

SEQ ID NO: 14502 - RNA, 1880 nt, Artificial Sequence
  mRNA product Design e-4 comprising derived and/or modified sequence from HRSV(Memphis-37)__AIY60640.1__F-del_DSCav1_mut1 (opt1)
gggagacuccugucgggcggaaguaggaggaguagaguuuaaaaacaguacucuuuuuccgguucgggacguaguugaagcaacgacaagccggauaaccgcucuugagacaggaagcuuaccauggagcugcccauccucaagaccaacgccaucaccacgauccuggccgcggugacccugugcuucgccagcucccagaacaucaccgaggaguucuaccagagcacgugcuccgccgucagcaagggcuaccucggcgcccugcgcaccgggugguacaccagcgugaucaccaucgagcuguccaacaucaaggagaacaagugcaacggcaccgacgccaaggugaagcucaucaagcaggagcuggacaaguacaagaacgcggucacggagcugcagcuccugaugcagagcaccccggccgccggcuccgggagcgcgaucugcuccggcaucgccgucugcaaggugcugcaccucgagggcgaggugaacaagaucaagaacgcccugcuguccaccaacaaggccgucgugagccucuccaacggggugagcguccugaccuucaaggugcuggaccucaagaacuacaucgacaagcagcugcugcccauccugaacaagcagagcugcuccauccccaacaucgagaccgucaucgaguuccagcagaagaacaaccgccuccuggagaucacgcgggaguucagcgugaacgcgggcgugaccacccccgucuccaccuacaugcugacgaacagcgagcuccugucccugaucaacgacaugccgaucaccaacgaccagaagaagcucaugagcaacaacgugcagaucgugcgccagcaguccuacagcaucaugugcaucaucaaggaggagguccuggccuacguggugcagcugccccucuacggggucaucgacacccccugcuggaagcugcacaccagcccccugugcacgaccaacaccaaggagggcuccaacaucugccucacccggacggaccgcgggugguacugcgacaacgccggcagcguguccuucuucccgcaggccgagaccugcaagguccagagcaaccggguguucugcgacaccaugaacucccugacccugcccagcgaggugaaccucugcaacaucgacaucuucaaccccaaguacgacugcaagaucaugacguccaagaccgacgucagcuccagcgugaucaccucccugggcgccaucgugagcugcuacgggaagaccaagugcacggcgagcaacaagaaccgcggcaucaucaagaccuucuccaacgggugcgacuacgucagcaacaagggcguggacaccguguccgucggcaacacccuguacugcgugaacaagcaggagggccagagccucuacgugaagggggagcccaucaucaacuucuacgacccgcuggucuuccccuccgacgaguucgacgccagcaucucccaggugaacgagaagaucaaccagagccuggccuucauccggaaguccgacgagcuccugcacaacgugaacgucggcaagagcaccacgaacaucaugaucaccaccaucaucaucgugaucaucgugauccugcugcuccugaucgccgucgggcuguuccucuacugcaaggcccgcugaggacuaguguccaccugucccuccugggcugcuggauugucucguuuuccugccaaauaaacaggaucagcgcuuuacagaucuaaaaaaaaaaaaaaaaaaaaaaaaaaaaaaaaaaaaaaaaaaaaaaaaaaaaaaaaaaaaaaaaugcaucccccccccccccccccccccccccccccccaaaggcucuuuucagagccaccagaauu

SEQ ID NO: 14503 - RNA, 1880 nt, Artificial Sequence
  mRNA product Design e-4 comprising derived and/or modified sequence from HRSV(Memphis-37)__AIY60640.1__F-del_DSCav1_mut1 (opt1)
gggagacuccugucgggcggaaguaggaggaguagaguuuaaaaacaguacucuuuuuccgguucgggacguaguugaagcaacgacaagccggauaaccgcucuugagacaggaagcuuaccauggagcugcccauccucaagaccaacgccaucaccacgauccuggccgcggugacccugugcuucgccagcucccagaacaucaccgaggaguucuaccagagcacgugcuccgccgucagcaagggcuaccucggggcccugcgcaccggcugguacaccuccgugaucaccaucgagcugagcaacaucaaggagaacaagugcaacgggaccgacgccaaggugaagcucaucaagcaggagcuggacaaguacaagaacgcggucacggagcugcagcuccugaugcaguccaccccggccgccggcagcggguccgccaucugcagcggcaucgcggugugcaaggugcugcaccucgagggcgaggucaacaagaucaagaacgcccugcuguccaccaacaaggccguggugagccucuccaacggggucagcgugcugaccuucaaggugcuggaccucaagaacuacaucgacaagcagcugcugcccauccucaacaagcaguccugcagcauccccaacaucgagacggucaucgaguuccagcagaagaacaaccggcugcuggagaucacccgcgaguucuccgugaacgccggcgugaccacccccgucagcacguacaugcucaccaacuccgagcugcugagccucaucaacgacaugccgaucaccaacgaccagaagaagcugaugagcaacaacgugcagaucgugcggcagcaguccuacagcaucaugugcaucaucaaggaggagguccuggccuacguggugcagcucccccuguacggggucaucgacacccccugcuggaagcugcacacgagcccccucugcaccaccaacaccaaggagggcuccaacaucugccugacgcgcaccgaccgggggugguacugcgacaacgcgggcuccgugagcuucuucccgcaggccgagaccugcaaggugcaguccaaccgcgucuucugcgacaccaugaacagccugacgcuccccuccgaggugaaccugugcaacaucgacaucuucaaccccaaguacgacugcaagaucaugaccagcaagaccgacgucuccagcuccgugaucaccagccugggcgccaucguguccugcuacgggaagacgaagugcaccgccagcaacaagaaccggggcaucaucaagaccuucuccaacgggugcgacuacgucagcaacaagggcguggacaccguguccgucggcaacacgcucuacugcgugaacaagcaggaggggcagagccuguacgugaagggcgagcccaucaucaacuucuacgacccgcuggucuuccccagcgacgaguucgacgccuccaucagccaggugaacgagaagaucaaccagucccucgcguucauccgcaagagcgacgagcugcugcacaacgugaacgucgggaaguccaccaccaacaucaugaucaccaccaucaucaucgugaucaucgugauccuccugcugcucaucgccgucggccuguuccuguacugcaaggcccggugaggacuaguguccaccugucccuccugggcugcuggauugucucguuuuccugccaaauaaacaggaucagcgcuuuacagaucuaaaaaaaaaaaaaaaaaaaaaaaaaaaaaaaaaaaaaaaaaaaaaaaaaaaaaaaaaaaaaaaaugcaucccccccccccccccccccccccccccccccaaaggcucuuuucagagccaccagaauu

SEQ ID NO: 14504 - RNA, 1880 nt, Artificial Sequence
  mRNA product Design e-4 comprising derived and/or modified sequence from HRSV(Memphis-37)__AIY60640.1__F-del_DSCav1_mut1 (opt2)
gggagacuccugucgggcggaaguaggaggaguagaguuuaaaaacaguacucuuuuuccgguucgggacguaguugaagcaacgacaagccggauaaccgcucuugagacaggaagcuuaccauggagcuccccauccucaagaccaacgccaucaccaccauccucgccgccgucacccucugcuucgccuccucccagaacaucaccgaggaguucuaccaguccaccugcuccgccgucuccaagggcuaccucggcgcccuccgcaccggcugguacaccuccgucaucaccaucgagcucuccaacaucaaggagaacaagugcaacggcaccgacgccaaggucaagcucaucaagcaggagcucgacaaguacaagaacgccgucaccgagcuccagcuccucaugcaguccacccccgccgccggcuccggcuccgccaucugcuccggcaucgccgucugcaagguccuccaccucgagggcgaggucaacaagaucaagaacgcccuccucuccaccaacaaggccgucgucucccucuccaacggcgucuccguccucaccuucaagguccucgaccucaagaacuacaucgacaagcagcuccuccccauccucaacaagcaguccugcuccauccccaacaucgagaccgucaucgaguuccagcagaagaacaaccgccuccucgagaucacccgcgaguucuccgucaacgccggcgucaccacccccgucuccaccuacaugcucaccaacuccgagcuccucucccucaucaacgacaugcccaucaccaacgaccagaagaagcucauguccaacaacguccagaucguccgccagcaguccuacuccaucaugugcaucaucaaggaggagguccucgccuacgucguccagcucccccucuacggcgucaucgacacccccugcuggaagcuccacaccuccccccucugcaccaccaacaccaaggagggcuccaacaucugccucacccgcaccgaccgcggcugguacugcgacaacgccggcuccgucuccuucuucccccaggccgagaccugcaagguccaguccaaccgcgucuucugcgacaccaugaacucccucacccuccccuccgaggucaaccucugcaacaucgacaucuucaaccccaaguacgacugcaagaucaugaccuccaagaccgacgucuccuccuccgucaucaccucccucggcgccaucgucuccugcuacggcaagaccaagugcaccgccuccaacaagaaccgcggcaucaucaagaccuucuccaacggcugcgacuacgucuccaacaagggcgucgacaccgucuccgucggcaacacccucuacugcgucaacaagcaggagggccagucccucuacgucaagggcgagcccaucaucaacuucuacgacccccucgucuuccccuccgacgaguucgacgccuccaucucccaggucaacgagaagaucaaccagucccucgccuucauccgcaaguccgacgagcuccuccacaacgucaacgucggcaaguccaccaccaacaucaugaucaccaccaucaucaucgucaucaucgucauccuccuccuccucaucgccgucggccucuuccucuacugcaaggcccgcugaggacuaguguccaccugucccuccugggcugcuggauugucucguuuuccugccaaauaaacaggaucagcgcuuuacagaucuaaaaaaaaaaaaaaaaaaaaaaaaaaaaaaaaaaaaaaaaaaaaaaaaaaaaaaaaaaaaaaaaugcaucccccccccccccccccccccccccccccccaaaggcucuuuucagagccaccagaauu

SEQ ID NO: 14505 - RNA, 1880 nt, Artificial Sequence
  mRNA product Design e-4 comprising derived and/or modified sequence from HRSV(Memphis-37)__AIY60640.1__F-del_DSCav1_mut1 (opt3)
gggagacuccugucgggcggaaguaggaggaguagaguuuaaaaacaguacucuuuuuccgguucgggacguaguugaagcaacgacaagccggauaaccgcucuugagacaggaagcuuaccauggagcugcccauccucaagaccaacgccauuacaacuauacuugcugcagugacgcugugcuucgccagcucccagaauaucaccgaagaguuuuaccaaucuacauguucagcggucaguaaaggcuauuugggggcuuuaagaacuggaugguacaccagcguuauuacaaucgaacuguccaacauuaaggagaauaaaugcaacgguaccgacgccaaggugaaacuaaucaagcaggaacucgauaaguauaaaaaugcaguaacugagcugcagcuucugaugcagucuacuccugccgcuggcucggggucagcaauauguagcggaaucgccgugugcaaggucuugcaccucgagggcgaagugaacaaaauuaagaaugcucugcugaguaccaacaaagccguugugucccucucuaauggugucagcguguuaacguucaagguacuggaccuuaagaacuacaucgauaaacaauugcugccaauucuaaauaagcaguccuguucaaucccgaacauagagacuguuauugaauuucagcagaaaaauaacaggcuccuggagaucacccgggaguucagugugaaugcgggggucacaacucccgugagcaccuauaugcuuacaaacucugaacuguugucccucauuaacgacaugccuaucaccaaugaucaaaagaaacugaugucaaacaaugugcagaucguccgccagcagagcuacaguauuaugugcauaaucaaggaggaaguuuuagcauaugugguacaacugccacucuacggagugauugacacgcccuguuggaaacuucauacuucuccucugugcacaaccaacacuaaggagggcuccaauaucuguuugacacgaaccgaucguggcugguacugcgacaacgccgggagcgucucguuuuucccacaggcugaaacguguaaggugcagucuaauagaguguuuugcgauaccaugaacucccuaacacugcccucagagguuaaucucugcaacauagacauuuucaauccuaaauaugauuguaagaucaugacaaguaaaaccgacgucagcuccucugugaucacaagccugggagccauuguaucaugcuacgguaagacuaaauguaccgcaaguaacaagaauaggggcaucauuaagacauuuuccaacgggugcgauuauguuagcaauaaaggaguggacaccgucucugugggcaacacucuuuacugugucaacaagcaagagggucagucacuguaugugaaaggggaaccaauaaucaauuucuacgacccguugguuuuucccagugaugaguucgacgcuagcauuucccaggugaacgaaaagaucaaucagucucucgccuuuauccggaaaucggaugagcuguuacacaacguaaaugucggaaagagcacgacaaacauuaugauaaccacuaucauuaucgugauuaucguuauacugcuacuccugaucgcggugggccuuuucuuguauugcaaggcccgcugaggacuaguguccaccugucccuccugggcugcuggauugucucguuuuccugccaaauaaacaggaucagcgcuuuacagaucuaaaaaaaaaaaaaaaaaaaaaaaaaaaaaaaaaaaaaaaaaaaaaaaaaaaaaaaaaaaaaaaaugcaucccccccccccccccccccccccccccccccaaaggcucuuuucagagccaccagaauu

SEQ ID NO: 14506 - RNA, 1880 nt, Artificial Sequence
  mRNA product Design e-4 comprising derived and/or modified sequence from HRSV(Memphis-37)__AIY60640.1__F-del_DSCav1_mut1 (opt4)
gggagacuccugucgggcggaaguaggaggaguagaguuuaaaaacaguacucuuuuuccgguucgggacguaguugaagcaacgacaagccggauaaccgcucuugagacaggaagcuuaccauggagcugcccauccugaagaccaacgccaucaccaccauccuggccgccgugacccugugcuucgccagcagccagaacaucaccgaggaguucuaccagagcaccugcagcgccgugagcaagggcuaccugggcgcccugagaaccggcugguacaccagcgugaucaccaucgagcugagcaacaucaaggagaacaagugcaacggcaccgacgccaaggugaagcugaucaagcaggagcuggacaaguacaagaacgccgugaccgagcugcagcugcugaugcagagcacccccgccgccggcagcggcagcgccaucugcagcggcaucgccgugugcaaggugcugcaccuggagggcgaggugaacaagaucaagaacgcccugcugagcaccaacaaggccguggugagccugagcaacggcgugagcgugcugaccuucaaggugcuggaccugaagaacuacaucgacaagcagcugcugcccauccugaacaagcagagcugcagcauccccaacaucgagaccgugaucgaguuccagcagaagaacaacagacugcuggagaucaccagagaguucagcgugaacgccggcgugaccacccccgugagcaccuacaugcugaccaacagcgagcugcugagccugaucaacgacaugcccaucaccaacgaccagaagaagcugaugagcaacaacgugcagaucgugagacagcagagcuacagcaucaugugcaucaucaaggaggaggugcuggccuacguggugcagcugccccuguacggcgugaucgacacccccugcuggaagcugcacaccagcccccugugcaccaccaacaccaaggagggcagcaacaucugccugaccagaaccgacagaggcugguacugcgacaacgccggcagcgugagcuucuucccccaggccgagaccugcaaggugcagagcaacagaguguucugcgacaccaugaacagccugacccugcccagcgaggugaaccugugcaacaucgacaucuucaaccccaaguacgacugcaagaucaugaccagcaagaccgacgugagcagcagcgugaucaccagccugggcgccaucgugagcugcuacggcaagaccaagugcaccgccagcaacaagaacagaggcaucaucaagaccuucagcaacggcugcgacuacgugagcaacaagggcguggacaccgugagcgugggcaacacccuguacugcgugaacaagcaggagggccagagccuguacgugaagggcgagcccaucaucaacuucuacgacccccugguguuccccagcgacgaguucgacgccagcaucagccaggugaacgagaagaucaaccagagccuggccuucaucagaaagagcgacgagcugcugcacaacgugaacgugggcaagagcaccaccaacaucaugaucaccaccaucaucaucgugaucaucgugauccugcugcugcugaucgccgugggccuguuccuguacugcaaggccagaugaggacuaguguccaccugucccuccugggcugcuggauugucucguuuuccugccaaauaaacaggaucagcgcuuuacagaucuaaaaaaaaaaaaaaaaaaaaaaaaaaaaaaaaaaaaaaaaaaaaaaaaaaaaaaaaaaaaaaaaugcaucccccccccccccccccccccccccccccccaaaggcucuuuucagagccaccagaauu

SEQ ID NO: 14507 - RNA, 1880 nt, Artificial Sequence
  mRNA product Design e-4 comprising derived and/or modified sequence from HRSV(Memphis-37)__AIY60640.1__F-del_DSCav1_mut1 (opt5)
gggagacuccugucgggcggaaguaggaggaguagaguuuaaaaacaguacucuuuuuccgguucgggacguaguugaagcaacgacaagccggauaaccgcucuugagacaggaagcuuaccauggagcugcccauccucaagaccaacgccauuacaacgauccuggcugccgugacccuuugcuucgcgagcucccagaauauuacagaagaguuuuaccaaucuaccuguagcgcugucuccaaaggcuaucugggggcccucagaacaggaugguacaccucuguuaucacaauugaacugagcaacaucaaggagaauaaaugcaacggcaccgacgccaaggugaaacuuaucaagcaggaacuggauaaguauaaaaaugcugugacggagcuccagcugcugaugcaguccaccccugccgcugggucuggaagcgccauuuguuccggcaucgcggucugcaaggugcuccaccuggagggggaaguuaacaaaauuaagaaugcccuucugagcacaaacaaagcuguggucucucucuccaauggagugagcguucugaccuucaaggugcuugaccugaagaacuacaucgauaaacaacuccugccgauucugaauaagcagucuuguuccauccccaacauugagacagucaucgaauuucagcagaaaaauaaccggcuccuggagaucacccgcgaguucagcgugaaugccggcgugacgacaccugucucuaccuauaugcuuacaaacuccgaacugcucagccugauuaacgacaugcccaucaccaaugaucaaaagaaacuuauguccaacaauguucagauugugagacagcagucuuacagcaucaugugcauuaucaaggaggaagugcuggcuuaugucgugcaacucccucuguacggcguuaucgacacccccuguuggaaacugcauacauccccucucugcacgaccaacacaaaggaggggagcaauauuugucugacccggacagaucgcggaugguacugcgacaacgccggcucuguguccuuuuucccgcaggcggaaaccuguaagguccagagcaauagaguguuuugcgauacgaugaacucucuuacacugcccagcgagguuaaucucugcaacaucgacauuuucaauccuaaauaugauuguaagaucaugaccuccaaaaccgacgugucuagcuccgucauuacaagccugggggccaucgugucuugcuacggaaagaccaaauguacagcuuccaacaagaaucggggcaucauuaagacguuuagcaacgggugcgauuaugucucuaauaaaggaguggacaccguuuccgugggcaacacacuuuacugugucaacaagcaagagggccagagccuguaugugaaaggggaacccaucauuaauuucuacgacccucucguuuuucccuccgaugaguucgacgccucuaucagccaggugaacgaaaagauuaaucagucccuggcuuuuauccgcaaaucugaugagcugcuccacaacgucaaugugggaaagagcaccacaaacauuaugaucaccacgaucauuaucgugauuaucguuauucugcuucugcucaucgccgucggccuguuccuguauugcaaggccagaugaggacuaguguccaccugucccuccugggcugcuggauugucucguuuuccugccaaauaaacaggaucagcgcuuuacagaucuaaaaaaaaaaaaaaaaaaaaaaaaaaaaaaaaaaaaaaaaaaaaaaaaaaaaaaaaaaaaaaaaugcaucccccccccccccccccccccccccccccccaaaggcucuuuucagagccaccagaauu

SEQ ID NO: 14508 - RNA, 1880 nt, Artificial Sequence
  mRNA product Design e-4 comprising derived and/or modified sequence from HRSV(Memphis-37)__AIY60640.1__F-del_DSCav1_mut1 (opt6)
gggagacuccugucgggcggaaguaggaggaguagaguuuaaaaacaguacucuuuuuccgguucgggacguaguugaagcaacgacaagccggauaaccgcucuugagacaggaagcuuaccauggaauuaccaauacuaaaaacaaacgcaauaacaacaauucuagcagcaguaacauuaugcuuugcaucaucccaaaacaucacagaagaauuuuaucaaucaaccugcucagcaguuuccaaaggauacuuaggagcauuaagaacugguugguacacuucaguaaucaccaucgaacucucaaacaucaaggaaaacaaaugcaacggaacagacgcaaaaguuaaacucauaaaacaagaacuugacaaauacaaaaacgccguaacagaacuacaacuucucaugcaaucaacacccgcagcaggauccggaucagccauaugcucaggcauagcaguauguaaaguauuacaucuugaaggugaaguaaacaaaauaaaaaacgcacuucuaucaaccaacaaagcaguaguaucacuaucaaacggaguauccgucuuaacauuuaaaguucuagaccucaaaaacuauauagacaaacaauuacugccaauccucaauaaacaaucaugcucaauaccaaacaucgaaacaguaauagaauuucaacaaaaaaacaacagacuacuagaaauaacaagagaauuuuccgucaacgccggcguaacuacuccaguaucaacauauaugcuaaccaacucagaacuccuaucccucauaaacgacaugccaauaacuaaugaucaaaaaaaacuaaugucaaacaauguacaaauaguuagacaacaaucauacucaaucaugugcauaauaaaagaagaaguacuagcauacgucguccaacuaccccuauacggaguaauagacacaccuugcuggaaacuacacacaucaccccuaugcacaacaaauacaaaagaagguuccaacaucugccuaacaagaacugauagaggaugguacugcgacaacgccggaucaguaucauucuucccucaagcugaaaccugcaaaguacaaucaaacagaguauuuugcgauacaaugaacucccuaacacuucccucagaaguuaaucuuuguaauauagauauauucaacccaaaauacgacugcaaaauaaugacaaguaaaacagacguauccucaucuguaauuacaucacuaggagccauaguaucuugcuacggcaaaaccaaaugcacagcaucaaacaaaaacagagguauuaucaaaaccuucucaaacggaugugacuacguuucaaacaaaggaguagacacaguaucagucggaaacacccuauacuguguuaacaaacaagaaggacaaucacuguacguaaaaggagaacccauaauaaauuucuacgacccacuuguauuuccaucagacgaauuugaugcaucaaucucacaaguaaaugaaaaaauaaaccaaucauuagcauucauaagaaaaucugacgaguuacuacacaacguaaauguuggcaaaucaacaaccaauauaaugauaacaacaauaauaauaguaauaauagucauauuacuccuccucauagccgucggauuauucuuauacugcaaagcaagauaaggacuaguguccaccugucccuccugggcugcuggauugucucguuuuccugccaaauaaacaggaucagcgcuuuacagaucuaaaaaaaaaaaaaaaaaaaaaaaaaaaaaaaaaaaaaaaaaaaaaaaaaaaaaaaaaaaaaaaaugcaucccccccccccccccccccccccccccccccaaaggcucuuuucagagccaccagaauu

SEQ ID NO: 14509 - RNA, 1880 nt, Artificial Sequence
  mRNA product Design e-4 comprising derived and/or modified sequence from HRSV(Memphis-37)__AIY60640.1__F-del_DSCav1_mut1 (opt11)
gggagacuccugucgggcggaaguaggaggaguagaguuuaaaaacaguacucuuuuuccgguucgggacguaguugaagcaacgacaagccggauaaccgcucuugagacaggaagcuuaccauggaacuccccauacuaaaaaccaacgccaucacaacaauccucgccgccgucacacucugcuucgccagcucccaaaacaucaccgaagaguucuaucaaucaaccugcuccgcagucucaaagggauaccucggagcccuccgcaccggaugguacacuuccgucaucacaauagaacucuccaacaucaaagaaaacaaaugcaacggcaccgacgcaaaagucaagcucaucaaacaagaacucgacaaauauaaaaacgccgucaccgaacuccaacuacucaugcaauccacacccgcggccggcucaggcagcgccaucugcucaggcaucgccgucugcaaaguccuccaccucgaaggcgaagucaacaaaaucaaaaacgcccuucuuucaaccaacaaggcaguaguaucccucucaaacggcgucagcguccugaccuucaaaguccuagaccucaaaaacuacauagauaaacaacuccuccccauacugaacaaacaaucgugcuccauccccaauaucgaaaccgucauagaguuccagcagaaaaacaacagacuucucgaaauaacccgagaguucucaguaaacgccggagucaccacacccguaagcaccuacaugcucacaaacucagaacuccuaucccucaucaacgacaugcccaucaccaacgaccagaaaaagcuaauguccaacaacguccaaauaguacgccaacaaagcuacucgauaaugugcaucaucaaggaagaaguacucgccuacgucguccaacucccccucuacggcguaaucgacacacccugcuggaaacuccacacguccccacucugcacaacaaacacaaaagaaggauccaacauaugccuaacccgcaccgacaggggcugguacugcgacaacgcaggcucagucagcuucuuuccccaagccgaaacaugcaaaguccaauccaaccgugucuucugcgacaccaugaacucgcucacccuacccucggaagucaaucucugcaacaucgacaucuucaacccaaaauacgacuguaaaaucaugaccagcaaaacagacguuucuuccagcgucaucacaucacucggcgcgaucguaucaugcuauggcaaaacaaagugcaccgcuagcaauaaaaaccgaggaaucauaaaaaccuucagcaacggcugcgacuacguauccaacaaaggcgucgacaccguauccgucggaaacacccucuacugcgucaacaagcaagaaggacaaucacucuacgucaaaggcgaaccaaucauaaacuucuacgacccacucguauuccccucagacgaguucgacgcauccaucucccaagucaacgaaaagaucaaccaaucucucgccuuuauacgcaaaagcgacgaacuccuucacaacguaaacgucggcaaaagcaccacuaacauaaugaucaccacaaucauaauaguaaucaucguaauacuccuccuacucaucgccgugggccuauuccucuauugcaaagcccgauaaggacuaguguccaccugucccuccugggcugcuggauugucucguuuuccugccaaauaaacaggaucagcgcuuuacagaucuaaaaaaaaaaaaaaaaaaaaaaaaaaaaaaaaaaaaaaaaaaaaaaaaaaaaaaaaaaaaaaaaugcaucccccccccccccccccccccccccccccccaaaggcucuuuucagagccaccagaauu

SEQ ID NO: 14510 - RNA, 1847 nt, Artificial Sequence
  mRNA product Design e-5 comprising derived and/or modified sequence from HRSV(Memphis-37)__AIY60640.1__F-del_DSCav1_mut1 (opt1)
gggagagcggcucggccauuuugucccagucaguccggaggcugcggcugcagaaguaccgccugcggaguaacugcaaagaagcuuaccauggagcugcccauccucaagaccaacgccaucaccacgauccuggccgcggugacccugugcuucgccagcucccagaacaucaccgaggaguucuaccagagcacgugcuccgccgucagcaagggcuaccucggcgcccugcgcaccgggugguacaccagcgugaucaccaucgagcuguccaacaucaaggagaacaagugcaacggcaccgacgccaaggugaagcucaucaagcaggagcuggacaaguacaagaacgcggucacggagcugcagcuccugaugcagagcaccccggccgccggcuccgggagcgcgaucugcuccggcaucgccgucugcaaggugcugcaccucgagggcgaggugaacaagaucaagaacgcccugcuguccaccaacaaggccgucgugagccucuccaacggggugagcguccugaccuucaaggugcuggaccucaagaacuacaucgacaagcagcugcugcccauccugaacaagcagagcugcuccauccccaacaucgagaccgucaucgaguuccagcagaagaacaaccgccuccuggagaucacgcgggaguucagcgugaacgcgggcgugaccacccccgucuccaccuacaugcugacgaacagcgagcuccugucccugaucaacgacaugccgaucaccaacgaccagaagaagcucaugagcaacaacgugcagaucgugcgccagcaguccuacagcaucaugugcaucaucaaggaggagguccuggccuacguggugcagcugccccucuacggggucaucgacacccccugcuggaagcugcacaccagcccccugugcacgaccaacaccaaggagggcuccaacaucugccucacccggacggaccgcgggugguacugcgacaacgccggcagcguguccuucuucccgcaggccgagaccugcaagguccagagcaaccggguguucugcgacaccaugaacucccugacccugcccagcgaggugaaccucugcaacaucgacaucuucaaccccaaguacgacugcaagaucaugacguccaagaccgacgucagcuccagcgugaucaccucccugggcgccaucgugagcugcuacgggaagaccaagugcacggcgagcaacaagaaccgcggcaucaucaagaccuucuccaacgggugcgacuacgucagcaacaagggcguggacaccguguccgucggcaacacccuguacugcgugaacaagcaggagggccagagccucuacgugaagggggagcccaucaucaacuucuacgacccgcuggucuuccccuccgacgaguucgacgccagcaucucccaggugaacgagaagaucaaccagagccuggccuucauccggaaguccgacgagcuccugcacaacgugaacgucggcaagagcaccacgaacaucaugaucaccaccaucaucaucgugaucaucgugauccugcugcuccugaucgccgucgggcuguuccucuacugcaaggcccgcugaggacuaguguccaccugucccuccugggcugcuggauugucucguuuuccugccaaauaaacaggaucagcgcuuuacagaucuaaaaaaaaaaaaaaaaaaaaaaaaaaaaaaaaaaaaaaaaaaaaaaaaaaaaaaaaaaaaaaaaugcaucccccccccccccccccccccccccccccccaaaggcucuuuucagagccaccagaauu

SEQ ID NO: 14511 - RNA, 1847 nt, Artificial Sequence
  mRNA product Design e-5 comprising derived and/or modified sequence from HRSV(Memphis-37)__AIY60640.1__F-del_DSCav1_mut1 (opt1)
gggagagcggcucggccauuuugucccagucaguccggaggcugcggcugcagaaguaccgccugcggaguaacugcaaagaagcuuaccauggagcugcccauccucaagaccaacgccaucaccacgauccuggccgcggugacccugugcuucgccagcucccagaacaucaccgaggaguucuaccagagcacgugcuccgccgucagcaagggcuaccucggggcccugcgcaccggcugguacaccuccgugaucaccaucgagcugagcaacaucaaggagaacaagugcaacgggaccgacgccaaggugaagcucaucaagcaggagcuggacaaguacaagaacgcggucacggagcugcagcuccugaugcaguccaccccggccgccggcagcggguccgccaucugcagcggcaucgcggugugcaaggugcugcaccucgagggcgaggucaacaagaucaagaacgcccugcuguccaccaacaaggccguggugagccucuccaacggggucagcgugcugaccuucaaggugcuggaccucaagaacuacaucgacaagcagcugcugcccauccucaacaagcaguccugcagcauccccaacaucgagacggucaucgaguuccagcagaagaacaaccggcugcuggagaucacccgcgaguucuccgugaacgccggcgugaccacccccgucagcacguacaugcucaccaacuccgagcugcugagccucaucaacgacaugccgaucaccaacgaccagaagaagcugaugagcaacaacgugcagaucgugcggcagcaguccuacagcaucaugugcaucaucaaggaggagguccuggccuacguggugcagcucccccuguacggggucaucgacacccccugcuggaagcugcacacgagcccccucugcaccaccaacaccaaggagggcuccaacaucugccugacgcgcaccgaccgggggugguacugcgacaacgcgggcuccgugagcuucuucccgcaggccgagaccugcaaggugcaguccaaccgcgucuucugcgacaccaugaacagccugacgcuccccuccgaggugaaccugugcaacaucgacaucuucaaccccaaguacgacugcaagaucaugaccagcaagaccgacgucuccagcuccgugaucaccagccugggcgccaucguguccugcuacgggaagacgaagugcaccgccagcaacaagaaccggggcaucaucaagaccuucuccaacgggugcgacuacgucagcaacaagggcguggacaccguguccgucggcaacacgcucuacugcgugaacaagcaggaggggcagagccuguacgugaagggcgagcccaucaucaacuucuacgacccgcuggucuuccccagcgacgaguucgacgccuccaucagccaggugaacgagaagaucaaccagucccucgcguucauccgcaagagcgacgagcugcugcacaacgugaacgucgggaaguccaccaccaacaucaugaucaccaccaucaucaucgugaucaucgugauccuccugcugcucaucgccgucggccuguuccuguacugcaaggcccggugaggacuaguguccaccugucccuccugggcugcuggauugucucguuuuccugccaaauaaacaggaucagcgcuuuacagaucuaaaaaaaaaaaaaaaaaaaaaaaaaaaaaaaaaaaaaaaaaaaaaaaaaaaaaaaaaaaaaaaaugcaucccccccccccccccccccccccccccccccaaaggcucuuuucagagccaccagaauu

SEQ ID NO: 14512 - RNA, 1847 nt, Artificial Sequence
  mRNA product Design e-5 comprising derived and/or modified sequence from HRSV(Memphis-37)__AIY60640.1__F-del_DSCav1_mut1 (opt2)
gggagagcggcucggccauuuugucccagucaguccggaggcugcggcugcagaaguaccgccugcggaguaacugcaaagaagcuuaccauggagcuccccauccucaagaccaacgccaucaccaccauccucgccgccgucacccucugcuucgccuccucccagaacaucaccgaggaguucuaccaguccaccugcuccgccgucuccaagggcuaccucggcgcccuccgcaccggcugguacaccuccgucaucaccaucgagcucuccaacaucaaggagaacaagugcaacggcaccgacgccaaggucaagcucaucaagcaggagcucgacaaguacaagaacgccgucaccgagcuccagcuccucaugcaguccacccccgccgccggcuccggcuccgccaucugcuccggcaucgccgucugcaagguccuccaccucgagggcgaggucaacaagaucaagaacgcccuccucuccaccaacaaggccgucgucucccucuccaacggcgucuccguccucaccuucaagguccucgaccucaagaacuacaucgacaagcagcuccuccccauccucaacaagcaguccugcuccauccccaacaucgagaccgucaucgaguuccagcagaagaacaaccgccuccucgagaucacccgcgaguucuccgucaacgccggcgucaccacccccgucuccaccuacaugcucaccaacuccgagcuccucucccucaucaacgacaugcccaucaccaacgaccagaagaagcucauguccaacaacguccagaucguccgccagcaguccuacuccaucaugugcaucaucaaggaggagguccucgccuacgucguccagcucccccucuacggcgucaucgacacccccugcuggaagcuccacaccuccccccucugcaccaccaacaccaaggagggcuccaacaucugccucacccgcaccgaccgcggcugguacugcgacaacgccggcuccgucuccuucuucccccaggccgagaccugcaagguccaguccaaccgcgucuucugcgacaccaugaacucccucacccuccccuccgaggucaaccucugcaacaucgacaucuucaaccccaaguacgacugcaagaucaugaccuccaagaccgacgucuccuccuccgucaucaccucccucggcgccaucgucuccugcuacggcaagaccaagugcaccgccuccaacaagaaccgcggcaucaucaagaccuucuccaacggcugcgacuacgucuccaacaagggcgucgacaccgucuccgucggcaacacccucuacugcgucaacaagcaggagggccagucccucuacgucaagggcgagcccaucaucaacuucuacgacccccucgucuuccccuccgacgaguucgacgccuccaucucccaggucaacgagaagaucaaccagucccucgccuucauccgcaaguccgacgagcuccuccacaacgucaacgucggcaaguccaccaccaacaucaugaucaccaccaucaucaucgucaucaucgucauccuccuccuccucaucgccgucggccucuuccucuacugcaaggcccgcugaggacuaguguccaccugucccuccugggcugcuggauugucucguuuuccugccaaauaaacaggaucagcgcuuuacagaucuaaaaaaaaaaaaaaaaaaaaaaaaaaaaaaaaaaaaaaaaaaaaaaaaaaaaaaaaaaaaaaaaugcaucccccccccccccccccccccccccccccccaaaggcucuuuucagagccaccagaauu

SEQ ID NO: 14513 - RNA, 1847 nt, Artificial Sequence
  mRNA product Design e-5 comprising derived and/or modified sequence from HRSV(Memphis-37)__AIY60640.1__F-del_DSCav1_mut1 (opt3)
gggagagcggcucggccauuuugucccagucaguccggaggcugcggcugcagaaguaccgccugcggaguaacugcaaagaagcuuaccauggagcugcccauccucaagaccaacgccauuacaacuauacuugcugcagugacgcugugcuucgccagcucccagaauaucaccgaagaguuuuaccaaucuacauguucagcggucaguaaaggcuauuugggggcuuuaagaacuggaugguacaccagcguuauuacaaucgaacuguccaacauuaaggagaauaaaugcaacgguaccgacgccaaggugaaacuaaucaagcaggaacucgauaaguauaaaaaugcaguaacugagcugcagcuucugaugcagucuacuccugccgcuggcucggggucagcaauauguagcggaaucgccgugugcaaggucuugcaccucgagggcgaagugaacaaaauuaagaaugcucugcugaguaccaacaaagccguugugucccucucuaauggugucagcguguuaacguucaagguacuggaccuuaagaacuacaucgauaaacaauugcugccaauucuaaauaagcaguccuguucaaucccgaacauagagacuguuauugaauuucagcagaaaaauaacaggcuccuggagaucacccgggaguucagugugaaugcgggggucacaacucccgugagcaccuauaugcuuacaaacucugaacuguugucccucauuaacgacaugccuaucaccaaugaucaaaagaaacugaugucaaacaaugugcagaucguccgccagcagagcuacaguauuaugugcauaaucaaggaggaaguuuuagcauaugugguacaacugccacucuacggagugauugacacgcccuguuggaaacuucauacuucuccucugugcacaaccaacacuaaggagggcuccaauaucuguuugacacgaaccgaucguggcugguacugcgacaacgccgggagcgucucguuuuucccacaggcugaaacguguaaggugcagucuaauagaguguuuugcgauaccaugaacucccuaacacugcccucagagguuaaucucugcaacauagacauuuucaauccuaaauaugauuguaagaucaugacaaguaaaaccgacgucagcuccucugugaucacaagccugggagccauuguaucaugcuacgguaagacuaaauguaccgcaaguaacaagaauaggggcaucauuaagacauuuuccaacgggugcgauuauguuagcaauaaaggaguggacaccgucucugugggcaacacucuuuacugugucaacaagcaagagggucagucacuguaugugaaaggggaaccaauaaucaauuucuacgacccguugguuuuucccagugaugaguucgacgcuagcauuucccaggugaacgaaaagaucaaucagucucucgccuuuauccggaaaucggaugagcuguuacacaacguaaaugucggaaagagcacgacaaacauuaugauaaccacuaucauuaucgugauuaucguuauacugcuacuccugaucgcggugggccuuuucuuguauugcaaggcccgcugaggacuaguguccaccugucccuccugggcugcuggauugucucguuuuccugccaaauaaacaggaucagcgcuuuacagaucuaaaaaaaaaaaaaaaaaaaaaaaaaaaaaaaaaaaaaaaaaaaaaaaaaaaaaaaaaaaaaaaaugcaucccccccccccccccccccccccccccccccaaaggcucuuuucagagccaccagaauu

SEQ ID NO: 14514 - RNA, 1847 nt, Artificial Sequence
  mRNA product Design e-5 comprising derived and/or modified sequence from HRSV(Memphis-37)__AIY60640.1__F-del_DSCav1_mut1 (opt4)
gggagagcggcucggccauuuugucccagucaguccggaggcugcggcugcagaaguaccgccugcggaguaacugcaaagaagcuuaccauggagcugcccauccugaagaccaacgccaucaccaccauccuggccgccgugacccugugcuucgccagcagccagaacaucaccgaggaguucuaccagagcaccugcagcgccgugagcaagggcuaccugggcgcccugagaaccggcugguacaccagcgugaucaccaucgagcugagcaacaucaaggagaacaagugcaacggcaccgacgccaaggugaagcugaucaagcaggagcuggacaaguacaagaacgccgugaccgagcugcagcugcugaugcagagcacccccgccgccggcagcggcagcgccaucugcagcggcaucgccgugugcaaggugcugcaccuggagggcgaggugaacaagaucaagaacgcccugcugagcaccaacaaggccguggugagccugagcaacggcgugagcgugcugaccuucaaggugcuggaccugaagaacuacaucgacaagcagcugcugcccauccugaacaagcagagcugcagcauccccaacaucgagaccgugaucgaguuccagcagaagaacaacagacugcuggagaucaccagagaguucagcgugaacgccggcgugaccacccccgugagcaccuacaugcugaccaacagcgagcugcugagccugaucaacgacaugcccaucaccaacgaccagaagaagcugaugagcaacaacgugcagaucgugagacagcagagcuacagcaucaugugcaucaucaaggaggaggugcuggccuacguggugcagcugccccuguacggcgugaucgacacccccugcuggaagcugcacaccagcccccugugcaccaccaacaccaaggagggcagcaacaucugccugaccagaaccgacagaggcugguacugcgacaacgccggcagcgugagcuucuucccccaggccgagaccugcaaggugcagagcaacagaguguucugcgacaccaugaacagccugacccugcccagcgaggugaaccugugcaacaucgacaucuucaaccccaaguacgacugcaagaucaugaccagcaagaccgacgugagcagcagcgugaucaccagccugggcgccaucgugagcugcuacggcaagaccaagugcaccgccagcaacaagaacagaggcaucaucaagaccuucagcaacggcugcgacuacgugagcaacaagggcguggacaccgugagcgugggcaacacccuguacugcgugaacaagcaggagggccagagccuguacgugaagggcgagcccaucaucaacuucuacgacccccugguguuccccagcgacgaguucgacgccagcaucagccaggugaacgagaagaucaaccagagccuggccuucaucagaaagagcgacgagcugcugcacaacgugaacgugggcaagagcaccaccaacaucaugaucaccaccaucaucaucgugaucaucgugauccugcugcugcugaucgccgugggccuguuccuguacugcaaggccagaugaggacuaguguccaccugucccuccugggcugcuggauugucucguuuuccugccaaauaaacaggaucagcgcuuuacagaucuaaaaaaaaaaaaaaaaaaaaaaaaaaaaaaaaaaaaaaaaaaaaaaaaaaaaaaaaaaaaaaaaugcaucccccccccccccccccccccccccccccccaaaggcucuuuucagagccaccagaauu

SEQ ID NO: 14515 - RNA, 1847 nt, Artificial Sequence
  mRNA product Design e-5 comprising derived and/or modified sequence from HRSV(Memphis-37)__AIY60640.1__F-del_DSCav1_mut1 (opt5)
gggagagcggcucggccauuuugucccagucaguccggaggcugcggcugcagaaguaccgccugcggaguaacugcaaagaagcuuaccauggagcugcccauccucaagaccaacgccauuacaacgauccuggcugccgugacccuuugcuucgcgagcucccagaauauuacagaagaguuuuaccaaucuaccuguagcgcugucuccaaaggcuaucugggggcccucagaacaggaugguacaccucuguuaucacaauugaacugagcaacaucaaggagaauaaaugcaacggcaccgacgccaaggugaaacuuaucaagcaggaacuggauaaguauaaaaaugcugugacggagcuccagcugcugaugcaguccaccccugccgcugggucuggaagcgccauuuguuccggcaucgcggucugcaaggugcuccaccuggagggggaaguuaacaaaauuaagaaugcccuucugagcacaaacaaagcuguggucucucucuccaauggagugagcguucugaccuucaaggugcuugaccugaagaacuacaucgauaaacaacuccugccgauucugaauaagcagucuuguuccauccccaacauugagacagucaucgaauuucagcagaaaaauaaccggcuccuggagaucacccgcgaguucagcgugaaugccggcgugacgacaccugucucuaccuauaugcuuacaaacuccgaacugcucagccugauuaacgacaugcccaucaccaaugaucaaaagaaacuuauguccaacaauguucagauugugagacagcagucuuacagcaucaugugcauuaucaaggaggaagugcuggcuuaugucgugcaacucccucuguacggcguuaucgacacccccuguuggaaacugcauacauccccucucugcacgaccaacacaaaggaggggagcaauauuugucugacccggacagaucgcggaugguacugcgacaacgccggcucuguguccuuuuucccgcaggcggaaaccuguaagguccagagcaauagaguguuuugcgauacgaugaacucucuuacacugcccagcgagguuaaucucugcaacaucgacauuuucaauccuaaauaugauuguaagaucaugaccuccaaaaccgacgugucuagcuccgucauuacaagccugggggccaucgugucuugcuacggaaagaccaaauguacagcuuccaacaagaaucggggcaucauuaagacguuuagcaacgggugcgauuaugucucuaauaaaggaguggacaccguuuccgugggcaacacacuuuacugugucaacaagcaagagggccagagccuguaugugaaaggggaacccaucauuaauuucuacgacccucucguuuuucccuccgaugaguucgacgccucuaucagccaggugaacgaaaagauuaaucagucccuggcuuuuauccgcaaaucugaugagcugcuccacaacgucaaugugggaaagagcaccacaaacauuaugaucaccacgaucauuaucgugauuaucguuauucugcuucugcucaucgccgucggccuguuccuguauugcaaggccagaugaggacuaguguccaccugucccuccugggcugcuggauugucucguuuuccugccaaauaaacaggaucagcgcuuuacagaucuaaaaaaaaaaaaaaaaaaaaaaaaaaaaaaaaaaaaaaaaaaaaaaaaaaaaaaaaaaaaaaaaugcaucccccccccccccccccccccccccccccccaaaggcucuuuucagagccaccagaauu

SEQ ID NO: 14516 - RNA, 1847 nt, Artificial Sequence
  mRNA product Design e-5 comprising derived and/or modified sequence from HRSV(Memphis-37)__AIY60640.1__F-del_DSCav1_mut1 (opt6)
gggagagcggcucggccauuuugucccagucaguccggaggcugcggcugcagaaguaccgccugcggaguaacugcaaagaagcuuaccauggaauuaccaauacuaaaaacaaacgcaauaacaacaauucuagcagcaguaacauuaugcuuugcaucaucccaaaacaucacagaagaauuuuaucaaucaaccugcucagcaguuuccaaaggauacuuaggagcauuaagaacugguugguacacuucaguaaucaccaucgaacucucaaacaucaaggaaaacaaaugcaacggaacagacgcaaaaguuaaacucauaaaacaagaacuugacaaauacaaaaacgccguaacagaacuacaacuucucaugcaaucaacacccgcagcaggauccggaucagccauaugcucaggcauagcaguauguaaaguauuacaucuugaaggugaaguaaacaaaauaaaaaacgcacuucuaucaaccaacaaagcaguaguaucacuaucaaacggaguauccgucuuaacauuuaaaguucuagaccucaaaaacuauauagacaaacaauuacugccaauccucaauaaacaaucaugcucaauaccaaacaucgaaacaguaauagaauuucaacaaaaaaacaacagacuacuagaaauaacaagagaauuuuccgucaacgccggcguaacuacuccaguaucaacauauaugcuaaccaacucagaacuccuaucccucauaaacgacaugccaauaacuaaugaucaaaaaaaacuaaugucaaacaauguacaaauaguuagacaacaaucauacucaaucaugugcauaauaaaagaagaaguacuagcauacgucguccaacuaccccuauacggaguaauagacacaccuugcuggaaacuacacacaucaccccuaugcacaacaaauacaaaagaagguuccaacaucugccuaacaagaacugauagaggaugguacugcgacaacgccggaucaguaucauucuucccucaagcugaaaccugcaaaguacaaucaaacagaguauuuugcgauacaaugaacucccuaacacuucccucagaaguuaaucuuuguaauauagauauauucaacccaaaauacgacugcaaaauaaugacaaguaaaacagacguauccucaucuguaauuacaucacuaggagccauaguaucuugcuacggcaaaaccaaaugcacagcaucaaacaaaaacagagguauuaucaaaaccuucucaaacggaugugacuacguuucaaacaaaggaguagacacaguaucagucggaaacacccuauacuguguuaacaaacaagaaggacaaucacuguacguaaaaggagaacccauaauaaauuucuacgacccacuuguauuuccaucagacgaauuugaugcaucaaucucacaaguaaaugaaaaaauaaaccaaucauuagcauucauaagaaaaucugacgaguuacuacacaacguaaauguuggcaaaucaacaaccaauauaaugauaacaacaauaauaauaguaauaauagucauauuacuccuccucauagccgucggauuauucuuauacugcaaagcaagauaaggacuaguguccaccugucccuccugggcugcuggauugucucguuuuccugccaaauaaacaggaucagcgcuuuacagaucuaaaaaaaaaaaaaaaaaaaaaaaaaaaaaaaaaaaaaaaaaaaaaaaaaaaaaaaaaaaaaaaaugcaucccccccccccccccccccccccccccccccaaaggcucuuuucagagccaccagaauu

SEQ ID NO: 14517 - RNA, 1847 nt, Artificial Sequence
  mRNA product Design e-5 comprising derived and/or modified sequence from HRSV(Memphis-37)__AIY60640.1__F-del_DSCav1_mut1 (opt11)
gggagagcggcucggccauuuugucccagucaguccggaggcugcggcugcagaaguaccgccugcggaguaacugcaaagaagcuuaccauggaacuccccauacuaaaaaccaacgccaucacaacaauccucgccgccgucacacucugcuucgccagcucccaaaacaucaccgaagaguucuaucaaucaaccugcuccgcagucucaaagggauaccucggagcccuccgcaccggaugguacacuuccgucaucacaauagaacucuccaacaucaaagaaaacaaaugcaacggcaccgacgcaaaagucaagcucaucaaacaagaacucgacaaauauaaaaacgccgucaccgaacuccaacuacucaugcaauccacacccgcggccggcucaggcagcgccaucugcucaggcaucgccgucugcaaaguccuccaccucgaaggcgaagucaacaaaaucaaaaacgcccuucuuucaaccaacaaggcaguaguaucccucucaaacggcgucagcguccugaccuucaaaguccuagaccucaaaaacuacauagauaaacaacuccuccccauacugaacaaacaaucgugcuccauccccaauaucgaaaccgucauagaguuccagcagaaaaacaacagacuucucgaaauaacccgagaguucucaguaaacgccggagucaccacacccguaagcaccuacaugcucacaaacucagaacuccuaucccucaucaacgacaugcccaucaccaacgaccagaaaaagcuaauguccaacaacguccaaauaguacgccaacaaagcuacucgauaaugugcaucaucaaggaagaaguacucgccuacgucguccaacucccccucuacggcguaaucgacacacccugcuggaaacuccacacguccccacucugcacaacaaacacaaaagaaggauccaacauaugccuaacccgcaccgacaggggcugguacugcgacaacgcaggcucagucagcuucuuuccccaagccgaaacaugcaaaguccaauccaaccgugucuucugcgacaccaugaacucgcucacccuacccucggaagucaaucucugcaacaucgacaucuucaacccaaaauacgacuguaaaaucaugaccagcaaaacagacguuucuuccagcgucaucacaucacucggcgcgaucguaucaugcuauggcaaaacaaagugcaccgcuagcaauaaaaaccgaggaaucauaaaaaccuucagcaacggcugcgacuacguauccaacaaaggcgucgacaccguauccgucggaaacacccucuacugcgucaacaagcaagaaggacaaucacucuacgucaaaggcgaaccaaucauaaacuucuacgacccacucguauuccccucagacgaguucgacgcauccaucucccaagucaacgaaaagaucaaccaaucucucgccuuuauacgcaaaagcgacgaacuccuucacaacguaaacgucggcaaaagcaccacuaacauaaugaucaccacaaucauaauaguaaucaucguaauacuccuccuacucaucgccgugggccuauuccucuauugcaaagcccgauaaggacuaguguccaccugucccuccugggcugcuggauugucucguuuuccugccaaauaaacaggaucagcgcuuuacagaucuaaaaaaaaaaaaaaaaaaaaaaaaaaaaaaaaaaaaaaaaaaaaaaaaaaaaaaaaaaaaaaaaugcaucccccccccccccccccccccccccccccccaaaggcucuuuucagagccaccagaauu

SEQ ID NO: 14518 - RNA, 1914 nt, Artificial Sequence
  mRNA product Design e-6 comprising derived and/or modified sequence from HRSV(Memphis-37)__AIY60640.1__F-del_DSCav1_mut1 (opt1)
gggagagcggcucggccauuuugucccagucaguccggaggcugcggcugcagaaguaccgccugcggaguaacugcaaagaagcuuaccauggagcugcccauccucaagaccaacgccaucaccacgauccuggccgcggugacccugugcuucgccagcucccagaacaucaccgaggaguucuaccagagcacgugcuccgccgucagcaagggcuaccucggcgcccugcgcaccgggugguacaccagcgugaucaccaucgagcuguccaacaucaaggagaacaagugcaacggcaccgacgccaaggugaagcucaucaagcaggagcuggacaaguacaagaacgcggucacggagcugcagcuccugaugcagagcaccccggccgccggcuccgggagcgcgaucugcuccggcaucgccgucugcaaggugcugcaccucgagggcgaggugaacaagaucaagaacgcccugcuguccaccaacaaggccgucgugagccucuccaacggggugagcguccugaccuucaaggugcuggaccucaagaacuacaucgacaagcagcugcugcccauccugaacaagcagagcugcuccauccccaacaucgagaccgucaucgaguuccagcagaagaacaaccgccuccuggagaucacgcgggaguucagcgugaacgcgggcgugaccacccccgucuccaccuacaugcugacgaacagcgagcuccugucccugaucaacgacaugccgaucaccaacgaccagaagaagcucaugagcaacaacgugcagaucgugcgccagcaguccuacagcaucaugugcaucaucaaggaggagguccuggccuacguggugcagcugccccucuacggggucaucgacacccccugcuggaagcugcacaccagcccccugugcacgaccaacaccaaggagggcuccaacaucugccucacccggacggaccgcgggugguacugcgacaacgccggcagcguguccuucuucccgcaggccgagaccugcaagguccagagcaaccggguguucugcgacaccaugaacucccugacccugcccagcgaggugaaccucugcaacaucgacaucuucaaccccaaguacgacugcaagaucaugacguccaagaccgacgucagcuccagcgugaucaccucccugggcgccaucgugagcugcuacgggaagaccaagugcacggcgagcaacaagaaccgcggcaucaucaagaccuucuccaacgggugcgacuacgucagcaacaagggcguggacaccguguccgucggcaacacccuguacugcgugaacaagcaggagggccagagccucuacgugaagggggagcccaucaucaacuucuacgacccgcuggucuuccccuccgacgaguucgacgccagcaucucccaggugaacgagaagaucaaccagagccuggccuucauccggaaguccgacgagcuccugcacaacgugaacgucggcaagagcaccacgaacaucaugaucaccaccaucaucaucgugaucaucgugauccugcugcuccugaucgccgucgggcuguuccucuacugcaaggcccgcugaggacuaguacuggcugcaucucccuuuccucuguccuccauccuucucccaggauggugaagggggaccugguacccagugauccccaccccaggauccuaaaucaugacuuaccugcuaauaaaaacucauuggaaaagugagaagaucuaaaaaaaaaaaaaaaaaaaaaaaaaaaaaaaaaaaaaaaaaaaaaaaaaaaaaaaaaaaaaaaaugcaucccccccccccccccccccccccccccccccaaaggcucuuuucagagccaccagaauu

SEQ ID NO: 14519 - RNA, 1914 nt, Artificial Sequence
  mRNA product Design e-6 comprising derived and/or modified sequence from HRSV(Memphis-37)__AIY60640.1__F-del_DSCav1_mut1 (opt1)
gggagagcggcucggccauuuugucccagucaguccggaggcugcggcugcagaaguaccgccugcggaguaacugcaaagaagcuuaccauggagcugcccauccucaagaccaacgccaucaccacgauccuggccgcggugacccugugcuucgccagcucccagaacaucaccgaggaguucuaccagagcacgugcuccgccgucagcaagggcuaccucggggcccugcgcaccggcugguacaccuccgugaucaccaucgagcugagcaacaucaaggagaacaagugcaacgggaccgacgccaaggugaagcucaucaagcaggagcuggacaaguacaagaacgcggucacggagcugcagcuccugaugcaguccaccccggccgccggcagcggguccgccaucugcagcggcaucgcggugugcaaggugcugcaccucgagggcgaggucaacaagaucaagaacgcccugcuguccaccaacaaggccguggugagccucuccaacggggucagcgugcugaccuucaaggugcuggaccucaagaacuacaucgacaagcagcugcugcccauccucaacaagcaguccugcagcauccccaacaucgagacggucaucgaguuccagcagaagaacaaccggcugcuggagaucacccgcgaguucuccgugaacgccggcgugaccacccccgucagcacguacaugcucaccaacuccgagcugcugagccucaucaacgacaugccgaucaccaacgaccagaagaagcugaugagcaacaacgugcagaucgugcggcagcaguccuacagcaucaugugcaucaucaaggaggagguccuggccuacguggugcagcucccccuguacggggucaucgacacccccugcuggaagcugcacacgagcccccucugcaccaccaacaccaaggagggcuccaacaucugccugacgcgcaccgaccgggggugguacugcgacaacgcgggcuccgugagcuucuucccgcaggccgagaccugcaaggugcaguccaaccgcgucuucugcgacaccaugaacagccugacgcuccccuccgaggugaaccugugcaacaucgacaucuucaaccccaaguacgacugcaagaucaugaccagcaagaccgacgucuccagcuccgugaucaccagccugggcgccaucguguccugcuacgggaagacgaagugcaccgccagcaacaagaaccggggcaucaucaagaccuucuccaacgggugcgacuacgucagcaacaagggcguggacaccguguccgucggcaacacgcucuacugcgugaacaagcaggaggggcagagccuguacgugaagggcgagcccaucaucaacuucuacgacccgcuggucuuccccagcgacgaguucgacgccuccaucagccaggugaacgagaagaucaaccagucccucgcguucauccgcaagagcgacgagcugcugcacaacgugaacgucgggaaguccaccaccaacaucaugaucaccaccaucaucaucgugaucaucgugauccuccugcugcucaucgccgucggccuguuccuguacugcaaggcccggugaggacuaguacuggcugcaucucccuuuccucuguccuccauccuucucccaggauggugaagggggaccugguacccagugauccccaccccaggauccuaaaucaugacuuaccugcuaauaaaaacucauuggaaaagugagaagaucuaaaaaaaaaaaaaaaaaaaaaaaaaaaaaaaaaaaaaaaaaaaaaaaaaaaaaaaaaaaaaaaaugcaucccccccccccccccccccccccccccccccaaaggcucuuuucagagccaccagaauu

SEQ ID NO: 14520 - RNA, 1914 nt, Artificial Sequence
  mRNA product Design e-6 comprising derived and/or modified sequence from HRSV(Memphis-37)__AIY60640.1__F-del_DSCav1_mut1 (opt2)
gggagagcggcucggccauuuugucccagucaguccggaggcugcggcugcagaaguaccgccugcggaguaacugcaaagaagcuuaccauggagcuccccauccucaagaccaacgccaucaccaccauccucgccgccgucacccucugcuucgccuccucccagaacaucaccgaggaguucuaccaguccaccugcuccgccgucuccaagggcuaccucggcgcccuccgcaccggcugguacaccuccgucaucaccaucgagcucuccaacaucaaggagaacaagugcaacggcaccgacgccaaggucaagcucaucaagcaggagcucgacaaguacaagaacgccgucaccgagcuccagcuccucaugcaguccacccccgccgccggcuccggcuccgccaucugcuccggcaucgccgucugcaagguccuccaccucgagggcgaggucaacaagaucaagaacgcccuccucuccaccaacaaggccgucgucucccucuccaacggcgucuccguccucaccuucaagguccucgaccucaagaacuacaucgacaagcagcuccuccccauccucaacaagcaguccugcuccauccccaacaucgagaccgucaucgaguuccagcagaagaacaaccgccuccucgagaucacccgcgaguucuccgucaacgccggcgucaccacccccgucuccaccuacaugcucaccaacuccgagcuccucucccucaucaacgacaugcccaucaccaacgaccagaagaagcucauguccaacaacguccagaucguccgccagcaguccuacuccaucaugugcaucaucaaggaggagguccucgccuacgucguccagcucccccucuacggcgucaucgacacccccugcuggaagcuccacaccuccccccucugcaccaccaacaccaaggagggcuccaacaucugccucacccgcaccgaccgcggcugguacugcgacaacgccggcuccgucuccuucuucccccaggccgagaccugcaagguccaguccaaccgcgucuucugcgacaccaugaacucccucacccuccccuccgaggucaaccucugcaacaucgacaucuucaaccccaaguacgacugcaagaucaugaccuccaagaccgacgucuccuccuccgucaucaccucccucggcgccaucgucuccugcuacggcaagaccaagugcaccgccuccaacaagaaccgcggcaucaucaagaccuucuccaacggcugcgacuacgucuccaacaagggcgucgacaccgucuccgucggcaacacccucuacugcgucaacaagcaggagggccagucccucuacgucaagggcgagcccaucaucaacuucuacgacccccucgucuuccccuccgacgaguucgacgccuccaucucccaggucaacgagaagaucaaccagucccucgccuucauccgcaaguccgacgagcuccuccacaacgucaacgucggcaaguccaccaccaacaucaugaucaccaccaucaucaucgucaucaucgucauccuccuccuccucaucgccgucggccucuuccucuacugcaaggcccgcugaggacuaguacuggcugcaucucccuuuccucuguccuccauccuucucccaggauggugaagggggaccugguacccagugauccccaccccaggauccuaaaucaugacuuaccugcuaauaaaaacucauuggaaaagugagaagaucuaaaaaaaaaaaaaaaaaaaaaaaaaaaaaaaaaaaaaaaaaaaaaaaaaaaaaaaaaaaaaaaaugcaucccccccccccccccccccccccccccccccaaaggcucuuuucagagccaccagaauu

SEQ ID NO: 14521 - RNA, 1914 nt, Artificial Sequence
  mRNA product Design e-6 comprising derived and/or modified sequence from HRSV(Memphis-37)__AIY60640.1__F-del_DSCav1_mut1 (opt3)
gggagagcggcucggccauuuugucccagucaguccggaggcugcggcugcagaaguaccgccugcggaguaacugcaaagaagcuuaccauggagcugcccauccucaagaccaacgccauuacaacuauacuugcugcagugacgcugugcuucgccagcucccagaauaucaccgaagaguuuuaccaaucuacauguucagcggucaguaaaggcuauuugggggcuuuaagaacuggaugguacaccagcguuauuacaaucgaacuguccaacauuaaggagaauaaaugcaacgguaccgacgccaaggugaaacuaaucaagcaggaacucgauaaguauaaaaaugcaguaacugagcugcagcuucugaugcagucuacuccugccgcuggcucggggucagcaauauguagcggaaucgccgugugcaaggucuugcaccucgagggcgaagugaacaaaauuaagaaugcucugcugaguaccaacaaagccguugugucccucucuaauggugucagcguguuaacguucaagguacuggaccuuaagaacuacaucgauaaacaauugcugccaauucuaaauaagcaguccuguucaaucccgaacauagagacuguuauugaauuucagcagaaaaauaacaggcuccuggagaucacccgggaguucagugugaaugcgggggucacaacucccgugagcaccuauaugcuuacaaacucugaacuguugucccucauuaacgacaugccuaucaccaaugaucaaaagaaacugaugucaaacaaugugcagaucguccgccagcagagcuacaguauuaugugcauaaucaaggaggaaguuuuagcauaugugguacaacugccacucuacggagugauugacacgcccuguuggaaacuucauacuucuccucugugcacaaccaacacuaaggagggcuccaauaucuguuugacacgaaccgaucguggcugguacugcgacaacgccgggagcgucucguuuuucccacaggcugaaacguguaaggugcagucuaauagaguguuuugcgauaccaugaacucccuaacacugcccucagagguuaaucucugcaacauagacauuuucaauccuaaauaugauuguaagaucaugacaaguaaaaccgacgucagcuccucugugaucacaagccugggagccauuguaucaugcuacgguaagacuaaauguaccgcaaguaacaagaauaggggcaucauuaagacauuuuccaacgggugcgauuauguuagcaauaaaggaguggacaccgucucugugggcaacacucuuuacugugucaacaagcaagagggucagucacuguaugugaaaggggaaccaauaaucaauuucuacgacccguugguuuuucccagugaugaguucgacgcuagcauuucccaggugaacgaaaagaucaaucagucucucgccuuuauccggaaaucggaugagcuguuacacaacguaaaugucggaaagagcacgacaaacauuaugauaaccacuaucauuaucgugauuaucguuauacugcuacuccugaucgcggugggccuuuucuuguauugcaaggcccgcugaggacuaguacuggcugcaucucccuuuccucuguccuccauccuucucccaggauggugaagggggaccugguacccagugauccccaccccaggauccuaaaucaugacuuaccugcuaauaaaaacucauuggaaaagugagaagaucuaaaaaaaaaaaaaaaaaaaaaaaaaaaaaaaaaaaaaaaaaaaaaaaaaaaaaaaaaaaaaaaaugcaucccccccccccccccccccccccccccccccaaaggcucuuuucagagccaccagaauu

SEQ ID NO: 14522 - RNA, 1914 nt, Artificial Sequence
  mRNA product Design e-6 comprising derived and/or modified sequence from HRSV(Memphis-37)__AIY60640.1__F-del_DSCav1_mut1 (opt4)
gggagagcggcucggccauuuugucccagucaguccggaggcugcggcugcagaaguaccgccugcggaguaacugcaaagaagcuuaccauggagcugcccauccugaagaccaacgccaucaccaccauccuggccgccgugacccugugcuucgccagcagccagaacaucaccgaggaguucuaccagagcaccugcagcgccgugagcaagggcuaccugggcgcccugagaaccggcugguacaccagcgugaucaccaucgagcugagcaacaucaaggagaacaagugcaacggcaccgacgccaaggugaagcugaucaagcaggagcuggacaaguacaagaacgccgugaccgagcugcagcugcugaugcagagcacccccgccgccggcagcggcagcgccaucugcagcggcaucgccgugugcaaggugcugcaccuggagggcgaggugaacaagaucaagaacgcccugcugagcaccaacaaggccguggugagccugagcaacggcgugagcgugcugaccuucaaggugcuggaccugaagaacuacaucgacaagcagcugcugcccauccugaacaagcagagcugcagcauccccaacaucgagaccgugaucgaguuccagcagaagaacaacagacugcuggagaucaccagagaguucagcgugaacgccggcgugaccacccccgugagcaccuacaugcugaccaacagcgagcugcugagccugaucaacgacaugcccaucaccaacgaccagaagaagcugaugagcaacaacgugcagaucgugagacagcagagcuacagcaucaugugcaucaucaaggaggaggugcuggccuacguggugcagcugccccuguacggcgugaucgacacccccugcuggaagcugcacaccagcccccugugcaccaccaacaccaaggagggcagcaacaucugccugaccagaaccgacagaggcugguacugcgacaacgccggcagcgugagcuucuucccccaggccgagaccugcaaggugcagagcaacagaguguucugcgacaccaugaacagccugacccugcccagcgaggugaaccugugcaacaucgacaucuucaaccccaaguacgacugcaagaucaugaccagcaagaccgacgugagcagcagcgugaucaccagccugggcgccaucgugagcugcuacggcaagaccaagugcaccgccagcaacaagaacagaggcaucaucaagaccuucagcaacggcugcgacuacgugagcaacaagggcguggacaccgugagcgugggcaacacccuguacugcgugaacaagcaggagggccagagccuguacgugaagggcgagcccaucaucaacuucuacgacccccugguguuccccagcgacgaguucgacgccagcaucagccaggugaacgagaagaucaaccagagccuggccuucaucagaaagagcgacgagcugcugcacaacgugaacgugggcaagagcaccaccaacaucaugaucaccaccaucaucaucgugaucaucgugauccugcugcugcugaucgccgugggccuguuccuguacugcaaggccagaugaggacuaguacuggcugcaucucccuuuccucuguccuccauccuucucccaggauggugaagggggaccugguacccagugauccccaccccaggauccuaaaucaugacuuaccugcuaauaaaaacucauuggaaaagugagaagaucuaaaaaaaaaaaaaaaaaaaaaaaaaaaaaaaaaaaaaaaaaaaaaaaaaaaaaaaaaaaaaaaaugcaucccccccccccccccccccccccccccccccaaaggcucuuuucagagccaccagaauu

SEQ ID NO: 14523 - RNA, 1914 nt, Artificial Sequence
  mRNA product Design e-6 comprising derived and/or modified sequence from HRSV(Memphis-37)__AIY60640.1__F-del_DSCav1_mut1 (opt5)
gggagagcggcucggccauuuugucccagucaguccggaggcugcggcugcagaaguaccgccugcggaguaacugcaaagaagcuuaccauggagcugcccauccucaagaccaacgccauuacaacgauccuggcugccgugacccuuugcuucgcgagcucccagaauauuacagaagaguuuuaccaaucuaccuguagcgcugucuccaaaggcuaucugggggcccucagaacaggaugguacaccucuguuaucacaauugaacugagcaacaucaaggagaauaaaugcaacggcaccgacgccaaggugaaacuuaucaagcaggaacuggauaaguauaaaaaugcugugacggagcuccagcugcugaugcaguccaccccugccgcugggucuggaagcgccauuuguuccggcaucgcggucugcaaggugcuccaccuggagggggaaguuaacaaaauuaagaaugcccuucugagcacaaacaaagcuguggucucucucuccaauggagugagcguucugaccuucaaggugcuugaccugaagaacuacaucgauaaacaacuccugccgauucugaauaagcagucuuguuccauccccaacauugagacagucaucgaauuucagcagaaaaauaaccggcuccuggagaucacccgcgaguucagcgugaaugccggcgugacgacaccugucucuaccuauaugcuuacaaacuccgaacugcucagccugauuaacgacaugcccaucaccaaugaucaaaagaaacuuauguccaacaauguucagauugugagacagcagucuuacagcaucaugugcauuaucaaggaggaagugcuggcuuaugucgugcaacucccucuguacggcguuaucgacacccccuguuggaaacugcauacauccccucucugcacgaccaacacaaaggaggggagcaauauuugucugacccggacagaucgcggaugguacugcgacaacgccggcucuguguccuuuuucccgcaggcggaaaccuguaagguccagagcaauagaguguuuugcgauacgaugaacucucuuacacugcccagcgagguuaaucucugcaacaucgacauuuucaauccuaaauaugauuguaagaucaugaccuccaaaaccgacgugucuagcuccgucauuacaagccugggggccaucgugucuugcuacggaaagaccaaauguacagcuuccaacaagaaucggggcaucauuaagacguuuagcaacgggugcgauuaugucucuaauaaaggaguggacaccguuuccgugggcaacacacuuuacugugucaacaagcaagagggccagagccuguaugugaaaggggaacccaucauuaauuucuacgacccucucguuuuucccuccgaugaguucgacgccucuaucagccaggugaacgaaaagauuaaucagucccuggcuuuuauccgcaaaucugaugagcugcuccacaacgucaaugugggaaagagcaccacaaacauuaugaucaccacgaucauuaucgugauuaucguuauucugcuucugcucaucgccgucggccuguuccuguauugcaaggccagaugaggacuaguacuggcugcaucucccuuuccucuguccuccauccuucucccaggauggugaagggggaccugguacccagugauccccaccccaggauccuaaaucaugacuuaccugcuaauaaaaacucauuggaaaagugagaagaucuaaaaaaaaaaaaaaaaaaaaaaaaaaaaaaaaaaaaaaaaaaaaaaaaaaaaaaaaaaaaaaaaugcaucccccccccccccccccccccccccccccccaaaggcucuuuucagagccaccagaauu

SEQ ID NO: 14524 - RNA, 1914 nt, Artificial Sequence
  mRNA product Design e-6 comprising derived and/or modified sequence from HRSV(Memphis-37)__AIY60640.1__F-del_DSCav1_mut1 (opt6)
gggagagcggcucggccauuuugucccagucaguccggaggcugcggcugcagaaguaccgccugcggaguaacugcaaagaagcuuaccauggaauuaccaauacuaaaaacaaacgcaauaacaacaauucuagcagcaguaacauuaugcuuugcaucaucccaaaacaucacagaagaauuuuaucaaucaaccugcucagcaguuuccaaaggauacuuaggagcauuaagaacugguugguacacuucaguaaucaccaucgaacucucaaacaucaaggaaaacaaaugcaacggaacagacgcaaaaguuaaacucauaaaacaagaacuugacaaauacaaaaacgccguaacagaacuacaacuucucaugcaaucaacacccgcagcaggauccggaucagccauaugcucaggcauagcaguauguaaaguauuacaucuugaaggugaaguaaacaaaauaaaaaacgcacuucuaucaaccaacaaagcaguaguaucacuaucaaacggaguauccgucuuaacauuuaaaguucuagaccucaaaaacuauauagacaaacaauuacugccaauccucaauaaacaaucaugcucaauaccaaacaucgaaacaguaauagaauuucaacaaaaaaacaacagacuacuagaaauaacaagagaauuuuccgucaacgccggcguaacuacuccaguaucaacauauaugcuaaccaacucagaacuccuaucccucauaaacgacaugccaauaacuaaugaucaaaaaaaacuaaugucaaacaauguacaaauaguuagacaacaaucauacucaaucaugugcauaauaaaagaagaaguacuagcauacgucguccaacuaccccuauacggaguaauagacacaccuugcuggaaacuacacacaucaccccuaugcacaacaaauacaaaagaagguuccaacaucugccuaacaagaacugauagaggaugguacugcgacaacgccggaucaguaucauucuucccucaagcugaaaccugcaaaguacaaucaaacagaguauuuugcgauacaaugaacucccuaacacuucccucagaaguuaaucuuuguaauauagauauauucaacccaaaauacgacugcaaaauaaugacaaguaaaacagacguauccucaucuguaauuacaucacuaggagccauaguaucuugcuacggcaaaaccaaaugcacagcaucaaacaaaaacagagguauuaucaaaaccuucucaaacggaugugacuacguuucaaacaaaggaguagacacaguaucagucggaaacacccuauacuguguuaacaaacaagaaggacaaucacuguacguaaaaggagaacccauaauaaauuucuacgacccacuuguauuuccaucagacgaauuugaugcaucaaucucacaaguaaaugaaaaaauaaaccaaucauuagcauucauaagaaaaucugacgaguuacuacacaacguaaauguuggcaaaucaacaaccaauauaaugauaacaacaauaauaauaguaauaauagucauauuacuccuccucauagccgucggauuauucuuauacugcaaagcaagauaaggacuaguacuggcugcaucucccuuuccucuguccuccauccuucucccaggauggugaagggggaccugguacccagugauccccaccccaggauccuaaaucaugacuuaccugcuaauaaaaacucauuggaaaagugagaagaucuaaaaaaaaaaaaaaaaaaaaaaaaaaaaaaaaaaaaaaaaaaaaaaaaaaaaaaaaaaaaaaaaugcaucccccccccccccccccccccccccccccccaaaggcucuuuucagagccaccagaauu

SEQ ID NO: 14525 - RNA, 1914 nt, Artificial Sequence
  mRNA product Design e-6 comprising derived and/or modified sequence from HRSV(Memphis-37)__AIY60640.1__F-del_DSCav1_mut1 (opt11)
gggagagcggcucggccauuuugucccagucaguccggaggcugcggcugcagaaguaccgccugcggaguaacugcaaagaagcuuaccauggaacuccccauacuaaaaaccaacgccaucacaacaauccucgccgccgucacacucugcuucgccagcucccaaaacaucaccgaagaguucuaucaaucaaccugcuccgcagucucaaagggauaccucggagcccuccgcaccggaugguacacuuccgucaucacaauagaacucuccaacaucaaagaaaacaaaugcaacggcaccgacgcaaaagucaagcucaucaaacaagaacucgacaaauauaaaaacgccgucaccgaacuccaacuacucaugcaauccacacccgcggccggcucaggcagcgccaucugcucaggcaucgccgucugcaaaguccuccaccucgaaggcgaagucaacaaaaucaaaaacgcccuucuuucaaccaacaaggcaguaguaucccucucaaacggcgucagcguccugaccuucaaaguccuagaccucaaaaacuacauagauaaacaacuccuccccauacugaacaaacaaucgugcuccauccccaauaucgaaaccgucauagaguuccagcagaaaaacaacagacuucucgaaauaacccgagaguucucaguaaacgccggagucaccacacccguaagcaccuacaugcucacaaacucagaacuccuaucccucaucaacgacaugcccaucaccaacgaccagaaaaagcuaauguccaacaacguccaaauaguacgccaacaaagcuacucgauaaugugcaucaucaaggaagaaguacucgccuacgucguccaacucccccucuacggcguaaucgacacacccugcuggaaacuccacacguccccacucugcacaacaaacacaaaagaaggauccaacauaugccuaacccgcaccgacaggggcugguacugcgacaacgcaggcucagucagcuucuuuccccaagccgaaacaugcaaaguccaauccaaccgugucuucugcgacaccaugaacucgcucacccuacccucggaagucaaucucugcaacaucgacaucuucaacccaaaauacgacuguaaaaucaugaccagcaaaacagacguuucuuccagcgucaucacaucacucggcgcgaucguaucaugcuauggcaaaacaaagugcaccgcuagcaauaaaaaccgaggaaucauaaaaaccuucagcaacggcugcgacuacguauccaacaaaggcgucgacaccguauccgucggaaacacccucuacugcgucaacaagcaagaaggacaaucacucuacgucaaaggcgaaccaaucauaaacuucuacgacccacucguauuccccucagacgaguucgacgcauccaucucccaagucaacgaaaagaucaaccaaucucucgccuuuauacgcaaaagcgacgaacuccuucacaacguaaacgucggcaaaagcaccacuaacauaaugaucaccacaaucauaauaguaaucaucguaauacuccuccuacucaucgccgugggccuauuccucuauugcaaagcccgauaaggacuaguacuggcugcaucucccuuuccucuguccuccauccuucucccaggauggugaagggggaccugguacccagugauccccaccccaggauccuaaaucaugacuuaccugcuaauaaaaacucauuggaaaagugagaagaucuaaaaaaaaaaaaaaaaaaaaaaaaaaaaaaaaaaaaaaaaaaaaaaaaaaaaaaaaaaaaaaaaugcaucccccccccccccccccccccccccccccccaaaggcucuuuucagagccaccagaauu

SEQ ID NO: 14526 - RNA, 2130 nt, Artificial Sequence
  mRNA product Design f-1 comprising derived and/or modified sequence from HRSV(Memphis-37)__AIY60640.1__F-del_DSCav1_mut1 (opt1)
gggagagcggcucggccauuuugucccagucaguccggaggcugcggcugcagaaguaccgccugcggaguaacugcaaagaagcuuaccauggagcugcccauccucaagaccaacgccaucaccacgauccuggccgcggugacccugugcuucgccagcucccagaacaucaccgaggaguucuaccagagcacgugcuccgccgucagcaagggcuaccucggcgcccugcgcaccgggugguacaccagcgugaucaccaucgagcuguccaacaucaaggagaacaagugcaacggcaccgacgccaaggugaagcucaucaagcaggagcuggacaaguacaagaacgcggucacggagcugcagcuccugaugcagagcaccccggccgccggcuccgggagcgcgaucugcuccggcaucgccgucugcaaggugcugcaccucgagggcgaggugaacaagaucaagaacgcccugcuguccaccaacaaggccgucgugagccucuccaacggggugagcguccugaccuucaaggugcuggaccucaagaacuacaucgacaagcagcugcugcccauccugaacaagcagagcugcuccauccccaacaucgagaccgucaucgaguuccagcagaagaacaaccgccuccuggagaucacgcgggaguucagcgugaacgcgggcgugaccacccccgucuccaccuacaugcugacgaacagcgagcuccugucccugaucaacgacaugccgaucaccaacgaccagaagaagcucaugagcaacaacgugcagaucgugcgccagcaguccuacagcaucaugugcaucaucaaggaggagguccuggccuacguggugcagcugccccucuacggggucaucgacacccccugcuggaagcugcacaccagcccccugugcacgaccaacaccaaggagggcuccaacaucugccucacccggacggaccgcgggugguacugcgacaacgccggcagcguguccuucuucccgcaggccgagaccugcaagguccagagcaaccggguguucugcgacaccaugaacucccugacccugcccagcgaggugaaccucugcaacaucgacaucuucaaccccaaguacgacugcaagaucaugacguccaagaccgacgucagcuccagcgugaucaccucccugggcgccaucgugagcugcuacgggaagaccaagugcacggcgagcaacaagaaccgcggcaucaucaagaccuucuccaacgggugcgacuacgucagcaacaagggcguggacaccguguccgucggcaacacccuguacugcgugaacaagcaggagggccagagccucuacgugaagggggagcccaucaucaacuucuacgacccgcuggucuuccccuccgacgaguucgacgccagcaucucccaggugaacgagaagaucaaccagagccuggccuucauccggaaguccgacgagcuccugcacaacgugaacgucggcaagagcaccacgaacaucaugaucaccaccaucaucaucgugaucaucgugauccugcugcuccugaucgccgucgggcuguuccucuacugcaaggcccgcugaggacuagugaagggaacacccaaauuuaauucagccuuaagcacaauuaauuaagagugaaacguaauuguacaagcaguuggucacccaccauagggcaugaucaacaccgcaaccuuuccuuuuucccccagugauucugaaaaaccccucuucccuucagcuugcuuagauguuccaaauuuaguaagcuuaaggcggccuacagaagaaaaagaaaaaaaaggccacaaaaguucccucucacuuucaguaaauaaaauaaaagcagcaacagaaauaaagaaauaaaugaaauucaaaaugaaauaaauauuguguugugcagcauuaaaaaaucaauaaaaauuaaaaaugagcaagaucuaaaaaaaaaaaaaaaaaaaaaaaaaaaaaaaaaaaaaaaaaaaaaaaaaaaaaaaaaaaaaaaaugcaucccccccccccccccccccccccccccccccaaaggcucuuuucagagccaccagaauu

SEQ ID NO: 14527 - RNA, 2130 nt, Artificial Sequence
  mRNA product Design f-1 comprising derived and/or modified sequence from HRSV(Memphis-37)__AIY60640.1__F-del_DSCav1_mut1 (opt1)
gggagagcggcucggccauuuugucccagucaguccggaggcugcggcugcagaaguaccgccugcggaguaacugcaaagaagcuuaccauggagcugcccauccucaagaccaacgccaucaccacgauccuggccgcggugacccugugcuucgccagcucccagaacaucaccgaggaguucuaccagagcacgugcuccgccgucagcaagggcuaccucggggcccugcgcaccggcugguacaccuccgugaucaccaucgagcugagcaacaucaaggagaacaagugcaacgggaccgacgccaaggugaagcucaucaagcaggagcuggacaaguacaagaacgcggucacggagcugcagcuccugaugcaguccaccccggccgccggcagcggguccgccaucugcagcggcaucgcggugugcaaggugcugcaccucgagggcgaggucaacaagaucaagaacgcccugcuguccaccaacaaggccguggugagccucuccaacggggucagcgugcugaccuucaaggugcuggaccucaagaacuacaucgacaagcagcugcugcccauccucaacaagcaguccugcagcauccccaacaucgagacggucaucgaguuccagcagaagaacaaccggcugcuggagaucacccgcgaguucuccgugaacgccggcgugaccacccccgucagcacguacaugcucaccaacuccgagcugcugagccucaucaacgacaugccgaucaccaacgaccagaagaagcugaugagcaacaacgugcagaucgugcggcagcaguccuacagcaucaugugcaucaucaaggaggagguccuggccuacguggugcagcucccccuguacggggucaucgacacccccugcuggaagcugcacacgagcccccucugcaccaccaacaccaaggagggcuccaacaucugccugacgcgcaccgaccgggggugguacugcgacaacgcgggcuccgugagcuucuucccgcaggccgagaccugcaaggugcaguccaaccgcgucuucugcgacaccaugaacagccugacgcuccccuccgaggugaaccugugcaacaucgacaucuucaaccccaaguacgacugcaagaucaugaccagcaagaccgacgucuccagcuccgugaucaccagccugggcgccaucguguccugcuacgggaagacgaagugcaccgccagcaacaagaaccggggcaucaucaagaccuucuccaacgggugcgacuacgucagcaacaagggcguggacaccguguccgucggcaacacgcucuacugcgugaacaagcaggaggggcagagccuguacgugaagggcgagcccaucaucaacuucuacgacccgcuggucuuccccagcgacgaguucgacgccuccaucagccaggugaacgagaagaucaaccagucccucgcguucauccgcaagagcgacgagcugcugcacaacgugaacgucgggaaguccaccaccaacaucaugaucaccaccaucaucaucgugaucaucgugauccuccugcugcucaucgccgucggccuguuccuguacugcaaggcccggugaggacuagugaagggaacacccaaauuuaauucagccuuaagcacaauuaauuaagagugaaacguaauuguacaagcaguuggucacccaccauagggcaugaucaacaccgcaaccuuuccuuuuucccccagugauucugaaaaaccccucuucccuucagcuugcuuagauguuccaaauuuaguaagcuuaaggcggccuacagaagaaaaagaaaaaaaaggccacaaaaguucccucucacuuucaguaaauaaaauaaaagcagcaacagaaauaaagaaauaaaugaaauucaaaaugaaauaaauauuguguugugcagcauuaaaaaaucaauaaaaauuaaaaaugagcaagaucuaaaaaaaaaaaaaaaaaaaaaaaaaaaaaaaaaaaaaaaaaaaaaaaaaaaaaaaaaaaaaaaaugcaucccccccccccccccccccccccccccccccaaaggcucuuuucagagccaccagaauu

SEQ ID NO: 14528 - RNA, 2130 nt, Artificial Sequence
  mRNA product Design f-1 comprising derived and/or modified sequence from HRSV(Memphis-37)__AIY60640.1__F-del_DSCav1_mut1 (opt2)
gggagagcggcucggccauuuugucccagucaguccggaggcugcggcugcagaaguaccgccugcggaguaacugcaaagaagcuuaccauggagcuccccauccucaagaccaacgccaucaccaccauccucgccgccgucacccucugcuucgccuccucccagaacaucaccgaggaguucuaccaguccaccugcuccgccgucuccaagggcuaccucggcgcccuccgcaccggcugguacaccuccgucaucaccaucgagcucuccaacaucaaggagaacaagugcaacggcaccgacgccaaggucaagcucaucaagcaggagcucgacaaguacaagaacgccgucaccgagcuccagcuccucaugcaguccacccccgccgccggcuccggcuccgccaucugcuccggcaucgccgucugcaagguccuccaccucgagggcgaggucaacaagaucaagaacgcccuccucuccaccaacaaggccgucgucucccucuccaacggcgucuccguccucaccuucaagguccucgaccucaagaacuacaucgacaagcagcuccuccccauccucaacaagcaguccugcuccauccccaacaucgagaccgucaucgaguuccagcagaagaacaaccgccuccucgagaucacccgcgaguucuccgucaacgccggcgucaccacccccgucuccaccuacaugcucaccaacuccgagcuccucucccucaucaacgacaugcccaucaccaacgaccagaagaagcucauguccaacaacguccagaucguccgccagcaguccuacuccaucaugugcaucaucaaggaggagguccucgccuacgucguccagcucccccucuacggcgucaucgacacccccugcuggaagcuccacaccuccccccucugcaccaccaacaccaaggagggcuccaacaucugccucacccgcaccgaccgcggcugguacugcgacaacgccggcuccgucuccuucuucccccaggccgagaccugcaagguccaguccaaccgcgucuucugcgacaccaugaacucccucacccuccccuccgaggucaaccucugcaacaucgacaucuucaaccccaaguacgacugcaagaucaugaccuccaagaccgacgucuccuccuccgucaucaccucccucggcgccaucgucuccugcuacggcaagaccaagugcaccgccuccaacaagaaccgcggcaucaucaagaccuucuccaacggcugcgacuacgucuccaacaagggcgucgacaccgucuccgucggcaacacccucuacugcgucaacaagcaggagggccagucccucuacgucaagggcgagcccaucaucaacuucuacgacccccucgucuuccccuccgacgaguucgacgccuccaucucccaggucaacgagaagaucaaccagucccucgccuucauccgcaaguccgacgagcuccuccacaacgucaacgucggcaaguccaccaccaacaucaugaucaccaccaucaucaucgucaucaucgucauccuccuccuccucaucgccgucggccucuuccucuacugcaaggcccgcugaggacuagugaagggaacacccaaauuuaauucagccuuaagcacaauuaauuaagagugaaacguaauuguacaagcaguuggucacccaccauagggcaugaucaacaccgcaaccuuuccuuuuucccccagugauucugaaaaaccccucuucccuucagcuugcuuagauguuccaaauuuaguaagcuuaaggcggccuacagaagaaaaagaaaaaaaaggccacaaaaguucccucucacuuucaguaaauaaaauaaaagcagcaacagaaauaaagaaauaaaugaaauucaaaaugaaauaaauauuguguugugcagcauuaaaaaaucaauaaaaauuaaaaaugagcaagaucuaaaaaaaaaaaaaaaaaaaaaaaaaaaaaaaaaaaaaaaaaaaaaaaaaaaaaaaaaaaaaaaaugcaucccccccccccccccccccccccccccccccaaaggcucuuuucagagccaccagaauu

SEQ ID NO: 14529 - RNA, 2130 nt, Artificial Sequence
  mRNA product Design f-1 comprising derived and/or modified sequence from HRSV(Memphis-37)__AIY60640.1__F-del_DSCav1_mut1 (opt3)
gggagagcggcucggccauuuugucccagucaguccggaggcugcggcugcagaaguaccgccugcggaguaacugcaaagaagcuuaccauggagcugcccauccucaagaccaacgccauuacaacuauacuugcugcagugacgcugugcuucgccagcucccagaauaucaccgaagaguuuuaccaaucuacauguucagcggucaguaaaggcuauuugggggcuuuaagaacuggaugguacaccagcguuauuacaaucgaacuguccaacauuaaggagaauaaaugcaacgguaccgacgccaaggugaaacuaaucaagcaggaacucgauaaguauaaaaaugcaguaacugagcugcagcuucugaugcagucuacuccugccgcuggcucggggucagcaauauguagcggaaucgccgugugcaaggucuugcaccucgagggcgaagugaacaaaauuaagaaugcucugcugaguaccaacaaagccguugugucccucucuaauggugucagcguguuaacguucaagguacuggaccuuaagaacuacaucgauaaacaauugcugccaauucuaaauaagcaguccuguucaaucccgaacauagagacuguuauugaauuucagcagaaaaauaacaggcuccuggagaucacccgggaguucagugugaaugcgggggucacaacucccgugagcaccuauaugcuuacaaacucugaacuguugucccucauuaacgacaugccuaucaccaaugaucaaaagaaacugaugucaaacaaugugcagaucguccgccagcagagcuacaguauuaugugcauaaucaaggaggaaguuuuagcauaugugguacaacugccacucuacggagugauugacacgcccuguuggaaacuucauacuucuccucugugcacaaccaacacuaaggagggcuccaauaucuguuugacacgaaccgaucguggcugguacugcgacaacgccgggagcgucucguuuuucccacaggcugaaacguguaaggugcagucuaauagaguguuuugcgauaccaugaacucccuaacacugcccucagagguuaaucucugcaacauagacauuuucaauccuaaauaugauuguaagaucaugacaaguaaaaccgacgucagcuccucugugaucacaagccugggagccauuguaucaugcuacgguaagacuaaauguaccgcaaguaacaagaauaggggcaucauuaagacauuuuccaacgggugcgauuauguuagcaauaaaggaguggacaccgucucugugggcaacacucuuuacugugucaacaagcaagagggucagucacuguaugugaaaggggaaccaauaaucaauuucuacgacccguugguuuuucccagugaugaguucgacgcuagcauuucccaggugaacgaaaagaucaaucagucucucgccuuuauccggaaaucggaugagcuguuacacaacguaaaugucggaaagagcacgacaaacauuaugauaaccacuaucauuaucgugauuaucguuauacugcuacuccugaucgcggugggccuuuucuuguauugcaaggcccgcugaggacuagugaagggaacacccaaauuuaauucagccuuaagcacaauuaauuaagagugaaacguaauuguacaagcaguuggucacccaccauagggcaugaucaacaccgcaaccuuuccuuuuucccccagugauucugaaaaaccccucuucccuucagcuugcuuagauguuccaaauuuaguaagcuuaaggcggccuacagaagaaaaagaaaaaaaaggccacaaaaguucccucucacuuucaguaaauaaaauaaaagcagcaacagaaauaaagaaauaaaugaaauucaaaaugaaauaaauauuguguugugcagcauuaaaaaaucaauaaaaauuaaaaaugagcaagaucuaaaaaaaaaaaaaaaaaaaaaaaaaaaaaaaaaaaaaaaaaaaaaaaaaaaaaaaaaaaaaaaaugcaucccccccccccccccccccccccccccccccaaaggcucuuuucagagccaccagaauu

SEQ ID NO: 14530 - RNA, 2130 nt, Artificial Sequence
  mRNA product Design f-1 comprising derived and/or modified sequence from HRSV(Memphis-37)__AIY60640.1__F-del_DSCav1_mut1 (opt4)
gggagagcggcucggccauuuugucccagucaguccggaggcugcggcugcagaaguaccgccugcggaguaacugcaaagaagcuuaccauggagcugcccauccugaagaccaacgccaucaccaccauccuggccgccgugacccugugcuucgccagcagccagaacaucaccgaggaguucuaccagagcaccugcagcgccgugagcaagggcuaccugggcgcccugagaaccggcugguacaccagcgugaucaccaucgagcugagcaacaucaaggagaacaagugcaacggcaccgacgccaaggugaagcugaucaagcaggagcuggacaaguacaagaacgccgugaccgagcugcagcugcugaugcagagcacccccgccgccggcagcggcagcgccaucugcagcggcaucgccgugugcaaggugcugcaccuggagggcgaggugaacaagaucaagaacgcccugcugagcaccaacaaggccguggugagccugagcaacggcgugagcgugcugaccuucaaggugcuggaccugaagaacuacaucgacaagcagcugcugcccauccugaacaagcagagcugcagcauccccaacaucgagaccgugaucgaguuccagcagaagaacaacagacugcuggagaucaccagagaguucagcgugaacgccggcgugaccacccccgugagcaccuacaugcugaccaacagcgagcugcugagccugaucaacgacaugcccaucaccaacgaccagaagaagcugaugagcaacaacgugcagaucgugagacagcagagcuacagcaucaugugcaucaucaaggaggaggugcuggccuacguggugcagcugccccuguacggcgugaucgacacccccugcuggaagcugcacaccagcccccugugcaccaccaacaccaaggagggcagcaacaucugccugaccagaaccgacagaggcugguacugcgacaacgccggcagcgugagcuucuucccccaggccgagaccugcaaggugcagagcaacagaguguucugcgacaccaugaacagccugacccugcccagcgaggugaaccugugcaacaucgacaucuucaaccccaaguacgacugcaagaucaugaccagcaagaccgacgugagcagcagcgugaucaccagccugggcgccaucgugagcugcuacggcaagaccaagugcaccgccagcaacaagaacagaggcaucaucaagaccuucagcaacggcugcgacuacgugagcaacaagggcguggacaccgugagcgugggcaacacccuguacugcgugaacaagcaggagggccagagccuguacgugaagggcgagcccaucaucaacuucuacgacccccugguguuccccagcgacgaguucgacgccagcaucagccaggugaacgagaagaucaaccagagccuggccuucaucagaaagagcgacgagcugcugcacaacgugaacgugggcaagagcaccaccaacaucaugaucaccaccaucaucaucgugaucaucgugauccugcugcugcugaucgccgugggccuguuccuguacugcaaggccagaugaggacuagugaagggaacacccaaauuuaauucagccuuaagcacaauuaauuaagagugaaacguaauuguacaagcaguuggucacccaccauagggcaugaucaacaccgcaaccuuuccuuuuucccccagugauucugaaaaaccccucuucccuucagcuugcuuagauguuccaaauuuaguaagcuuaaggcggccuacagaagaaaaagaaaaaaaaggccacaaaaguucccucucacuuucaguaaauaaaauaaaagcagcaacagaaauaaagaaauaaaugaaauucaaaaugaaauaaauauuguguugugcagcauuaaaaaaucaauaaaaauuaaaaaugagcaagaucuaaaaaaaaaaaaaaaaaaaaaaaaaaaaaaaaaaaaaaaaaaaaaaaaaaaaaaaaaaaaaaaaugcaucccccccccccccccccccccccccccccccaaaggcucuuuucagagccaccagaauu

SEQ ID NO: 14531 - RNA, 2130 nt, Artificial Sequence
  mRNA product Design f-1 comprising derived and/or modified sequence from HRSV(Memphis-37)__AIY60640.1__F-del_DSCav1_mut1 (opt5)
gggagagcggcucggccauuuugucccagucaguccggaggcugcggcugcagaaguaccgccugcggaguaacugcaaagaagcuuaccauggagcugcccauccucaagaccaacgccauuacaacgauccuggcugccgugacccuuugcuucgcgagcucccagaauauuacagaagaguuuuaccaaucuaccuguagcgcugucuccaaaggcuaucugggggcccucagaacaggaugguacaccucuguuaucacaauugaacugagcaacaucaaggagaauaaaugcaacggcaccgacgccaaggugaaacuuaucaagcaggaacuggauaaguauaaaaaugcugugacggagcuccagcugcugaugcaguccaccccugccgcugggucuggaagcgccauuuguuccggcaucgcggucugcaaggugcuccaccuggagggggaaguuaacaaaauuaagaaugcccuucugagcacaaacaaagcuguggucucucucuccaauggagugagcguucugaccuucaaggugcuugaccugaagaacuacaucgauaaacaacuccugccgauucugaauaagcagucuuguuccauccccaacauugagacagucaucgaauuucagcagaaaaauaaccggcuccuggagaucacccgcgaguucagcgugaaugccggcgugacgacaccugucucuaccuauaugcuuacaaacuccgaacugcucagccugauuaacgacaugcccaucaccaaugaucaaaagaaacuuauguccaacaauguucagauugugagacagcagucuuacagcaucaugugcauuaucaaggaggaagugcuggcuuaugucgugcaacucccucuguacggcguuaucgacacccccuguuggaaacugcauacauccccucucugcacgaccaacacaaaggaggggagcaauauuugucugacccggacagaucgcggaugguacugcgacaacgccggcucuguguccuuuuucccgcaggcggaaaccuguaagguccagagcaauagaguguuuugcgauacgaugaacucucuuacacugcccagcgagguuaaucucugcaacaucgacauuuucaauccuaaauaugauuguaagaucaugaccuccaaaaccgacgugucuagcuccgucauuacaagccugggggccaucgugucuugcuacggaaagaccaaauguacagcuuccaacaagaaucggggcaucauuaagacguuuagcaacgggugcgauuaugucucuaauaaaggaguggacaccguuuccgugggcaacacacuuuacugugucaacaagcaagagggccagagccuguaugugaaaggggaacccaucauuaauuucuacgacccucucguuuuucccuccgaugaguucgacgccucuaucagccaggugaacgaaaagauuaaucagucccuggcuuuuauccgcaaaucugaugagcugcuccacaacgucaaugugggaaagagcaccacaaacauuaugaucaccacgaucauuaucgugauuaucguuauucugcuucugcucaucgccgucggccuguuccuguauugcaaggccagaugaggacuagugaagggaacacccaaauuuaauucagccuuaagcacaauuaauuaagagugaaacguaauuguacaagcaguuggucacccaccauagggcaugaucaacaccgcaaccuuuccuuuuucccccagugauucugaaaaaccccucuucccuucagcuugcuuagauguuccaaauuuaguaagcuuaaggcggccuacagaagaaaaagaaaaaaaaggccacaaaaguucccucucacuuucaguaaauaaaauaaaagcagcaacagaaauaaagaaauaaaugaaauucaaaaugaaauaaauauuguguugugcagcauuaaaaaaucaauaaaaauuaaaaaugagcaagaucuaaaaaaaaaaaaaaaaaaaaaaaaaaaaaaaaaaaaaaaaaaaaaaaaaaaaaaaaaaaaaaaaugcaucccccccccccccccccccccccccccccccaaaggcucuuuucagagccaccagaauu

SEQ ID NO: 14532 - RNA, 2130 nt, Artificial Sequence
  mRNA product Design f-1 comprising derived and/or modified sequence from HRSV(Memphis-37)__AIY60640.1__F-del_DSCav1_mut1 (opt6)
gggagagcggcucggccauuuugucccagucaguccggaggcugcggcugcagaaguaccgccugcggaguaacugcaaagaagcuuaccauggaauuaccaauacuaaaaacaaacgcaauaacaacaauucuagcagcaguaacauuaugcuuugcaucaucccaaaacaucacagaagaauuuuaucaaucaaccugcucagcaguuuccaaaggauacuuaggagcauuaagaacugguugguacacuucaguaaucaccaucgaacucucaaacaucaaggaaaacaaaugcaacggaacagacgcaaaaguuaaacucauaaaacaagaacuugacaaauacaaaaacgccguaacagaacuacaacuucucaugcaaucaacacccgcagcaggauccggaucagccauaugcucaggcauagcaguauguaaaguauuacaucuugaaggugaaguaaacaaaauaaaaaacgcacuucuaucaaccaacaaagcaguaguaucacuaucaaacggaguauccgucuuaacauuuaaaguucuagaccucaaaaacuauauagacaaacaauuacugccaauccucaauaaacaaucaugcucaauaccaaacaucgaaacaguaauagaauuucaacaaaaaaacaacagacuacuagaaauaacaagagaauuuuccgucaacgccggcguaacuacuccaguaucaacauauaugcuaaccaacucagaacuccuaucccucauaaacgacaugccaauaacuaaugaucaaaaaaaacuaaugucaaacaauguacaaauaguuagacaacaaucauacucaaucaugugcauaauaaaagaagaaguacuagcauacgucguccaacuaccccuauacggaguaauagacacaccuugcuggaaacuacacacaucaccccuaugcacaacaaauacaaaagaagguuccaacaucugccuaacaagaacugauagaggaugguacugcgacaacgccggaucaguaucauucuucccucaagcugaaaccugcaaaguacaaucaaacagaguauuuugcgauacaaugaacucccuaacacuucccucagaaguuaaucuuuguaauauagauauauucaacccaaaauacgacugcaaaauaaugacaaguaaaacagacguauccucaucuguaauuacaucacuaggagccauaguaucuugcuacggcaaaaccaaaugcacagcaucaaacaaaaacagagguauuaucaaaaccuucucaaacggaugugacuacguuucaaacaaaggaguagacacaguaucagucggaaacacccuauacuguguuaacaaacaagaaggacaaucacuguacguaaaaggagaacccauaauaaauuucuacgacccacuuguauuuccaucagacgaauuugaugcaucaaucucacaaguaaaugaaaaaauaaaccaaucauuagcauucauaagaaaaucugacgaguuacuacacaacguaaauguuggcaaaucaacaaccaauauaaugauaacaacaauaauaauaguaauaauagucauauuacuccuccucauagccgucggauuauucuuauacugcaaagcaagauaaggacuagugaagggaacacccaaauuuaauucagccuuaagcacaauuaauuaagagugaaacguaauuguacaagcaguuggucacccaccauagggcaugaucaacaccgcaaccuuuccuuuuucccccagugauucugaaaaaccccucuucccuucagcuugcuuagauguuccaaauuuaguaagcuuaaggcggccuacagaagaaaaagaaaaaaaaggccacaaaaguucccucucacuuucaguaaauaaaauaaaagcagcaacagaaauaaagaaauaaaugaaauucaaaaugaaauaaauauuguguugugcagcauuaaaaaaucaauaaaaauuaaaaaugagcaagaucuaaaaaaaaaaaaaaaaaaaaaaaaaaaaaaaaaaaaaaaaaaaaaaaaaaaaaaaaaaaaaaaaugcaucccccccccccccccccccccccccccccccaaaggcucuuuucagagccaccagaauu

SEQ ID NO: 14533 - RNA, 2130 nt, Artificial Sequence
  mRNA product Design f-1 comprising derived and/or modified sequence from HRSV(Memphis-37)__AIY60640.1__F-del_DSCav1_mut1 (opt11)
gggagagcggcucggccauuuugucccagucaguccggaggcugcggcugcagaaguaccgccugcggaguaacugcaaagaagcuuaccauggaacuccccauacuaaaaaccaacgccaucacaacaauccucgccgccgucacacucugcuucgccagcucccaaaacaucaccgaagaguucuaucaaucaaccugcuccgcagucucaaagggauaccucggagcccuccgcaccggaugguacacuuccgucaucacaauagaacucuccaacaucaaagaaaacaaaugcaacggcaccgacgcaaaagucaagcucaucaaacaagaacucgacaaauauaaaaacgccgucaccgaacuccaacuacucaugcaauccacacccgcggccggcucaggcagcgccaucugcucaggcaucgccgucugcaaaguccuccaccucgaaggcgaagucaacaaaaucaaaaacgcccuucuuucaaccaacaaggcaguaguaucccucucaaacggcgucagcguccugaccuucaaaguccuagaccucaaaaacuacauagauaaacaacuccuccccauacugaacaaacaaucgugcuccauccccaauaucgaaaccgucauagaguuccagcagaaaaacaacagacuucucgaaauaacccgagaguucucaguaaacgccggagucaccacacccguaagcaccuacaugcucacaaacucagaacuccuaucccucaucaacgacaugcccaucaccaacgaccagaaaaagcuaauguccaacaacguccaaauaguacgccaacaaagcuacucgauaaugugcaucaucaaggaagaaguacucgccuacgucguccaacucccccucuacggcguaaucgacacacccugcuggaaacuccacacguccccacucugcacaacaaacacaaaagaaggauccaacauaugccuaacccgcaccgacaggggcugguacugcgacaacgcaggcucagucagcuucuuuccccaagccgaaacaugcaaaguccaauccaaccgugucuucugcgacaccaugaacucgcucacccuacccucggaagucaaucucugcaacaucgacaucuucaacccaaaauacgacuguaaaaucaugaccagcaaaacagacguuucuuccagcgucaucacaucacucggcgcgaucguaucaugcuauggcaaaacaaagugcaccgcuagcaauaaaaaccgaggaaucauaaaaaccuucagcaacggcugcgacuacguauccaacaaaggcgucgacaccguauccgucggaaacacccucuacugcgucaacaagcaagaaggacaaucacucuacgucaaaggcgaaccaaucauaaacuucuacgacccacucguauuccccucagacgaguucgacgcauccaucucccaagucaacgaaaagaucaaccaaucucucgccuuuauacgcaaaagcgacgaacuccuucacaacguaaacgucggcaaaagcaccacuaacauaaugaucaccacaaucauaauaguaaucaucguaauacuccuccuacucaucgccgugggccuauuccucuauugcaaagcccgauaaggacuagugaagggaacacccaaauuuaauucagccuuaagcacaauuaauuaagagugaaacguaauuguacaagcaguuggucacccaccauagggcaugaucaacaccgcaaccuuuccuuuuucccccagugauucugaaaaaccccucuucccuucagcuugcuuagauguuccaaauuuaguaagcuuaaggcggccuacagaagaaaaagaaaaaaaaggccacaaaaguucccucucacuuucaguaaauaaaauaaaagcagcaacagaaauaaagaaauaaaugaaauucaaaaugaaauaaauauuguguugugcagcauuaaaaaaucaauaaaaauuaaaaaugagcaagaucuaaaaaaaaaaaaaaaaaaaaaaaaaaaaaaaaaaaaaaaaaaaaaaaaaaaaaaaaaaaaaaaaugcaucccccccccccccccccccccccccccccccaaaggcucuuuucagagccaccagaauu

SEQ ID NO: 14534 - RNA, 1910 nt, Artificial Sequence
  mRNA product Design f-2 comprising derived and/or modified sequence from HRSV(Memphis-37)__AIY60640.1__F-del_DSCav1_mut1 (opt1)
gggagagcggcucggccauuuugucccagucaguccggaggcugcggcugcagaaguaccgccugcggaguaacugcaaagaagcuuaccauggagcugcccauccucaagaccaacgccaucaccacgauccuggccgcggugacccugugcuucgccagcucccagaacaucaccgaggaguucuaccagagcacgugcuccgccgucagcaagggcuaccucggcgcccugcgcaccgggugguacaccagcgugaucaccaucgagcuguccaacaucaaggagaacaagugcaacggcaccgacgccaaggugaagcucaucaagcaggagcuggacaaguacaagaacgcggucacggagcugcagcuccugaugcagagcaccccggccgccggcuccgggagcgcgaucugcuccggcaucgccgucugcaaggugcugcaccucgagggcgaggugaacaagaucaagaacgcccugcuguccaccaacaaggccgucgugagccucuccaacggggugagcguccugaccuucaaggugcuggaccucaagaacuacaucgacaagcagcugcugcccauccugaacaagcagagcugcuccauccccaacaucgagaccgucaucgaguuccagcagaagaacaaccgccuccuggagaucacgcgggaguucagcgugaacgcgggcgugaccacccccgucuccaccuacaugcugacgaacagcgagcuccugucccugaucaacgacaugccgaucaccaacgaccagaagaagcucaugagcaacaacgugcagaucgugcgccagcaguccuacagcaucaugugcaucaucaaggaggagguccuggccuacguggugcagcugccccucuacggggucaucgacacccccugcuggaagcugcacaccagcccccugugcacgaccaacaccaaggagggcuccaacaucugccucacccggacggaccgcgggugguacugcgacaacgccggcagcguguccuucuucccgcaggccgagaccugcaagguccagagcaaccggguguucugcgacaccaugaacucccugacccugcccagcgaggugaaccucugcaacaucgacaucuucaaccccaaguacgacugcaagaucaugacguccaagaccgacgucagcuccagcgugaucaccucccugggcgccaucgugagcugcuacgggaagaccaagugcacggcgagcaacaagaaccgcggcaucaucaagaccuucuccaacgggugcgacuacgucagcaacaagggcguggacaccguguccgucggcaacacccuguacugcgugaacaagcaggagggccagagccucuacgugaagggggagcccaucaucaacuucuacgacccgcuggucuuccccuccgacgaguucgacgccagcaucucccaggugaacgagaagaucaaccagagccuggccuucauccggaaguccgacgagcuccugcacaacgugaacgucggcaagagcaccacgaacaucaugaucaccaccaucaucaucgugaucaucgugauccugcugcuccugaucgccgucgggcuguuccucuacugcaaggcccgcugaggacuaguggaagcauuuuccuggcugauuaaaagaaauuacucagcuauggucaucuguuccuguuagaaggcuaugcagcauauuauauacuaugcgcauguuaugaaaugcauaauaaaaaauuuuaaaaaaucuaaaagaucuaaaaaaaaaaaaaaaaaaaaaaaaaaaaaaaaaaaaaaaaaaaaaaaaaaaaaaaaaaaaaaaaugcaucccccccccccccccccccccccccccccccaaaggcucuuuucagagccaccagaauu

SEQ ID NO: 14535 - RNA, 1910 nt, Artificial Sequence
  mRNA product Design f-2 comprising derived and/or modified sequence from HRSV(Memphis-37)__AIY60640.1__F-del_DSCav1_mut1 (opt1)
gggagagcggcucggccauuuugucccagucaguccggaggcugcggcugcagaaguaccgccugcggaguaacugcaaagaagcuuaccauggagcugcccauccucaagaccaacgccaucaccacgauccuggccgcggugacccugugcuucgccagcucccagaacaucaccgaggaguucuaccagagcacgugcuccgccgucagcaagggcuaccucggggcccugcgcaccggcugguacaccuccgugaucaccaucgagcugagcaacaucaaggagaacaagugcaacgggaccgacgccaaggugaagcucaucaagcaggagcuggacaaguacaagaacgcggucacggagcugcagcuccugaugcaguccaccccggccgccggcagcggguccgccaucugcagcggcaucgcggugugcaaggugcugcaccucgagggcgaggucaacaagaucaagaacgcccugcuguccaccaacaaggccguggugagccucuccaacggggucagcgugcugaccuucaaggugcuggaccucaagaacuacaucgacaagcagcugcugcccauccucaacaagcaguccugcagcauccccaacaucgagacggucaucgaguuccagcagaagaacaaccggcugcuggagaucacccgcgaguucuccgugaacgccggcgugaccacccccgucagcacguacaugcucaccaacuccgagcugcugagccucaucaacgacaugccgaucaccaacgaccagaagaagcugaugagcaacaacgugcagaucgugcggcagcaguccuacagcaucaugugcaucaucaaggaggagguccuggccuacguggugcagcucccccuguacggggucaucgacacccccugcuggaagcugcacacgagcccccucugcaccaccaacaccaaggagggcuccaacaucugccugacgcgcaccgaccgggggugguacugcgacaacgcgggcuccgugagcuucuucccgcaggccgagaccugcaaggugcaguccaaccgcgucuucugcgacaccaugaacagccugacgcuccccuccgaggugaaccugugcaacaucgacaucuucaaccccaaguacgacugcaagaucaugaccagcaagaccgacgucuccagcuccgugaucaccagccugggcgccaucguguccugcuacgggaagacgaagugcaccgccagcaacaagaaccggggcaucaucaagaccuucuccaacgggugcgacuacgucagcaacaagggcguggacaccguguccgucggcaacacgcucuacugcgugaacaagcaggaggggcagagccuguacgugaagggcgagcccaucaucaacuucuacgacccgcuggucuuccccagcgacgaguucgacgccuccaucagccaggugaacgagaagaucaaccagucccucgcguucauccgcaagagcgacgagcugcugcacaacgugaacgucgggaaguccaccaccaacaucaugaucaccaccaucaucaucgugaucaucgugauccuccugcugcucaucgccgucggccuguuccuguacugcaaggcccggugaggacuaguggaagcauuuuccuggcugauuaaaagaaauuacucagcuauggucaucuguuccuguuagaaggcuaugcagcauauuauauacuaugcgcauguuaugaaaugcauaauaaaaaauuuuaaaaaaucuaaaagaucuaaaaaaaaaaaaaaaaaaaaaaaaaaaaaaaaaaaaaaaaaaaaaaaaaaaaaaaaaaaaaaaaugcaucccccccccccccccccccccccccccccccaaaggcucuuuucagagccaccagaauu

SEQ ID NO: 14536 - RNA, 1910 nt, Artificial Sequence
  mRNA product Design f-2 comprising derived and/or modified sequence from HRSV(Memphis-37)__AIY60640.1__F-del_DSCav1_mut1 (opt2)
gggagagcggcucggccauuuugucccagucaguccggaggcugcggcugcagaaguaccgccugcggaguaacugcaaagaagcuuaccauggagcuccccauccucaagaccaacgccaucaccaccauccucgccgccgucacccucugcuucgccuccucccagaacaucaccgaggaguucuaccaguccaccugcuccgccgucuccaagggcuaccucggcgcccuccgcaccggcugguacaccuccgucaucaccaucgagcucuccaacaucaaggagaacaagugcaacggcaccgacgccaaggucaagcucaucaagcaggagcucgacaaguacaagaacgccgucaccgagcuccagcuccucaugcaguccacccccgccgccggcuccggcuccgccaucugcuccggcaucgccgucugcaagguccuccaccucgagggcgaggucaacaagaucaagaacgcccuccucuccaccaacaaggccgucgucucccucuccaacggcgucuccguccucaccuucaagguccucgaccucaagaacuacaucgacaagcagcuccuccccauccucaacaagcaguccugcuccauccccaacaucgagaccgucaucgaguuccagcagaagaacaaccgccuccucgagaucacccgcgaguucuccgucaacgccggcgucaccacccccgucuccaccuacaugcucaccaacuccgagcuccucucccucaucaacgacaugcccaucaccaacgaccagaagaagcucauguccaacaacguccagaucguccgccagcaguccuacuccaucaugugcaucaucaaggaggagguccucgccuacgucguccagcucccccucuacggcgucaucgacacccccugcuggaagcuccacaccuccccccucugcaccaccaacaccaaggagggcuccaacaucugccucacccgcaccgaccgcggcugguacugcgacaacgccggcuccgucuccuucuucccccaggccgagaccugcaagguccaguccaaccgcgucuucugcgacaccaugaacucccucacccuccccuccgaggucaaccucugcaacaucgacaucuucaaccccaaguacgacugcaagaucaugaccuccaagaccgacgucuccuccuccgucaucaccucccucggcgccaucgucuccugcuacggcaagaccaagugcaccgccuccaacaagaaccgcggcaucaucaagaccuucuccaacggcugcgacuacgucuccaacaagggcgucgacaccgucuccgucggcaacacccucuacugcgucaacaagcaggagggccagucccucuacgucaagggcgagcccaucaucaacuucuacgacccccucgucuuccccuccgacgaguucgacgccuccaucucccaggucaacgagaagaucaaccagucccucgccuucauccgcaaguccgacgagcuccuccacaacgucaacgucggcaaguccaccaccaacaucaugaucaccaccaucaucaucgucaucaucgucauccuccuccuccucaucgccgucggccucuuccucuacugcaaggcccgcugaggacuaguggaagcauuuuccuggcugauuaaaagaaauuacucagcuauggucaucuguuccuguuagaaggcuaugcagcauauuauauacuaugcgcauguuaugaaaugcauaauaaaaaauuuuaaaaaaucuaaaagaucuaaaaaaaaaaaaaaaaaaaaaaaaaaaaaaaaaaaaaaaaaaaaaaaaaaaaaaaaaaaaaaaaugcaucccccccccccccccccccccccccccccccaaaggcucuuuucagagccaccagaauu

SEQ ID NO: 14537 - RNA, 1910 nt, Artificial Sequence
  mRNA product Design f-2 comprising derived and/or modified sequence from HRSV(Memphis-37)__AIY60640.1__F-del_DSCav1_mut1 (opt3)
gggagagcggcucggccauuuugucccagucaguccggaggcugcggcugcagaaguaccgccugcggaguaacugcaaagaagcuuaccauggagcugcccauccucaagaccaacgccauuacaacuauacuugcugcagugacgcugugcuucgccagcucccagaauaucaccgaagaguuuuaccaaucuacauguucagcggucaguaaaggcuauuugggggcuuuaagaacuggaugguacaccagcguuauuacaaucgaacuguccaacauuaaggagaauaaaugcaacgguaccgacgccaaggugaaacuaaucaagcaggaacucgauaaguauaaaaaugcaguaacugagcugcagcuucugaugcagucuacuccugccgcuggcucggggucagcaauauguagcggaaucgccgugugcaaggucuugcaccucgagggcgaagugaacaaaauuaagaaugcucugcugaguaccaacaaagccguugugucccucucuaauggugucagcguguuaacguucaagguacuggaccuuaagaacuacaucgauaaacaauugcugccaauucuaaauaagcaguccuguucaaucccgaacauagagacuguuauugaauuucagcagaaaaauaacaggcuccuggagaucacccgggaguucagugugaaugcgggggucacaacucccgugagcaccuauaugcuuacaaacucugaacuguugucccucauuaacgacaugccuaucaccaaugaucaaaagaaacugaugucaaacaaugugcagaucguccgccagcagagcuacaguauuaugugcauaaucaaggaggaaguuuuagcauaugugguacaacugccacucuacggagugauugacacgcccuguuggaaacuucauacuucuccucugugcacaaccaacacuaaggagggcuccaauaucuguuugacacgaaccgaucguggcugguacugcgacaacgccgggagcgucucguuuuucccacaggcugaaacguguaaggugcagucuaauagaguguuuugcgauaccaugaacucccuaacacugcccucagagguuaaucucugcaacauagacauuuucaauccuaaauaugauuguaagaucaugacaaguaaaaccgacgucagcuccucugugaucacaagccugggagccauuguaucaugcuacgguaagacuaaauguaccgcaaguaacaagaauaggggcaucauuaagacauuuuccaacgggugcgauuauguuagcaauaaaggaguggacaccgucucugugggcaacacucuuuacugugucaacaagcaagagggucagucacuguaugugaaaggggaaccaauaaucaauuucuacgacccguugguuuuucccagugaugaguucgacgcuagcauuucccaggugaacgaaaagaucaaucagucucucgccuuuauccggaaaucggaugagcuguuacacaacguaaaugucggaaagagcacgacaaacauuaugauaaccacuaucauuaucgugauuaucguuauacugcuacuccugaucgcggugggccuuuucuuguauugcaaggcccgcugaggacuaguggaagcauuuuccuggcugauuaaaagaaauuacucagcuauggucaucuguuccuguuagaaggcuaugcagcauauuauauacuaugcgcauguuaugaaaugcauaauaaaaaauuuuaaaaaaucuaaaagaucuaaaaaaaaaaaaaaaaaaaaaaaaaaaaaaaaaaaaaaaaaaaaaaaaaaaaaaaaaaaaaaaaugcaucccccccccccccccccccccccccccccccaaaggcucuuuucagagccaccagaauu

SEQ ID NO: 14538 - RNA, 1910 nt, Artificial Sequence
  mRNA product Design f-2 comprising derived and/or modified sequence from HRSV(Memphis-37)__AIY60640.1__F-del_DSCav1_mut1 (opt4)
gggagagcggcucggccauuuugucccagucaguccggaggcugcggcugcagaaguaccgccugcggaguaacugcaaagaagcuuaccauggagcugcccauccugaagaccaacgccaucaccaccauccuggccgccgugacccugugcuucgccagcagccagaacaucaccgaggaguucuaccagagcaccugcagcgccgugagcaagggcuaccugggcgcccugagaaccggcugguacaccagcgugaucaccaucgagcugagcaacaucaaggagaacaagugcaacggcaccgacgccaaggugaagcugaucaagcaggagcuggacaaguacaagaacgccgugaccgagcugcagcugcugaugcagagcacccccgccgccggcagcggcagcgccaucugcagcggcaucgccgugugcaaggugcugcaccuggagggcgaggugaacaagaucaagaacgcccugcugagcaccaacaaggccguggugagccugagcaacggcgugagcgugcugaccuucaaggugcuggaccugaagaacuacaucgacaagcagcugcugcccauccugaacaagcagagcugcagcauccccaacaucgagaccgugaucgaguuccagcagaagaacaacagacugcuggagaucaccagagaguucagcgugaacgccggcgugaccacccccgugagcaccuacaugcugaccaacagcgagcugcugagccugaucaacgacaugcccaucaccaacgaccagaagaagcugaugagcaacaacgugcagaucgugagacagcagagcuacagcaucaugugcaucaucaaggaggaggugcuggccuacguggugcagcugccccuguacggcgugaucgacacccccugcuggaagcugcacaccagcccccugugcaccaccaacaccaaggagggcagcaacaucugccugaccagaaccgacagaggcugguacugcgacaacgccggcagcgugagcuucuucccccaggccgagaccugcaaggugcagagcaacagaguguucugcgacaccaugaacagccugacccugcccagcgaggugaaccugugcaacaucgacaucuucaaccccaaguacgacugcaagaucaugaccagcaagaccgacgugagcagcagcgugaucaccagccugggcgccaucgugagcugcuacggcaagaccaagugcaccgccagcaacaagaacagaggcaucaucaagaccuucagcaacggcugcgacuacgugagcaacaagggcguggacaccgugagcgugggcaacacccuguacugcgugaacaagcaggagggccagagccuguacgugaagggcgagcccaucaucaacuucuacgacccccugguguuccccagcgacgaguucgacgccagcaucagccaggugaacgagaagaucaaccagagccuggccuucaucagaaagagcgacgagcugcugcacaacgugaacgugggcaagagcaccaccaacaucaugaucaccaccaucaucaucgugaucaucgugauccugcugcugcugaucgccgugggccuguuccuguacugcaaggccagaugaggacuaguggaagcauuuuccuggcugauuaaaagaaauuacucagcuauggucaucuguuccuguuagaaggcuaugcagcauauuauauacuaugcgcauguuaugaaaugcauaauaaaaaauuuuaaaaaaucuaaaagaucuaaaaaaaaaaaaaaaaaaaaaaaaaaaaaaaaaaaaaaaaaaaaaaaaaaaaaaaaaaaaaaaaugcaucccccccccccccccccccccccccccccccaaaggcucuuuucagagccaccagaauu

SEQ ID NO: 14539 - RNA, 1910 nt, Artificial Sequence
  mRNA product Design f-2 comprising derived and/or modified sequence from HRSV(Memphis-37)__AIY60640.1__F-del_DSCav1_mut1 (opt5)
gggagagcggcucggccauuuugucccagucaguccggaggcugcggcugcagaaguaccgccugcggaguaacugcaaagaagcuuaccauggagcugcccauccucaagaccaacgccauuacaacgauccuggcugccgugacccuuugcuucgcgagcucccagaauauuacagaagaguuuuaccaaucuaccuguagcgcugucuccaaaggcuaucugggggcccucagaacaggaugguacaccucuguuaucacaauugaacugagcaacaucaaggagaauaaaugcaacggcaccgacgccaaggugaaacuuaucaagcaggaacuggauaaguauaaaaaugcugugacggagcuccagcugcugaugcaguccaccccugccgcugggucuggaagcgccauuuguuccggcaucgcggucugcaaggugcuccaccuggagggggaaguuaacaaaauuaagaaugcccuucugagcacaaacaaagcuguggucucucucuccaauggagugagcguucugaccuucaaggugcuugaccugaagaacuacaucgauaaacaacuccugccgauucugaauaagcagucuuguuccauccccaacauugagacagucaucgaauuucagcagaaaaauaaccggcuccuggagaucacccgcgaguucagcgugaaugccggcgugacgacaccugucucuaccuauaugcuuacaaacuccgaacugcucagccugauuaacgacaugcccaucaccaaugaucaaaagaaacuuauguccaacaauguucagauugugagacagcagucuuacagcaucaugugcauuaucaaggaggaagugcuggcuuaugucgugcaacucccucuguacggcguuaucgacacccccuguuggaaacugcauacauccccucucugcacgaccaacacaaaggaggggagcaauauuugucugacccggacagaucgcggaugguacugcgacaacgccggcucuguguccuuuuucccgcaggcggaaaccuguaagguccagagcaauagaguguuuugcgauacgaugaacucucuuacacugcccagcgagguuaaucucugcaacaucgacauuuucaauccuaaauaugauuguaagaucaugaccuccaaaaccgacgugucuagcuccgucauuacaagccugggggccaucgugucuugcuacggaaagaccaaauguacagcuuccaacaagaaucggggcaucauuaagacguuuagcaacgggugcgauuaugucucuaauaaaggaguggacaccguuuccgugggcaacacacuuuacugugucaacaagcaagagggccagagccuguaugugaaaggggaacccaucauuaauuucuacgacccucucguuuuucccuccgaugaguucgacgccucuaucagccaggugaacgaaaagauuaaucagucccuggcuuuuauccgcaaaucugaugagcugcuccacaacgucaaugugggaaagagcaccacaaacauuaugaucaccacgaucauuaucgugauuaucguuauucugcuucugcucaucgccgucggccuguuccuguauugcaaggccagaugaggacuaguggaagcauuuuccuggcugauuaaaagaaauuacucagcuauggucaucuguuccuguuagaaggcuaugcagcauauuauauacuaugcgcauguuaugaaaugcauaauaaaaaauuuuaaaaaaucuaaaagaucuaaaaaaaaaaaaaaaaaaaaaaaaaaaaaaaaaaaaaaaaaaaaaaaaaaaaaaaaaaaaaaaaugcaucccccccccccccccccccccccccccccccaaaggcucuuuucagagccaccagaauu

SEQ ID NO: 14540 - RNA, 1910 nt, Artificial Sequence
  mRNA product Design f-2 comprising derived and/or modified sequence from HRSV(Memphis-37)__AIY60640.1__F-del_DSCav1_mut1 (opt6)
gggagagcggcucggccauuuugucccagucaguccggaggcugcggcugcagaaguaccgccugcggaguaacugcaaagaagcuuaccauggaauuaccaauacuaaaaacaaacgcaauaacaacaauucuagcagcaguaacauuaugcuuugcaucaucccaaaacaucacagaagaauuuuaucaaucaaccugcucagcaguuuccaaaggauacuuaggagcauuaagaacugguugguacacuucaguaaucaccaucgaacucucaaacaucaaggaaaacaaaugcaacggaacagacgcaaaaguuaaacucauaaaacaagaacuugacaaauacaaaaacgccguaacagaacuacaacuucucaugcaaucaacacccgcagcaggauccggaucagccauaugcucaggcauagcaguauguaaaguauuacaucuugaaggugaaguaaacaaaauaaaaaacgcacuucuaucaaccaacaaagcaguaguaucacuaucaaacggaguauccgucuuaacauuuaaaguucuagaccucaaaaacuauauagacaaacaauuacugccaauccucaauaaacaaucaugcucaauaccaaacaucgaaacaguaauagaauuucaacaaaaaaacaacagacuacuagaaauaacaagagaauuuuccgucaacgccggcguaacuacuccaguaucaacauauaugcuaaccaacucagaacuccuaucccucauaaacgacaugccaauaacuaaugaucaaaaaaaacuaaugucaaacaauguacaaauaguuagacaacaaucauacucaaucaugugcauaauaaaagaagaaguacuagcauacgucguccaacuaccccuauacggaguaauagacacaccuugcuggaaacuacacacaucaccccuaugcacaacaaauacaaaagaagguuccaacaucugccuaacaagaacugauagaggaugguacugcgacaacgccggaucaguaucauucuucccucaagcugaaaccugcaaaguacaaucaaacagaguauuuugcgauacaaugaacucccuaacacuucccucagaaguuaaucuuuguaauauagauauauucaacccaaaauacgacugcaaaauaaugacaaguaaaacagacguauccucaucuguaauuacaucacuaggagccauaguaucuugcuacggcaaaaccaaaugcacagcaucaaacaaaaacagagguauuaucaaaaccuucucaaacggaugugacuacguuucaaacaaaggaguagacacaguaucagucggaaacacccuauacuguguuaacaaacaagaaggacaaucacuguacguaaaaggagaacccauaauaaauuucuacgacccacuuguauuuccaucagacgaauuugaugcaucaaucucacaaguaaaugaaaaaauaaaccaaucauuagcauucauaagaaaaucugacgaguuacuacacaacguaaauguuggcaaaucaacaaccaauauaaugauaacaacaauaauaauaguaauaauagucauauuacuccuccucauagccgucggauuauucuuauacugcaaagcaagauaaggacuaguggaagcauuuuccuggcugauuaaaagaaauuacucagcuauggucaucuguuccuguuagaaggcuaugcagcauauuauauacuaugcgcauguuaugaaaugcauaauaaaaaauuuuaaaaaaucuaaaagaucuaaaaaaaaaaaaaaaaaaaaaaaaaaaaaaaaaaaaaaaaaaaaaaaaaaaaaaaaaaaaaaaaugcaucccccccccccccccccccccccccccccccaaaggcucuuuucagagccaccagaauu

SEQ ID NO: 14541 - RNA, 1910 nt, Artificial Sequence
  mRNA product Design f-2 comprising derived and/or modified sequence from HRSV(Memphis-37)__AIY60640.1__F-del_DSCav1_mut1 (opt11)
gggagagcggcucggccauuuugucccagucaguccggaggcugcggcugcagaaguaccgccugcggaguaacugcaaagaagcuuaccauggaacuccccauacuaaaaaccaacgccaucacaacaauccucgccgccgucacacucugcuucgccagcucccaaaacaucaccgaagaguucuaucaaucaaccugcuccgcagucucaaagggauaccucggagcccuccgcaccggaugguacacuuccgucaucacaauagaacucuccaacaucaaagaaaacaaaugcaacggcaccgacgcaaaagucaagcucaucaaacaagaacucgacaaauauaaaaacgccgucaccgaacuccaacuacucaugcaauccacacccgcggccggcucaggcagcgccaucugcucaggcaucgccgucugcaaaguccuccaccucgaaggcgaagucaacaaaaucaaaaacgcccuucuuucaaccaacaaggcaguaguaucccucucaaacggcgucagcguccugaccuucaaaguccuagaccucaaaaacuacauagauaaacaacuccuccccauacugaacaaacaaucgugcuccauccccaauaucgaaaccgucauagaguuccagcagaaaaacaacagacuucucgaaauaacccgagaguucucaguaaacgccggagucaccacacccguaagcaccuacaugcucacaaacucagaacuccuaucccucaucaacgacaugcccaucaccaacgaccagaaaaagcuaauguccaacaacguccaaauaguacgccaacaaagcuacucgauaaugugcaucaucaaggaagaaguacucgccuacgucguccaacucccccucuacggcguaaucgacacacccugcuggaaacuccacacguccccacucugcacaacaaacacaaaagaaggauccaacauaugccuaacccgcaccgacaggggcugguacugcgacaacgcaggcucagucagcuucuuuccccaagccgaaacaugcaaaguccaauccaaccgugucuucugcgacaccaugaacucgcucacccuacccucggaagucaaucucugcaacaucgacaucuucaacccaaaauacgacuguaaaaucaugaccagcaaaacagacguuucuuccagcgucaucacaucacucggcgcgaucguaucaugcuauggcaaaacaaagugcaccgcuagcaauaaaaaccgaggaaucauaaaaaccuucagcaacggcugcgacuacguauccaacaaaggcgucgacaccguauccgucggaaacacccucuacugcgucaacaagcaagaaggacaaucacucuacgucaaaggcgaaccaaucauaaacuucuacgacccacucguauuccccucagacgaguucgacgcauccaucucccaagucaacgaaaagaucaaccaaucucucgccuuuauacgcaaaagcgacgaacuccuucacaacguaaacgucggcaaaagcaccacuaacauaaugaucaccacaaucauaauaguaaucaucguaauacuccuccuacucaucgccgugggccuauuccucuauugcaaagcccgauaaggacuaguggaagcauuuuccuggcugauuaaaagaaauuacucagcuauggucaucuguuccuguuagaaggcuaugcagcauauuauauacuaugcgcauguuaugaaaugcauaauaaaaaauuuuaaaaaaucuaaaagaucuaaaaaaaaaaaaaaaaaaaaaaaaaaaaaaaaaaaaaaaaaaaaaaaaaaaaaaaaaaaaaaaaugcaucccccccccccccccccccccccccccccccaaaggcucuuuucagagccaccagaauu

SEQ ID NO: 14542 - RNA, 1901 nt, Artificial Sequence
  mRNA product Design f-3 comprising derived and/or modified sequence from HRSV(Memphis-37)__AIY60640.1__F-del_DSCav1_mut1 (opt1)
gggagagucccgcagucggcguccagcggcucugcuuguucgugugugugucguugcaggccuuauucaagcuuaccauggagcugcccauccucaagaccaacgccaucaccacgauccuggccgcggugacccugugcuucgccagcucccagaacaucaccgaggaguucuaccagagcacgugcuccgccgucagcaagggcuaccucggcgcccugcgcaccgggugguacaccagcgugaucaccaucgagcuguccaacaucaaggagaacaagugcaacggcaccgacgccaaggugaagcucaucaagcaggagcuggacaaguacaagaacgcggucacggagcugcagcuccugaugcagagcaccccggccgccggcuccgggagcgcgaucugcuccggcaucgccgucugcaaggugcugcaccucgagggcgaggugaacaagaucaagaacgcccugcuguccaccaacaaggccgucgugagccucuccaacggggugagcguccugaccuucaaggugcuggaccucaagaacuacaucgacaagcagcugcugcccauccugaacaagcagagcugcuccauccccaacaucgagaccgucaucgaguuccagcagaagaacaaccgccuccuggagaucacgcgggaguucagcgugaacgcgggcgugaccacccccgucuccaccuacaugcugacgaacagcgagcuccugucccugaucaacgacaugccgaucaccaacgaccagaagaagcucaugagcaacaacgugcagaucgugcgccagcaguccuacagcaucaugugcaucaucaaggaggagguccuggccuacguggugcagcugccccucuacggggucaucgacacccccugcuggaagcugcacaccagcccccugugcacgaccaacaccaaggagggcuccaacaucugccucacccggacggaccgcgggugguacugcgacaacgccggcagcguguccuucuucccgcaggccgagaccugcaagguccagagcaaccggguguucugcgacaccaugaacucccugacccugcccagcgaggugaaccucugcaacaucgacaucuucaaccccaaguacgacugcaagaucaugacguccaagaccgacgucagcuccagcgugaucaccucccugggcgccaucgugagcugcuacgggaagaccaagugcacggcgagcaacaagaaccgcggcaucaucaagaccuucuccaacgggugcgacuacgucagcaacaagggcguggacaccguguccgucggcaacacccuguacugcgugaacaagcaggagggccagagccucuacgugaagggggagcccaucaucaacuucuacgacccgcuggucuuccccuccgacgaguucgacgccagcaucucccaggugaacgagaagaucaaccagagccuggccuucauccggaaguccgacgagcuccugcacaacgugaacgucggcaagagcaccacgaacaucaugaucaccaccaucaucaucgugaucaucgugauccugcugcuccugaucgccgucgggcuguuccucuacugcaaggcccgcugaggacuaguacuggcugcaucucccuuuccucuguccuccauccuucucccaggauggugaagggggaccugguacccagugauccccaccccaggauccuaaaucaugacuuaccugcuaauaaaaacucauuggaaaagugagaagaucuaaaaaaaaaaaaaaaaaaaaaaaaaaaaaaaaaaaaaaaaaaaaaaaaaaaaaaaaaaaaaaaaugcaucccccccccccccccccccccccccccccccaaaggcucuuuucagagccaccagaauu

SEQ ID NO: 14543 - RNA, 1901 nt, Artificial Sequence
  mRNA product Design f-3 comprising derived and/or modified sequence from HRSV(Memphis-37)__AIY60640.1__F-del_DSCav1_mut1 (opt1)
gggagagucccgcagucggcguccagcggcucugcuuguucgugugugugucguugcaggccuuauucaagcuuaccauggagcugcccauccucaagaccaacgccaucaccacgauccuggccgcggugacccugugcuucgccagcucccagaacaucaccgaggaguucuaccagagcacgugcuccgccgucagcaagggcuaccucggggcccugcgcaccggcugguacaccuccgugaucaccaucgagcugagcaacaucaaggagaacaagugcaacgggaccgacgccaaggugaagcucaucaagcaggagcuggacaaguacaagaacgcggucacggagcugcagcuccugaugcaguccaccccggccgccggcagcggguccgccaucugcagcggcaucgcggugugcaaggugcugcaccucgagggcgaggucaacaagaucaagaacgcccugcuguccaccaacaaggccguggugagccucuccaacggggucagcgugcugaccuucaaggugcuggaccucaagaacuacaucgacaagcagcugcugcccauccucaacaagcaguccugcagcauccccaacaucgagacggucaucgaguuccagcagaagaacaaccggcugcuggagaucacccgcgaguucuccgugaacgccggcgugaccacccccgucagcacguacaugcucaccaacuccgagcugcugagccucaucaacgacaugccgaucaccaacgaccagaagaagcugaugagcaacaacgugcagaucgugcggcagcaguccuacagcaucaugugcaucaucaaggaggagguccuggccuacguggugcagcucccccuguacggggucaucgacacccccugcuggaagcugcacacgagcccccucugcaccaccaacaccaaggagggcuccaacaucugccugacgcgcaccgaccgggggugguacugcgacaacgcgggcuccgugagcuucuucccgcaggccgagaccugcaaggugcaguccaaccgcgucuucugcgacaccaugaacagccugacgcuccccuccgaggugaaccugugcaacaucgacaucuucaaccccaaguacgacugcaagaucaugaccagcaagaccgacgucuccagcuccgugaucaccagccugggcgccaucguguccugcuacgggaagacgaagugcaccgccagcaacaagaaccggggcaucaucaagaccuucuccaacgggugcgacuacgucagcaacaagggcguggacaccguguccgucggcaacacgcucuacugcgugaacaagcaggaggggcagagccuguacgugaagggcgagcccaucaucaacuucuacgacccgcuggucuuccccagcgacgaguucgacgccuccaucagccaggugaacgagaagaucaaccagucccucgcguucauccgcaagagcgacgagcugcugcacaacgugaacgucgggaaguccaccaccaacaucaugaucaccaccaucaucaucgugaucaucgugauccuccugcugcucaucgccgucggccuguuccuguacugcaaggcccggugaggacuaguacuggcugcaucucccuuuccucuguccuccauccuucucccaggauggugaagggggaccugguacccagugauccccaccccaggauccuaaaucaugacuuaccugcuaauaaaaacucauuggaaaagugagaagaucuaaaaaaaaaaaaaaaaaaaaaaaaaaaaaaaaaaaaaaaaaaaaaaaaaaaaaaaaaaaaaaaaugcaucccccccccccccccccccccccccccccccaaaggcucuuuucagagccaccagaauu

SEQ ID NO: 14544 - RNA, 1901 nt, Artificial Sequence
  mRNA product Design f-3 comprising derived and/or modified sequence from HRSV(Memphis-37)__AIY60640.1__F-del_DSCav1_mut1 (opt2)
gggagagucccgcagucggcguccagcggcucugcuuguucgugugugugucguugcaggccuuauucaagcuuaccauggagcuccccauccucaagaccaacgccaucaccaccauccucgccgccgucacccucugcuucgccuccucccagaacaucaccgaggaguucuaccaguccaccugcuccgccgucuccaagggcuaccucggcgcccuccgcaccggcugguacaccuccgucaucaccaucgagcucuccaacaucaaggagaacaagugcaacggcaccgacgccaaggucaagcucaucaagcaggagcucgacaaguacaagaacgccgucaccgagcuccagcuccucaugcaguccacccccgccgccggcuccggcuccgccaucugcuccggcaucgccgucugcaagguccuccaccucgagggcgaggucaacaagaucaagaacgcccuccucuccaccaacaaggccgucgucucccucuccaacggcgucuccguccucaccuucaagguccucgaccucaagaacuacaucgacaagcagcuccuccccauccucaacaagcaguccugcuccauccccaacaucgagaccgucaucgaguuccagcagaagaacaaccgccuccucgagaucacccgcgaguucuccgucaacgccggcgucaccacccccgucuccaccuacaugcucaccaacuccgagcuccucucccucaucaacgacaugcccaucaccaacgaccagaagaagcucauguccaacaacguccagaucguccgccagcaguccuacuccaucaugugcaucaucaaggaggagguccucgccuacgucguccagcucccccucuacggcgucaucgacacccccugcuggaagcuccacaccuccccccucugcaccaccaacaccaaggagggcuccaacaucugccucacccgcaccgaccgcggcugguacugcgacaacgccggcuccgucuccuucuucccccaggccgagaccugcaagguccaguccaaccgcgucuucugcgacaccaugaacucccucacccuccccuccgaggucaaccucugcaacaucgacaucuucaaccccaaguacgacugcaagaucaugaccuccaagaccgacgucuccuccuccgucaucaccucccucggcgccaucgucuccugcuacggcaagaccaagugcaccgccuccaacaagaaccgcggcaucaucaagaccuucuccaacggcugcgacuacgucuccaacaagggcgucgacaccgucuccgucggcaacacccucuacugcgucaacaagcaggagggccagucccucuacgucaagggcgagcccaucaucaacuucuacgacccccucgucuuccccuccgacgaguucgacgccuccaucucccaggucaacgagaagaucaaccagucccucgccuucauccgcaaguccgacgagcuccuccacaacgucaacgucggcaaguccaccaccaacaucaugaucaccaccaucaucaucgucaucaucgucauccuccuccuccucaucgccgucggccucuuccucuacugcaaggcccgcugaggacuaguacuggcugcaucucccuuuccucuguccuccauccuucucccaggauggugaagggggaccugguacccagugauccccaccccaggauccuaaaucaugacuuaccugcuaauaaaaacucauuggaaaagugagaagaucuaaaaaaaaaaaaaaaaaaaaaaaaaaaaaaaaaaaaaaaaaaaaaaaaaaaaaaaaaaaaaaaaugcaucccccccccccccccccccccccccccccccaaaggcucuuuucagagccaccagaauu

SEQ ID NO: 14545 - RNA, 1901 nt, Artificial Sequence
  mRNA product Design f-3 comprising derived and/or modified sequence from HRSV(Memphis-37)__AIY60640.1__F-del_DSCav1_mut1 (opt3)
gggagagucccgcagucggcguccagcggcucugcuuguucgugugugugucguugcaggccuuauucaagcuuaccauggagcugcccauccucaagaccaacgccauuacaacuauacuugcugcagugacgcugugcuucgccagcucccagaauaucaccgaagaguuuuaccaaucuacauguucagcggucaguaaaggcuauuugggggcuuuaagaacuggaugguacaccagcguuauuacaaucgaacuguccaacauuaaggagaauaaaugcaacgguaccgacgccaaggugaaacuaaucaagcaggaacucgauaaguauaaaaaugcaguaacugagcugcagcuucugaugcagucuacuccugccgcuggcucggggucagcaauauguagcggaaucgccgugugcaaggucuugcaccucgagggcgaagugaacaaaauuaagaaugcucugcugaguaccaacaaagccguugugucccucucuaauggugucagcguguuaacguucaagguacuggaccuuaagaacuacaucgauaaacaauugcugccaauucuaaauaagcaguccuguucaaucccgaacauagagacuguuauugaauuucagcagaaaaauaacaggcuccuggagaucacccgggaguucagugugaaugcgggggucacaacucccgugagcaccuauaugcuuacaaacucugaacuguugucccucauuaacgacaugccuaucaccaaugaucaaaagaaacugaugucaaacaaugugcagaucguccgccagcagagcuacaguauuaugugcauaaucaaggaggaaguuuuagcauaugugguacaacugccacucuacggagugauugacacgcccuguuggaaacuucauacuucuccucugugcacaaccaacacuaaggagggcuccaauaucuguuugacacgaaccgaucguggcugguacugcgacaacgccgggagcgucucguuuuucccacaggcugaaacguguaaggugcagucuaauagaguguuuugcgauaccaugaacucccuaacacugcccucagagguuaaucucugcaacauagacauuuucaauccuaaauaugauuguaagaucaugacaaguaaaaccgacgucagcuccucugugaucacaagccugggagccauuguaucaugcuacgguaagacuaaauguaccgcaaguaacaagaauaggggcaucauuaagacauuuuccaacgggugcgauuauguuagcaauaaaggaguggacaccgucucugugggcaacacucuuuacugugucaacaagcaagagggucagucacuguaugugaaaggggaaccaauaaucaauuucuacgacccguugguuuuucccagugaugaguucgacgcuagcauuucccaggugaacgaaaagaucaaucagucucucgccuuuauccggaaaucggaugagcuguuacacaacguaaaugucggaaagagcacgacaaacauuaugauaaccacuaucauuaucgugauuaucguuauacugcuacuccugaucgcggugggccuuuucuuguauugcaaggcccgcugaggacuaguacuggcugcaucucccuuuccucuguccuccauccuucucccaggauggugaagggggaccugguacccagugauccccaccccaggauccuaaaucaugacuuaccugcuaauaaaaacucauuggaaaagugagaagaucuaaaaaaaaaaaaaaaaaaaaaaaaaaaaaaaaaaaaaaaaaaaaaaaaaaaaaaaaaaaaaaaaugcaucccccccccccccccccccccccccccccccaaaggcucuuuucagagccaccagaauu

SEQ ID NO: 14546 - RNA, 1901 nt, Artificial Sequence
  mRNA product Design f-3 comprising derived and/or modified sequence from HRSV(Memphis-37)__AIY60640.1__F-del_DSCav1_mut1 (opt4)
gggagagucccgcagucggcguccagcggcucugcuuguucgugugugugucguugcaggccuuauucaagcuuaccauggagcugcccauccugaagaccaacgccaucaccaccauccuggccgccgugacccugugcuucgccagcagccagaacaucaccgaggaguucuaccagagcaccugcagcgccgugagcaagggcuaccugggcgcccugagaaccggcugguacaccagcgugaucaccaucgagcugagcaacaucaaggagaacaagugcaacggcaccgacgccaaggugaagcugaucaagcaggagcuggacaaguacaagaacgccgugaccgagcugcagcugcugaugcagagcacccccgccgccggcagcggcagcgccaucugcagcggcaucgccgugugcaaggugcugcaccuggagggcgaggugaacaagaucaagaacgcccugcugagcaccaacaaggccguggugagccugagcaacggcgugagcgugcugaccuucaaggugcuggaccugaagaacuacaucgacaagcagcugcugcccauccugaacaagcagagcugcagcauccccaacaucgagaccgugaucgaguuccagcagaagaacaacagacugcuggagaucaccagagaguucagcgugaacgccggcgugaccacccccgugagcaccuacaugcugaccaacagcgagcugcugagccugaucaacgacaugcccaucaccaacgaccagaagaagcugaugagcaacaacgugcagaucgugagacagcagagcuacagcaucaugugcaucaucaaggaggaggugcuggccuacguggugcagcugccccuguacggcgugaucgacacccccugcuggaagcugcacaccagcccccugugcaccaccaacaccaaggagggcagcaacaucugccugaccagaaccgacagaggcugguacugcgacaacgccggcagcgugagcuucuucccccaggccgagaccugcaaggugcagagcaacagaguguucugcgacaccaugaacagccugacccugcccagcgaggugaaccugugcaacaucgacaucuucaaccccaaguacgacugcaagaucaugaccagcaagaccgacgugagcagcagcgugaucaccagccugggcgccaucgugagcugcuacggcaagaccaagugcaccgccagcaacaagaacagaggcaucaucaagaccuucagcaacggcugcgacuacgugagcaacaagggcguggacaccgugagcgugggcaacacccuguacugcgugaacaagcaggagggccagagccuguacgugaagggcgagcccaucaucaacuucuacgacccccugguguuccccagcgacgaguucgacgccagcaucagccaggugaacgagaagaucaaccagagccuggccuucaucagaaagagcgacgagcugcugcacaacgugaacgugggcaagagcaccaccaacaucaugaucaccaccaucaucaucgugaucaucgugauccugcugcugcugaucgccgugggccuguuccuguacugcaaggccagaugaggacuaguacuggcugcaucucccuuuccucuguccuccauccuucucccaggauggugaagggggaccugguacccagugauccccaccccaggauccuaaaucaugacuuaccugcuaauaaaaacucauuggaaaagugagaagaucuaaaaaaaaaaaaaaaaaaaaaaaaaaaaaaaaaaaaaaaaaaaaaaaaaaaaaaaaaaaaaaaaugcaucccccccccccccccccccccccccccccccaaaggcucuuuucagagccaccagaauu

SEQ ID NO: 14547 - RNA, 1901 nt, Artificial Sequence
  mRNA product Design f-3 comprising derived and/or modified sequence from HRSV(Memphis-37)__AIY60640.1__F-del_DSCav1_mut1 (opt5)
gggagagucccgcagucggcguccagcggcucugcuuguucgugugugugucguugcaggccuuauucaagcuuaccauggagcugcccauccucaagaccaacgccauuacaacgauccuggcugccgugacccuuugcuucgcgagcucccagaauauuacagaagaguuuuaccaaucuaccuguagcgcugucuccaaaggcuaucugggggcccucagaacaggaugguacaccucuguuaucacaauugaacugagcaacaucaaggagaauaaaugcaacggcaccgacgccaaggugaaacuuaucaagcaggaacuggauaaguauaaaaaugcugugacggagcuccagcugcugaugcaguccaccccugccgcugggucuggaagcgccauuuguuccggcaucgcggucugcaaggugcuccaccuggagggggaaguuaacaaaauuaagaaugcccuucugagcacaaacaaagcuguggucucucucuccaauggagugagcguucugaccuucaaggugcuugaccugaagaacuacaucgauaaacaacuccugccgauucugaauaagcagucuuguuccauccccaacauugagacagucaucgaauuucagcagaaaaauaaccggcuccuggagaucacccgcgaguucagcgugaaugccggcgugacgacaccugucucuaccuauaugcuuacaaacuccgaacugcucagccugauuaacgacaugcccaucaccaaugaucaaaagaaacuuauguccaacaauguucagauugugagacagcagucuuacagcaucaugugcauuaucaaggaggaagugcuggcuuaugucgugcaacucccucuguacggcguuaucgacacccccuguuggaaacugcauacauccccucucugcacgaccaacacaaaggaggggagcaauauuugucugacccggacagaucgcggaugguacugcgacaacgccggcucuguguccuuuuucccgcaggcggaaaccuguaagguccagagcaauagaguguuuugcgauacgaugaacucucuuacacugcccagcgagguuaaucucugcaacaucgacauuuucaauccuaaauaugauuguaagaucaugaccuccaaaaccgacgugucuagcuccgucauuacaagccugggggccaucgugucuugcuacggaaagaccaaauguacagcuuccaacaagaaucggggcaucauuaagacguuuagcaacgggugcgauuaugucucuaauaaaggaguggacaccguuuccgugggcaacacacuuuacugugucaacaagcaagagggccagagccuguaugugaaaggggaacccaucauuaauuucuacgacccucucguuuuucccuccgaugaguucgacgccucuaucagccaggugaacgaaaagauuaaucagucccuggcuuuuauccgcaaaucugaugagcugcuccacaacgucaaugugggaaagagcaccacaaacauuaugaucaccacgaucauuaucgugauuaucguuauucugcuucugcucaucgccgucggccuguuccuguauugcaaggccagaugaggacuaguacuggcugcaucucccuuuccucuguccuccauccuucucccaggauggugaagggggaccugguacccagugauccccaccccaggauccuaaaucaugacuuaccugcuaauaaaaacucauuggaaaagugagaagaucuaaaaaaaaaaaaaaaaaaaaaaaaaaaaaaaaaaaaaaaaaaaaaaaaaaaaaaaaaaaaaaaaugcaucccccccccccccccccccccccccccccccaaaggcucuuuucagagccaccagaauu

SEQ ID NO: 14548 - RNA, 1901 nt, Artificial Sequence
  mRNA product Design f-3 comprising derived and/or modified sequence from HRSV(Memphis-37)__AIY60640.1__F-del_DSCav1_mut1 (opt6)
gggagagucccgcagucggcguccagcggcucugcuuguucgugugugugucguugcaggccuuauucaagcuuaccauggaauuaccaauacuaaaaacaaacgcaauaacaacaauucuagcagcaguaacauuaugcuuugcaucaucccaaaacaucacagaagaauuuuaucaaucaaccugcucagcaguuuccaaaggauacuuaggagcauuaagaacugguugguacacuucaguaaucaccaucgaacucucaaacaucaaggaaaacaaaugcaacggaacagacgcaaaaguuaaacucauaaaacaagaacuugacaaauacaaaaacgccguaacagaacuacaacuucucaugcaaucaacacccgcagcaggauccggaucagccauaugcucaggcauagcaguauguaaaguauuacaucuugaaggugaaguaaacaaaauaaaaaacgcacuucuaucaaccaacaaagcaguaguaucacuaucaaacggaguauccgucuuaacauuuaaaguucuagaccucaaaaacuauauagacaaacaauuacugccaauccucaauaaacaaucaugcucaauaccaaacaucgaaacaguaauagaauuucaacaaaaaaacaacagacuacuagaaauaacaagagaauuuuccgucaacgccggcguaacuacuccaguaucaacauauaugcuaaccaacucagaacuccuaucccucauaaacgacaugccaauaacuaaugaucaaaaaaaacuaaugucaaacaauguacaaauaguuagacaacaaucauacucaaucaugugcauaauaaaagaagaaguacuagcauacgucguccaacuaccccuauacggaguaauagacacaccuugcuggaaacuacacacaucaccccuaugcacaacaaauacaaaagaagguuccaacaucugccuaacaagaacugauagaggaugguacugcgacaacgccggaucaguaucauucuucccucaagcugaaaccugcaaaguacaaucaaacagaguauuuugcgauacaaugaacucccuaacacuucccucagaaguuaaucuuuguaauauagauauauucaacccaaaauacgacugcaaaauaaugacaaguaaaacagacguauccucaucuguaauuacaucacuaggagccauaguaucuugcuacggcaaaaccaaaugcacagcaucaaacaaaaacagagguauuaucaaaaccuucucaaacggaugugacuacguuucaaacaaaggaguagacacaguaucagucggaaacacccuauacuguguuaacaaacaagaaggacaaucacuguacguaaaaggagaacccauaauaaauuucuacgacccacuuguauuuccaucagacgaauuugaugcaucaaucucacaaguaaaugaaaaaauaaaccaaucauuagcauucauaagaaaaucugacgaguuacuacacaacguaaauguuggcaaaucaacaaccaauauaaugauaacaacaauaauaauaguaauaauagucauauuacuccuccucauagccgucggauuauucuuauacugcaaagcaagauaaggacuaguacuggcugcaucucccuuuccucuguccuccauccuucucccaggauggugaagggggaccugguacccagugauccccaccccaggauccuaaaucaugacuuaccugcuaauaaaaacucauuggaaaagugagaagaucuaaaaaaaaaaaaaaaaaaaaaaaaaaaaaaaaaaaaaaaaaaaaaaaaaaaaaaaaaaaaaaaaugcaucccccccccccccccccccccccccccccccaaaggcucuuuucagagccaccagaauu

SEQ ID NO: 14549 - RNA, 1901 nt, Artificial Sequence
  mRNA product Design f-3 comprising derived and/or modified sequence from HRSV(Memphis-37)__AIY60640.1__F-del_DSCav1_mut1 (opt11)
gggagagucccgcagucggcguccagcggcucugcuuguucgugugugugucguugcaggccuuauucaagcuuaccauggaacuccccauacuaaaaaccaacgccaucacaacaauccucgccgccgucacacucugcuucgccagcucccaaaacaucaccgaagaguucuaucaaucaaccugcuccgcagucucaaagggauaccucggagcccuccgcaccggaugguacacuuccgucaucacaauagaacucuccaacaucaaagaaaacaaaugcaacggcaccgacgcaaaagucaagcucaucaaacaagaacucgacaaauauaaaaacgccgucaccgaacuccaacuacucaugcaauccacacccgcggccggcucaggcagcgccaucugcucaggcaucgccgucugcaaaguccuccaccucgaaggcgaagucaacaaaaucaaaaacgcccuucuuucaaccaacaaggcaguaguaucccucucaaacggcgucagcguccugaccuucaaaguccuagaccucaaaaacuacauagauaaacaacuccuccccauacugaacaaacaaucgugcuccauccccaauaucgaaaccgucauagaguuccagcagaaaaacaacagacuucucgaaauaacccgagaguucucaguaaacgccggagucaccacacccguaagcaccuacaugcucacaaacucagaacuccuaucccucaucaacgacaugcccaucaccaacgaccagaaaaagcuaauguccaacaacguccaaauaguacgccaacaaagcuacucgauaaugugcaucaucaaggaagaaguacucgccuacgucguccaacucccccucuacggcguaaucgacacacccugcuggaaacuccacacguccccacucugcacaacaaacacaaaagaaggauccaacauaugccuaacccgcaccgacaggggcugguacugcgacaacgcaggcucagucagcuucuuuccccaagccgaaacaugcaaaguccaauccaaccgugucuucugcgacaccaugaacucgcucacccuacccucggaagucaaucucugcaacaucgacaucuucaacccaaaauacgacuguaaaaucaugaccagcaaaacagacguuucuuccagcgucaucacaucacucggcgcgaucguaucaugcuauggcaaaacaaagugcaccgcuagcaauaaaaaccgaggaaucauaaaaaccuucagcaacggcugcgacuacguauccaacaaaggcgucgacaccguauccgucggaaacacccucuacugcgucaacaagcaagaaggacaaucacucuacgucaaaggcgaaccaaucauaaacuucuacgacccacucguauuccccucagacgaguucgacgcauccaucucccaagucaacgaaaagaucaaccaaucucucgccuuuauacgcaaaagcgacgaacuccuucacaacguaaacgucggcaaaagcaccacuaacauaaugaucaccacaaucauaauaguaaucaucguaauacuccuccuacucaucgccgugggccuauuccucuauugcaaagcccgauaaggacuaguacuggcugcaucucccuuuccucuguccuccauccuucucccaggauggugaagggggaccugguacccagugauccccaccccaggauccuaaaucaugacuuaccugcuaauaaaaacucauuggaaaagugagaagaucuaaaaaaaaaaaaaaaaaaaaaaaaaaaaaaaaaaaaaaaaaaaaaaaaaaaaaaaaaaaaaaaaugcaucccccccccccccccccccccccccccccccaaaggcucuuuucagagccaccagaauu

SEQ ID NO: 14550 - RNA, 2117 nt, Artificial Sequence
  mRNA product Design f-4 comprising derived and/or modified sequence from HRSV(Memphis-37)__AIY60640.1__F-del_DSCav1_mut1 (opt1)
gggagagucccgcagucggcguccagcggcucugcuuguucgugugugugucguugcaggccuuauucaagcuuaccauggagcugcccauccucaagaccaacgccaucaccacgauccuggccgcggugacccugugcuucgccagcucccagaacaucaccgaggaguucuaccagagcacgugcuccgccgucagcaagggcuaccucggcgcccugcgcaccgggugguacaccagcgugaucaccaucgagcuguccaacaucaaggagaacaagugcaacggcaccgacgccaaggugaagcucaucaagcaggagcuggacaaguacaagaacgcggucacggagcugcagcuccugaugcagagcaccccggccgccggcuccgggagcgcgaucugcuccggcaucgccgucugcaaggugcugcaccucgagggcgaggugaacaagaucaagaacgcccugcuguccaccaacaaggccgucgugagccucuccaacggggugagcguccugaccuucaaggugcuggaccucaagaacuacaucgacaagcagcugcugcccauccugaacaagcagagcugcuccauccccaacaucgagaccgucaucgaguuccagcagaagaacaaccgccuccuggagaucacgcgggaguucagcgugaacgcgggcgugaccacccccgucuccaccuacaugcugacgaacagcgagcuccugucccugaucaacgacaugccgaucaccaacgaccagaagaagcucaugagcaacaacgugcagaucgugcgccagcaguccuacagcaucaugugcaucaucaaggaggagguccuggccuacguggugcagcugccccucuacggggucaucgacacccccugcuggaagcugcacaccagcccccugugcacgaccaacaccaaggagggcuccaacaucugccucacccggacggaccgcgggugguacugcgacaacgccggcagcguguccuucuucccgcaggccgagaccugcaagguccagagcaaccggguguucugcgacaccaugaacucccugacccugcccagcgaggugaaccucugcaacaucgacaucuucaaccccaaguacgacugcaagaucaugacguccaagaccgacgucagcuccagcgugaucaccucccugggcgccaucgugagcugcuacgggaagaccaagugcacggcgagcaacaagaaccgcggcaucaucaagaccuucuccaacgggugcgacuacgucagcaacaagggcguggacaccguguccgucggcaacacccuguacugcgugaacaagcaggagggccagagccucuacgugaagggggagcccaucaucaacuucuacgacccgcuggucuuccccuccgacgaguucgacgccagcaucucccaggugaacgagaagaucaaccagagccuggccuucauccggaaguccgacgagcuccugcacaacgugaacgucggcaagagcaccacgaacaucaugaucaccaccaucaucaucgugaucaucgugauccugcugcuccugaucgccgucgggcuguuccucuacugcaaggcccgcugaggacuagugaagggaacacccaaauuuaauucagccuuaagcacaauuaauuaagagugaaacguaauuguacaagcaguuggucacccaccauagggcaugaucaacaccgcaaccuuuccuuuuucccccagugauucugaaaaaccccucuucccuucagcuugcuuagauguuccaaauuuaguaagcuuaaggcggccuacagaagaaaaagaaaaaaaaggccacaaaaguucccucucacuuucaguaaauaaaauaaaagcagcaacagaaauaaagaaauaaaugaaauucaaaaugaaauaaauauuguguugugcagcauuaaaaaaucaauaaaaauuaaaaaugagcaagaucuaaaaaaaaaaaaaaaaaaaaaaaaaaaaaaaaaaaaaaaaaaaaaaaaaaaaaaaaaaaaaaaaugcaucccccccccccccccccccccccccccccccaaaggcucuuuucagagccaccagaauu

SEQ ID NO: 14551 - RNA, 2117 nt, Artificial Sequence
  mRNA product Design f-4 comprising derived and/or modified sequence from HRSV(Memphis-37)__AIY60640.1__F-del_DSCav1_mut1 (opt1)
gggagagucccgcagucggcguccagcggcucugcuuguucgugugugugucguugcaggccuuauucaagcuuaccauggagcugcccauccucaagaccaacgccaucaccacgauccuggccgcggugacccugugcuucgccagcucccagaacaucaccgaggaguucuaccagagcacgugcuccgccgucagcaagggcuaccucggggcccugcgcaccggcugguacaccuccgugaucaccaucgagcugagcaacaucaaggagaacaagugcaacgggaccgacgccaaggugaagcucaucaagcaggagcuggacaaguacaagaacgcggucacggagcugcagcuccugaugcaguccaccccggccgccggcagcggguccgccaucugcagcggcaucgcggugugcaaggugcugcaccucgagggcgaggucaacaagaucaagaacgcccugcuguccaccaacaaggccguggugagccucuccaacggggucagcgugcugaccuucaaggugcuggaccucaagaacuacaucgacaagcagcugcugcccauccucaacaagcaguccugcagcauccccaacaucgagacggucaucgaguuccagcagaagaacaaccggcugcuggagaucacccgcgaguucuccgugaacgccggcgugaccacccccgucagcacguacaugcucaccaacuccgagcugcugagccucaucaacgacaugccgaucaccaacgaccagaagaagcugaugagcaacaacgugcagaucgugcggcagcaguccuacagcaucaugugcaucaucaaggaggagguccuggccuacguggugcagcucccccuguacggggucaucgacacccccugcuggaagcugcacacgagcccccucugcaccaccaacaccaaggagggcuccaacaucugccugacgcgcaccgaccgggggugguacugcgacaacgcgggcuccgugagcuucuucccgcaggccgagaccugcaaggugcaguccaaccgcgucuucugcgacaccaugaacagccugacgcuccccuccgaggugaaccugugcaacaucgacaucuucaaccccaaguacgacugcaagaucaugaccagcaagaccgacgucuccagcuccgugaucaccagccugggcgccaucguguccugcuacgggaagacgaagugcaccgccagcaacaagaaccggggcaucaucaagaccuucuccaacgggugcgacuacgucagcaacaagggcguggacaccguguccgucggcaacacgcucuacugcgugaacaagcaggaggggcagagccuguacgugaagggcgagcccaucaucaacuucuacgacccgcuggucuuccccagcgacgaguucgacgccuccaucagccaggugaacgagaagaucaaccagucccucgcguucauccgcaagagcgacgagcugcugcacaacgugaacgucgggaaguccaccaccaacaucaugaucaccaccaucaucaucgugaucaucgugauccuccugcugcucaucgccgucggccuguuccuguacugcaaggcccggugaggacuagugaagggaacacccaaauuuaauucagccuuaagcacaauuaauuaagagugaaacguaauuguacaagcaguuggucacccaccauagggcaugaucaacaccgcaaccuuuccuuuuucccccagugauucugaaaaaccccucuucccuucagcuugcuuagauguuccaaauuuaguaagcuuaaggcggccuacagaagaaaaagaaaaaaaaggccacaaaaguucccucucacuuucaguaaauaaaauaaaagcagcaacagaaauaaagaaauaaaugaaauucaaaaugaaauaaauauuguguugugcagcauuaaaaaaucaauaaaaauuaaaaaugagcaagaucuaaaaaaaaaaaaaaaaaaaaaaaaaaaaaaaaaaaaaaaaaaaaaaaaaaaaaaaaaaaaaaaaugcaucccccccccccccccccccccccccccccccaaaggcucuuuucagagccaccagaauu

SEQ ID NO: 14552 - RNA, 2117 nt, Artificial Sequence
  mRNA product Design f-4 comprising derived and/or modified sequence from HRSV(Memphis-37)__AIY60640.1__F-del_DSCav1_mut1 (opt2)
gggagagucccgcagucggcguccagcggcucugcuuguucgugugugugucguugcaggccuuauucaagcuuaccauggagcuccccauccucaagaccaacgccaucaccaccauccucgccgccgucacccucugcuucgccuccucccagaacaucaccgaggaguucuaccaguccaccugcuccgccgucuccaagggcuaccucggcgcccuccgcaccggcugguacaccuccgucaucaccaucgagcucuccaacaucaaggagaacaagugcaacggcaccgacgccaaggucaagcucaucaagcaggagcucgacaaguacaagaacgccgucaccgagcuccagcuccucaugcaguccacccccgccgccggcuccggcuccgccaucugcuccggcaucgccgucugcaagguccuccaccucgagggcgaggucaacaagaucaagaacgcccuccucuccaccaacaaggccgucgucucccucuccaacggcgucuccguccucaccuucaagguccucgaccucaagaacuacaucgacaagcagcuccuccccauccucaacaagcaguccugcuccauccccaacaucgagaccgucaucgaguuccagcagaagaacaaccgccuccucgagaucacccgcgaguucuccgucaacgccggcgucaccacccccgucuccaccuacaugcucaccaacuccgagcuccucucccucaucaacgacaugcccaucaccaacgaccagaagaagcucauguccaacaacguccagaucguccgccagcaguccuacuccaucaugugcaucaucaaggaggagguccucgccuacgucguccagcucccccucuacggcgucaucgacacccccugcuggaagcuccacaccuccccccucugcaccaccaacaccaaggagggcuccaacaucugccucacccgcaccgaccgcggcugguacugcgacaacgccggcuccgucuccuucuucccccaggccgagaccugcaagguccaguccaaccgcgucuucugcgacaccaugaacucccucacccuccccuccgaggucaaccucugcaacaucgacaucuucaaccccaaguacgacugcaagaucaugaccuccaagaccgacgucuccuccuccgucaucaccucccucggcgccaucgucuccugcuacggcaagaccaagugcaccgccuccaacaagaaccgcggcaucaucaagaccuucuccaacggcugcgacuacgucuccaacaagggcgucgacaccgucuccgucggcaacacccucuacugcgucaacaagcaggagggccagucccucuacgucaagggcgagcccaucaucaacuucuacgacccccucgucuuccccuccgacgaguucgacgccuccaucucccaggucaacgagaagaucaaccagucccucgccuucauccgcaaguccgacgagcuccuccacaacgucaacgucggcaaguccaccaccaacaucaugaucaccaccaucaucaucgucaucaucgucauccuccuccuccucaucgccgucggccucuuccucuacugcaaggcccgcugaggacuagugaagggaacacccaaauuuaauucagccuuaagcacaauuaauuaagagugaaacguaauuguacaagcaguuggucacccaccauagggcaugaucaacaccgcaaccuuuccuuuuucccccagugauucugaaaaaccccucuucccuucagcuugcuuagauguuccaaauuuaguaagcuuaaggcggccuacagaagaaaaagaaaaaaaaggccacaaaaguucccucucacuuucaguaaauaaaauaaaagcagcaacagaaauaaagaaauaaaugaaauucaaaaugaaauaaauauuguguugugcagcauuaaaaaaucaauaaaaauuaaaaaugagcaagaucuaaaaaaaaaaaaaaaaaaaaaaaaaaaaaaaaaaaaaaaaaaaaaaaaaaaaaaaaaaaaaaaaugcaucccccccccccccccccccccccccccccccaaaggcucuuuucagagccaccagaauu

SEQ ID NO: 14553 - RNA, 2117 nt, Artificial Sequence
  mRNA product Design f-4 comprising derived and/or modified sequence from HRSV(Memphis-37)__AIY60640.1__F-del_DSCav1_mut1 (opt3)
gggagagucccgcagucggcguccagcggcucugcuuguucgugugugugucguugcaggccuuauucaagcuuaccauggagcugcccauccucaagaccaacgccauuacaacuauacuugcugcagugacgcugugcuucgccagcucccagaauaucaccgaagaguuuuaccaaucuacauguucagcggucaguaaaggcuauuugggggcuuuaagaacuggaugguacaccagcguuauuacaaucgaacuguccaacauuaaggagaauaaaugcaacgguaccgacgccaaggugaaacuaaucaagcaggaacucgauaaguauaaaaaugcaguaacugagcugcagcuucugaugcagucuacuccugccgcuggcucggggucagcaauauguagcggaaucgccgugugcaaggucuugcaccucgagggcgaagugaacaaaauuaagaaugcucugcugaguaccaacaaagccguugugucccucucuaauggugucagcguguuaacguucaagguacuggaccuuaagaacuacaucgauaaacaauugcugccaauucuaaauaagcaguccuguucaaucccgaacauagagacuguuauugaauuucagcagaaaaauaacaggcuccuggagaucacccgggaguucagugugaaugcgggggucacaacucccgugagcaccuauaugcuuacaaacucugaacuguugucccucauuaacgacaugccuaucaccaaugaucaaaagaaacugaugucaaacaaugugcagaucguccgccagcagagcuacaguauuaugugcauaaucaaggaggaaguuuuagcauaugugguacaacugccacucuacggagugauugacacgcccuguuggaaacuucauacuucuccucugugcacaaccaacacuaaggagggcuccaauaucuguuugacacgaaccgaucguggcugguacugcgacaacgccgggagcgucucguuuuucccacaggcugaaacguguaaggugcagucuaauagaguguuuugcgauaccaugaacucccuaacacugcccucagagguuaaucucugcaacauagacauuuucaauccuaaauaugauuguaagaucaugacaaguaaaaccgacgucagcuccucugugaucacaagccugggagccauuguaucaugcuacgguaagacuaaauguaccgcaaguaacaagaauaggggcaucauuaagacauuuuccaacgggugcgauuauguuagcaauaaaggaguggacaccgucucugugggcaacacucuuuacugugucaacaagcaagagggucagucacuguaugugaaaggggaaccaauaaucaauuucuacgacccguugguuuuucccagugaugaguucgacgcuagcauuucccaggugaacgaaaagaucaaucagucucucgccuuuauccggaaaucggaugagcuguuacacaacguaaaugucggaaagagcacgacaaacauuaugauaaccacuaucauuaucgugauuaucguuauacugcuacuccugaucgcggugggccuuuucuuguauugcaaggcccgcugaggacuagugaagggaacacccaaauuuaauucagccuuaagcacaauuaauuaagagugaaacguaauuguacaagcaguuggucacccaccauagggcaugaucaacaccgcaaccuuuccuuuuucccccagugauucugaaaaaccccucuucccuucagcuugcuuagauguuccaaauuuaguaagcuuaaggcggccuacagaagaaaaagaaaaaaaaggccacaaaaguucccucucacuuucaguaaauaaaauaaaagcagcaacagaaauaaagaaauaaaugaaauucaaaaugaaauaaauauuguguugugcagcauuaaaaaaucaauaaaaauuaaaaaugagcaagaucuaaaaaaaaaaaaaaaaaaaaaaaaaaaaaaaaaaaaaaaaaaaaaaaaaaaaaaaaaaaaaaaaugcaucccccccccccccccccccccccccccccccaaaggcucuuuucagagccaccagaauu

SEQ ID NO: 14554 - RNA, 2117 nt, Artificial Sequence
  mRNA product Design f-4 comprising derived and/or modified sequence from HRSV(Memphis-37)__AIY60640.1__F-del_DSCav1_mut1 (opt4)
gggagagucccgcagucggcguccagcggcucugcuuguucgugugugugucguugcaggccuuauucaagcuuaccauggagcugcccauccugaagaccaacgccaucaccaccauccuggccgccgugacccugugcuucgccagcagccagaacaucaccgaggaguucuaccagagcaccugcagcgccgugagcaagggcuaccugggcgcccugagaaccggcugguacaccagcgugaucaccaucgagcugagcaacaucaaggagaacaagugcaacggcaccgacgccaaggugaagcugaucaagcaggagcuggacaaguacaagaacgccgugaccgagcugcagcugcugaugcagagcacccccgccgccggcagcggcagcgccaucugcagcggcaucgccgugugcaaggugcugcaccuggagggcgaggugaacaagaucaagaacgcccugcugagcaccaacaaggccguggugagccugagcaacggcgugagcgugcugaccuucaaggugcuggaccugaagaacuacaucgacaagcagcugcugcccauccugaacaagcagagcugcagcauccccaacaucgagaccgugaucgaguuccagcagaagaacaacagacugcuggagaucaccagagaguucagcgugaacgccggcgugaccacccccgugagcaccuacaugcugaccaacagcgagcugcugagccugaucaacgacaugcccaucaccaacgaccagaagaagcugaugagcaacaacgugcagaucgugagacagcagagcuacagcaucaugugcaucaucaaggaggaggugcuggccuacguggugcagcugccccuguacggcgugaucgacacccccugcuggaagcugcacaccagcccccugugcaccaccaacaccaaggagggcagcaacaucugccugaccagaaccgacagaggcugguacugcgacaacgccggcagcgugagcuucuucccccaggccgagaccugcaaggugcagagcaacagaguguucugcgacaccaugaacagccugacccugcccagcgaggugaaccugugcaacaucgacaucuucaaccccaaguacgacugcaagaucaugaccagcaagaccgacgugagcagcagcgugaucaccagccugggcgccaucgugagcugcuacggcaagaccaagugcaccgccagcaacaagaacagaggcaucaucaagaccuucagcaacggcugcgacuacgugagcaacaagggcguggacaccgugagcgugggcaacacccuguacugcgugaacaagcaggagggccagagccuguacgugaagggcgagcccaucaucaacuucuacgacccccugguguuccccagcgacgaguucgacgccagcaucagccaggugaacgagaagaucaaccagagccuggccuucaucagaaagagcgacgagcugcugcacaacgugaacgugggcaagagcaccaccaacaucaugaucaccaccaucaucaucgugaucaucgugauccugcugcugcugaucgccgugggccuguuccuguacugcaaggccagaugaggacuagugaagggaacacccaaauuuaauucagccuuaagcacaauuaauuaagagugaaacguaauuguacaagcaguuggucacccaccauagggcaugaucaacaccgcaaccuuuccuuuuucccccagugauucugaaaaaccccucuucccuucagcuugcuuagauguuccaaauuuaguaagcuuaaggcggccuacagaagaaaaagaaaaaaaaggccacaaaaguucccucucacuuucaguaaauaaaauaaaagcagcaacagaaauaaagaaauaaaugaaauucaaaaugaaauaaauauuguguugugcagcauuaaaaaaucaauaaaaauuaaaaaugagcaagaucuaaaaaaaaaaaaaaaaaaaaaaaaaaaaaaaaaaaaaaaaaaaaaaaaaaaaaaaaaaaaaaaaugcaucccccccccccccccccccccccccccccccaaaggcucuuuucagagccaccagaauu

SEQ ID NO: 14555 - RNA, 2117 nt, Artificial Sequence
  mRNA product Design f-4 comprising derived and/or modified sequence from HRSV(Memphis-37)__AIY60640.1__F-del_DSCav1_mut1 (opt5)
gggagagucccgcagucggcguccagcggcucugcuuguucgugugugugucguugcaggccuuauucaagcuuaccauggagcugcccauccucaagaccaacgccauuacaacgauccuggcugccgugacccuuugcuucgcgagcucccagaauauuacagaagaguuuuaccaaucuaccuguagcgcugucuccaaaggcuaucugggggcccucagaacaggaugguacaccucuguuaucacaauugaacugagcaacaucaaggagaauaaaugcaacggcaccgacgccaaggugaaacuuaucaagcaggaacuggauaaguauaaaaaugcugugacggagcuccagcugcugaugcaguccaccccugccgcugggucuggaagcgccauuuguuccggcaucgcggucugcaaggugcuccaccuggagggggaaguuaacaaaauuaagaaugcccuucugagcacaaacaaagcuguggucucucucuccaauggagugagcguucugaccuucaaggugcuugaccugaagaacuacaucgauaaacaacuccugccgauucugaauaagcagucuuguuccauccccaacauugagacagucaucgaauuucagcagaaaaauaaccggcuccuggagaucacccgcgaguucagcgugaaugccggcgugacgacaccugucucuaccuauaugcuuacaaacuccgaacugcucagccugauuaacgacaugcccaucaccaaugaucaaaagaaacuuauguccaacaauguucagauugugagacagcagucuuacagcaucaugugcauuaucaaggaggaagugcuggcuuaugucgugcaacucccucuguacggcguuaucgacacccccuguuggaaacugcauacauccccucucugcacgaccaacacaaaggaggggagcaauauuugucugacccggacagaucgcggaugguacugcgacaacgccggcucuguguccuuuuucccgcaggcggaaaccuguaagguccagagcaauagaguguuuugcgauacgaugaacucucuuacacugcccagcgagguuaaucucugcaacaucgacauuuucaauccuaaauaugauuguaagaucaugaccuccaaaaccgacgugucuagcuccgucauuacaagccugggggccaucgugucuugcuacggaaagaccaaauguacagcuuccaacaagaaucggggcaucauuaagacguuuagcaacgggugcgauuaugucucuaauaaaggaguggacaccguuuccgugggcaacacacuuuacugugucaacaagcaagagggccagagccuguaugugaaaggggaacccaucauuaauuucuacgacccucucguuuuucccuccgaugaguucgacgccucuaucagccaggugaacgaaaagauuaaucagucccuggcuuuuauccgcaaaucugaugagcugcuccacaacgucaaugugggaaagagcaccacaaacauuaugaucaccacgaucauuaucgugauuaucguuauucugcuucugcucaucgccgucggccuguuccuguauugcaaggccagaugaggacuagugaagggaacacccaaauuuaauucagccuuaagcacaauuaauuaagagugaaacguaauuguacaagcaguuggucacccaccauagggcaugaucaacaccgcaaccuuuccuuuuucccccagugauucugaaaaaccccucuucccuucagcuugcuuagauguuccaaauuuaguaagcuuaaggcggccuacagaagaaaaagaaaaaaaaggccacaaaaguucccucucacuuucaguaaauaaaauaaaagcagcaacagaaauaaagaaauaaaugaaauucaaaaugaaauaaauauuguguugugcagcauuaaaaaaucaauaaaaauuaaaaaugagcaagaucuaaaaaaaaaaaaaaaaaaaaaaaaaaaaaaaaaaaaaaaaaaaaaaaaaaaaaaaaaaaaaaaaugcaucccccccccccccccccccccccccccccccaaaggcucuuuucagagccaccagaauu

SEQ ID NO: 14556 - RNA, 2117 nt, Artificial Sequence
  mRNA product Design f-4 comprising derived and/or modified sequence from HRSV(Memphis-37)__AIY60640.1__F-del_DSCav1_mut1 (opt6)
gggagagucccgcagucggcguccagcggcucugcuuguucgugugugugucguugcaggccuuauucaagcuuaccauggaauuaccaauacuaaaaacaaacgcaauaacaacaauucuagcagcaguaacauuaugcuuugcaucaucccaaaacaucacagaagaauuuuaucaaucaaccugcucagcaguuuccaaaggauacuuaggagcauuaagaacugguugguacacuucaguaaucaccaucgaacucucaaacaucaaggaaaacaaaugcaacggaacagacgcaaaaguuaaacucauaaaacaagaacuugacaaauacaaaaacgccguaacagaacuacaacuucucaugcaaucaacacccgcagcaggauccggaucagccauaugcucaggcauagcaguauguaaaguauuacaucuugaaggugaaguaaacaaaauaaaaaacgcacuucuaucaaccaacaaagcaguaguaucacuaucaaacggaguauccgucuuaacauuuaaaguucuagaccucaaaaacuauauagacaaacaauuacugccaauccucaauaaacaaucaugcucaauaccaaacaucgaaacaguaauagaauuucaacaaaaaaacaacagacuacuagaaauaacaagagaauuuuccgucaacgccggcguaacuacuccaguaucaacauauaugcuaaccaacucagaacuccuaucccucauaaacgacaugccaauaacuaaugaucaaaaaaaacuaaugucaaacaauguacaaauaguuagacaacaaucauacucaaucaugugcauaauaaaagaagaaguacuagcauacgucguccaacuaccccuauacggaguaauagacacaccuugcuggaaacuacacacaucaccccuaugcacaacaaauacaaaagaagguuccaacaucugccuaacaagaacugauagaggaugguacugcgacaacgccggaucaguaucauucuucccucaagcugaaaccugcaaaguacaaucaaacagaguauuuugcgauacaaugaacucccuaacacuucccucagaaguuaaucuuuguaauauagauauauucaacccaaaauacgacugcaaaauaaugacaaguaaaacagacguauccucaucuguaauuacaucacuaggagccauaguaucuugcuacggcaaaaccaaaugcacagcaucaaacaaaaacagagguauuaucaaaaccuucucaaacggaugugacuacguuucaaacaaaggaguagacacaguaucagucggaaacacccuauacuguguuaacaaacaagaaggacaaucacuguacguaaaaggagaacccauaauaaauuucuacgacccacuuguauuuccaucagacgaauuugaugcaucaaucucacaaguaaaugaaaaaauaaaccaaucauuagcauucauaagaaaaucugacgaguuacuacacaacguaaauguuggcaaaucaacaaccaauauaaugauaacaacaauaauaauaguaauaauagucauauuacuccuccucauagccgucggauuauucuuauacugcaaagcaagauaaggacuagugaagggaacacccaaauuuaauucagccuuaagcacaauuaauuaagagugaaacguaauuguacaagcaguuggucacccaccauagggcaugaucaacaccgcaaccuuuccuuuuucccccagugauucugaaaaaccccucuucccuucagcuugcuuagauguuccaaauuuaguaagcuuaaggcggccuacagaagaaaaagaaaaaaaaggccacaaaaguucccucucacuuucaguaaauaaaauaaaagcagcaacagaaauaaagaaauaaaugaaauucaaaaugaaauaaauauuguguugugcagcauuaaaaaaucaauaaaaauuaaaaaugagcaagaucuaaaaaaaaaaaaaaaaaaaaaaaaaaaaaaaaaaaaaaaaaaaaaaaaaaaaaaaaaaaaaaaaugcaucccccccccccccccccccccccccccccccaaaggcucuuuucagagccaccagaauu

SEQ ID NO: 14557 - RNA, 2117 nt, Artificial Sequence
  mRNA product Design f-4 comprising derived and/or modified sequence from HRSV(Memphis-37)__AIY60640.1__F-del_DSCav1_mut1 (opt11)
gggagagucccgcagucggcguccagcggcucugcuuguucgugugugugucguugcaggccuuauucaagcuuaccauggaacuccccauacuaaaaaccaacgccaucacaacaauccucgccgccgucacacucugcuucgccagcucccaaaacaucaccgaagaguucuaucaaucaaccugcuccgcagucucaaagggauaccucggagcccuccgcaccggaugguacacuuccgucaucacaauagaacucuccaacaucaaagaaaacaaaugcaacggcaccgacgcaaaagucaagcucaucaaacaagaacucgacaaauauaaaaacgccgucaccgaacuccaacuacucaugcaauccacacccgcggccggcucaggcagcgccaucugcucaggcaucgccgucugcaaaguccuccaccucgaaggcgaagucaacaaaaucaaaaacgcccuucuuucaaccaacaaggcaguaguaucccucucaaacggcgucagcguccugaccuucaaaguccuagaccucaaaaacuacauagauaaacaacuccuccccauacugaacaaacaaucgugcuccauccccaauaucgaaaccgucauagaguuccagcagaaaaacaacagacuucucgaaauaacccgagaguucucaguaaacgccggagucaccacacccguaagcaccuacaugcucacaaacucagaacuccuaucccucaucaacgacaugcccaucaccaacgaccagaaaaagcuaauguccaacaacguccaaauaguacgccaacaaagcuacucgauaaugugcaucaucaaggaagaaguacucgccuacgucguccaacucccccucuacggcguaaucgacacacccugcuggaaacuccacacguccccacucugcacaacaaacacaaaagaaggauccaacauaugccuaacccgcaccgacaggggcugguacugcgacaacgcaggcucagucagcuucuuuccccaagccgaaacaugcaaaguccaauccaaccgugucuucugcgacaccaugaacucgcucacccuacccucggaagucaaucucugcaacaucgacaucuucaacccaaaauacgacuguaaaaucaugaccagcaaaacagacguuucuuccagcgucaucacaucacucggcgcgaucguaucaugcuauggcaaaacaaagugcaccgcuagcaauaaaaaccgaggaaucauaaaaaccuucagcaacggcugcgacuacguauccaacaaaggcgucgacaccguauccgucggaaacacccucuacugcgucaacaagcaagaaggacaaucacucuacgucaaaggcgaaccaaucauaaacuucuacgacccacucguauuccccucagacgaguucgacgcauccaucucccaagucaacgaaaagaucaaccaaucucucgccuuuauacgcaaaagcgacgaacuccuucacaacguaaacgucggcaaaagcaccacuaacauaaugaucaccacaaucauaauaguaaucaucguaauacuccuccuacucaucgccgugggccuauuccucuauugcaaagcccgauaaggacuagugaagggaacacccaaauuuaauucagccuuaagcacaauuaauuaagagugaaacguaauuguacaagcaguuggucacccaccauagggcaugaucaacaccgcaaccuuuccuuuuucccccagugauucugaaaaaccccucuucccuucagcuugcuuagauguuccaaauuuaguaagcuuaaggcggccuacagaagaaaaagaaaaaaaaggccacaaaaguucccucucacuuucaguaaauaaaauaaaagcagcaacagaaauaaagaaauaaaugaaauucaaaaugaaauaaauauuguguugugcagcauuaaaaaaucaauaaaaauuaaaaaugagcaagaucuaaaaaaaaaaaaaaaaaaaaaaaaaaaaaaaaaaaaaaaaaaaaaaaaaaaaaaaaaaaaaaaaugcaucccccccccccccccccccccccccccccccaaaggcucuuuucagagccaccagaauu

SEQ ID NO: 14558 - RNA, 1893 nt, Artificial Sequence
  mRNA product Design f-5 comprising derived and/or modified sequence from HRSV(Memphis-37)__AIY60640.1__F-del_DSCav1_mut1 (opt1)
gggagacuuucccauucuguagcagaauuugguguugccuguggucuuggucccgcggagaagcuuaccauggagcugcccauccucaagaccaacgccaucaccacgauccuggccgcggugacccugugcuucgccagcucccagaacaucaccgaggaguucuaccagagcacgugcuccgccgucagcaagggcuaccucggcgcccugcgcaccgggugguacaccagcgugaucaccaucgagcuguccaacaucaaggagaacaagugcaacggcaccgacgccaaggugaagcucaucaagcaggagcuggacaaguacaagaacgcggucacggagcugcagcuccugaugcagagcaccccggccgccggcuccgggagcgcgaucugcuccggcaucgccgucugcaaggugcugcaccucgagggcgaggugaacaagaucaagaacgcccugcuguccaccaacaaggccgucgugagccucuccaacggggugagcguccugaccuucaaggugcuggaccucaagaacuacaucgacaagcagcugcugcccauccugaacaagcagagcugcuccauccccaacaucgagaccgucaucgaguuccagcagaagaacaaccgccuccuggagaucacgcgggaguucagcgugaacgcgggcgugaccacccccgucuccaccuacaugcugacgaacagcgagcuccugucccugaucaacgacaugccgaucaccaacgaccagaagaagcucaugagcaacaacgugcagaucgugcgccagcaguccuacagcaucaugugcaucaucaaggaggagguccuggccuacguggugcagcugccccucuacggggucaucgacacccccugcuggaagcugcacaccagcccccugugcacgaccaacaccaaggagggcuccaacaucugccucacccggacggaccgcgggugguacugcgacaacgccggcagcguguccuucuucccgcaggccgagaccugcaagguccagagcaaccggguguucugcgacaccaugaacucccugacccugcccagcgaggugaaccucugcaacaucgacaucuucaaccccaaguacgacugcaagaucaugacguccaagaccgacgucagcuccagcgugaucaccucccugggcgccaucgugagcugcuacgggaagaccaagugcacggcgagcaacaagaaccgcggcaucaucaagaccuucuccaacgggugcgacuacgucagcaacaagggcguggacaccguguccgucggcaacacccuguacugcgugaacaagcaggagggccagagccucuacgugaagggggagcccaucaucaacuucuacgacccgcuggucuuccccuccgacgaguucgacgccagcaucucccaggugaacgagaagaucaaccagagccuggccuucauccggaaguccgacgagcuccugcacaacgugaacgucggcaagagcaccacgaacaucaugaucaccaccaucaucaucgugaucaucgugauccugcugcuccugaucgccgucgggcuguuccucuacugcaaggcccgcugaggacuaguacuggcugcaucucccuuuccucuguccuccauccuucucccaggauggugaagggggaccugguacccagugauccccaccccaggauccuaaaucaugacuuaccugcuaauaaaaacucauuggaaaagugagaagaucuaaaaaaaaaaaaaaaaaaaaaaaaaaaaaaaaaaaaaaaaaaaaaaaaaaaaaaaaaaaaaaaaugcaucccccccccccccccccccccccccccccccaaaggcucuuuucagagccaccagaauu

SEQ ID NO: 14559 - RNA, 1893 nt, Artificial Sequence
  mRNA product Design f-5 comprising derived and/or modified sequence from HRSV(Memphis-37)__AIY60640.1__F-del_DSCav1_mut1 (opt1)
gggagacuuucccauucuguagcagaauuugguguugccuguggucuuggucccgcggagaagcuuaccauggagcugcccauccucaagaccaacgccaucaccacgauccuggccgcggugacccugugcuucgccagcucccagaacaucaccgaggaguucuaccagagcacgugcuccgccgucagcaagggcuaccucggggcccugcgcaccggcugguacaccuccgugaucaccaucgagcugagcaacaucaaggagaacaagugcaacgggaccgacgccaaggugaagcucaucaagcaggagcuggacaaguacaagaacgcggucacggagcugcagcuccugaugcaguccaccccggccgccggcagcggguccgccaucugcagcggcaucgcggugugcaaggugcugcaccucgagggcgaggucaacaagaucaagaacgcccugcuguccaccaacaaggccguggugagccucuccaacggggucagcgugcugaccuucaaggugcuggaccucaagaacuacaucgacaagcagcugcugcccauccucaacaagcaguccugcagcauccccaacaucgagacggucaucgaguuccagcagaagaacaaccggcugcuggagaucacccgcgaguucuccgugaacgccggcgugaccacccccgucagcacguacaugcucaccaacuccgagcugcugagccucaucaacgacaugccgaucaccaacgaccagaagaagcugaugagcaacaacgugcagaucgugcggcagcaguccuacagcaucaugugcaucaucaaggaggagguccuggccuacguggugcagcucccccuguacggggucaucgacacccccugcuggaagcugcacacgagcccccucugcaccaccaacaccaaggagggcuccaacaucugccugacgcgcaccgaccgggggugguacugcgacaacgcgggcuccgugagcuucuucccgcaggccgagaccugcaaggugcaguccaaccgcgucuucugcgacaccaugaacagccugacgcuccccuccgaggugaaccugugcaacaucgacaucuucaaccccaaguacgacugcaagaucaugaccagcaagaccgacgucuccagcuccgugaucaccagccugggcgccaucguguccugcuacgggaagacgaagugcaccgccagcaacaagaaccggggcaucaucaagaccuucuccaacgggugcgacuacgucagcaacaagggcguggacaccguguccgucggcaacacgcucuacugcgugaacaagcaggaggggcagagccuguacgugaagggcgagcccaucaucaacuucuacgacccgcuggucuuccccagcgacgaguucgacgccuccaucagccaggugaacgagaagaucaaccagucccucgcguucauccgcaagagcgacgagcugcugcacaacgugaacgucgggaaguccaccaccaacaucaugaucaccaccaucaucaucgugaucaucgugauccuccugcugcucaucgccgucggccuguuccuguacugcaaggcccggugaggacuaguacuggcugcaucucccuuuccucuguccuccauccuucucccaggauggugaagggggaccugguacccagugauccccaccccaggauccuaaaucaugacuuaccugcuaauaaaaacucauuggaaaagugagaagaucuaaaaaaaaaaaaaaaaaaaaaaaaaaaaaaaaaaaaaaaaaaaaaaaaaaaaaaaaaaaaaaaaugcaucccccccccccccccccccccccccccccccaaaggcucuuuucagagccaccagaauu

SEQ ID NO: 14560 - RNA, 1893 nt, Artificial Sequence
  mRNA product Design f-5 comprising derived and/or modified sequence from HRSV(Memphis-37)__AIY60640.1__F-del_DSCav1_mut1 (opt2)
gggagacuuucccauucuguagcagaauuugguguugccuguggucuuggucccgcggagaagcuuaccauggagcuccccauccucaagaccaacgccaucaccaccauccucgccgccgucacccucugcuucgccuccucccagaacaucaccgaggaguucuaccaguccaccugcuccgccgucuccaagggcuaccucggcgcccuccgcaccggcugguacaccuccgucaucaccaucgagcucuccaacaucaaggagaacaagugcaacggcaccgacgccaaggucaagcucaucaagcaggagcucgacaaguacaagaacgccgucaccgagcuccagcuccucaugcaguccacccccgccgccggcuccggcuccgccaucugcuccggcaucgccgucugcaagguccuccaccucgagggcgaggucaacaagaucaagaacgcccuccucuccaccaacaaggccgucgucucccucuccaacggcgucuccguccucaccuucaagguccucgaccucaagaacuacaucgacaagcagcuccuccccauccucaacaagcaguccugcuccauccccaacaucgagaccgucaucgaguuccagcagaagaacaaccgccuccucgagaucacccgcgaguucuccgucaacgccggcgucaccacccccgucuccaccuacaugcucaccaacuccgagcuccucucccucaucaacgacaugcccaucaccaacgaccagaagaagcucauguccaacaacguccagaucguccgccagcaguccuacuccaucaugugcaucaucaaggaggagguccucgccuacgucguccagcucccccucuacggcgucaucgacacccccugcuggaagcuccacaccuccccccucugcaccaccaacaccaaggagggcuccaacaucugccucacccgcaccgaccgcggcugguacugcgacaacgccggcuccgucuccuucuucccccaggccgagaccugcaagguccaguccaaccgcgucuucugcgacaccaugaacucccucacccuccccuccgaggucaaccucugcaacaucgacaucuucaaccccaaguacgacugcaagaucaugaccuccaagaccgacgucuccuccuccgucaucaccucccucggcgccaucgucuccugcuacggcaagaccaagugcaccgccuccaacaagaaccgcggcaucaucaagaccuucuccaacggcugcgacuacgucuccaacaagggcgucgacaccgucuccgucggcaacacccucuacugcgucaacaagcaggagggccagucccucuacgucaagggcgagcccaucaucaacuucuacgacccccucgucuuccccuccgacgaguucgacgccuccaucucccaggucaacgagaagaucaaccagucccucgccuucauccgcaaguccgacgagcuccuccacaacgucaacgucggcaaguccaccaccaacaucaugaucaccaccaucaucaucgucaucaucgucauccuccuccuccucaucgccgucggccucuuccucuacugcaaggcccgcugaggacuaguacuggcugcaucucccuuuccucuguccuccauccuucucccaggauggugaagggggaccugguacccagugauccccaccccaggauccuaaaucaugacuuaccugcuaauaaaaacucauuggaaaagugagaagaucuaaaaaaaaaaaaaaaaaaaaaaaaaaaaaaaaaaaaaaaaaaaaaaaaaaaaaaaaaaaaaaaaugcaucccccccccccccccccccccccccccccccaaaggcucuuuucagagccaccagaauu

SEQ ID NO: 14561 - RNA, 1893 nt, Artificial Sequence
  mRNA product Design f-5 comprising derived and/or modified sequence from HRSV(Memphis-37)__AIY60640.1__F-del_DSCav1_mut1 (opt3)
gggagacuuucccauucuguagcagaauuugguguugccuguggucuuggucccgcggagaagcuuaccauggagcugcccauccucaagaccaacgccauuacaacuauacuugcugcagugacgcugugcuucgccagcucccagaauaucaccgaagaguuuuaccaaucuacauguucagcggucaguaaaggcuauuugggggcuuuaagaacuggaugguacaccagcguuauuacaaucgaacuguccaacauuaaggagaauaaaugcaacgguaccgacgccaaggugaaacuaaucaagcaggaacucgauaaguauaaaaaugcaguaacugagcugcagcuucugaugcagucuacuccugccgcuggcucggggucagcaauauguagcggaaucgccgugugcaaggucuugcaccucgagggcgaagugaacaaaauuaagaaugcucugcugaguaccaacaaagccguugugucccucucuaauggugucagcguguuaacguucaagguacuggaccuuaagaacuacaucgauaaacaauugcugccaauucuaaauaagcaguccuguucaaucccgaacauagagacuguuauugaauuucagcagaaaaauaacaggcuccuggagaucacccgggaguucagugugaaugcgggggucacaacucccgugagcaccuauaugcuuacaaacucugaacuguugucccucauuaacgacaugccuaucaccaaugaucaaaagaaacugaugucaaacaaugugcagaucguccgccagcagagcuacaguauuaugugcauaaucaaggaggaaguuuuagcauaugugguacaacugccacucuacggagugauugacacgcccuguuggaaacuucauacuucuccucugugcacaaccaacacuaaggagggcuccaauaucuguuugacacgaaccgaucguggcugguacugcgacaacgccgggagcgucucguuuuucccacaggcugaaacguguaaggugcagucuaauagaguguuuugcgauaccaugaacucccuaacacugcccucagagguuaaucucugcaacauagacauuuucaauccuaaauaugauuguaagaucaugacaaguaaaaccgacgucagcuccucugugaucacaagccugggagccauuguaucaugcuacgguaagacuaaauguaccgcaaguaacaagaauaggggcaucauuaagacauuuuccaacgggugcgauuauguuagcaauaaaggaguggacaccgucucugugggcaacacucuuuacugugucaacaagcaagagggucagucacuguaugugaaaggggaaccaauaaucaauuucuacgacccguugguuuuucccagugaugaguucgacgcuagcauuucccaggugaacgaaaagaucaaucagucucucgccuuuauccggaaaucggaugagcuguuacacaacguaaaugucggaaagagcacgacaaacauuaugauaaccacuaucauuaucgugauuaucguuauacugcuacuccugaucgcggugggccuuuucuuguauugcaaggcccgcugaggacuaguacuggcugcaucucccuuuccucuguccuccauccuucucccaggauggugaagggggaccugguacccagugauccccaccccaggauccuaaaucaugacuuaccugcuaauaaaaacucauuggaaaagugagaagaucuaaaaaaaaaaaaaaaaaaaaaaaaaaaaaaaaaaaaaaaaaaaaaaaaaaaaaaaaaaaaaaaaugcaucccccccccccccccccccccccccccccccaaaggcucuuuucagagccaccagaauu

SEQ ID NO: 14562 - RNA, 1893 nt, Artificial Sequence
  mRNA product Design f-5 comprising derived and/or modified sequence from HRSV(Memphis-37)__AIY60640.1__F-del_DSCav1_mut1 (opt4)
gggagacuuucccauucuguagcagaauuugguguugccuguggucuuggucccgcggagaagcuuaccauggagcugcccauccugaagaccaacgccaucaccaccauccuggccgccgugacccugugcuucgccagcagccagaacaucaccgaggaguucuaccagagcaccugcagcgccgugagcaagggcuaccugggcgcccugagaaccggcugguacaccagcgugaucaccaucgagcugagcaacaucaaggagaacaagugcaacggcaccgacgccaaggugaagcugaucaagcaggagcuggacaaguacaagaacgccgugaccgagcugcagcugcugaugcagagcacccccgccgccggcagcggcagcgccaucugcagcggcaucgccgugugcaaggugcugcaccuggagggcgaggugaacaagaucaagaacgcccugcugagcaccaacaaggccguggugagccugagcaacggcgugagcgugcugaccuucaaggugcuggaccugaagaacuacaucgacaagcagcugcugcccauccugaacaagcagagcugcagcauccccaacaucgagaccgugaucgaguuccagcagaagaacaacagacugcuggagaucaccagagaguucagcgugaacgccggcgugaccacccccgugagcaccuacaugcugaccaacagcgagcugcugagccugaucaacgacaugcccaucaccaacgaccagaagaagcugaugagcaacaacgugcagaucgugagacagcagagcuacagcaucaugugcaucaucaaggaggaggugcuggccuacguggugcagcugccccuguacggcgugaucgacacccccugcuggaagcugcacaccagcccccugugcaccaccaacaccaaggagggcagcaacaucugccugaccagaaccgacagaggcugguacugcgacaacgccggcagcgugagcuucuucccccaggccgagaccugcaaggugcagagcaacagaguguucugcgacaccaugaacagccugacccugcccagcgaggugaaccugugcaacaucgacaucuucaaccccaaguacgacugcaagaucaugaccagcaagaccgacgugagcagcagcgugaucaccagccugggcgccaucgugagcugcuacggcaagaccaagugcaccgccagcaacaagaacagaggcaucaucaagaccuucagcaacggcugcgacuacgugagcaacaagggcguggacaccgugagcgugggcaacacccuguacugcgugaacaagcaggagggccagagccuguacgugaagggcgagcccaucaucaacuucuacgacccccugguguuccccagcgacgaguucgacgccagcaucagccaggugaacgagaagaucaaccagagccuggccuucaucagaaagagcgacgagcugcugcacaacgugaacgugggcaagagcaccaccaacaucaugaucaccaccaucaucaucgugaucaucgugauccugcugcugcugaucgccgugggccuguuccuguacugcaaggccagaugaggacuaguacuggcugcaucucccuuuccucuguccuccauccuucucccaggauggugaagggggaccugguacccagugauccccaccccaggauccuaaaucaugacuuaccugcuaauaaaaacucauuggaaaagugagaagaucuaaaaaaaaaaaaaaaaaaaaaaaaaaaaaaaaaaaaaaaaaaaaaaaaaaaaaaaaaaaaaaaaugcaucccccccccccccccccccccccccccccccaaaggcucuuuucagagccaccagaauu

SEQ ID NO: 14563 - RNA, 1893 nt, Artificial Sequence
  mRNA product Design f-5 comprising derived and/or modified sequence from HRSV(Memphis-37)__AIY60640.1__F-del_DSCav1_mut1 (opt5)
gggagacuuucccauucuguagcagaauuugguguugccuguggucuuggucccgcggagaagcuuaccauggagcugcccauccucaagaccaacgccauuacaacgauccuggcugccgugacccuuugcuucgcgagcucccagaauauuacagaagaguuuuaccaaucuaccuguagcgcugucuccaaaggcuaucugggggcccucagaacaggaugguacaccucuguuaucacaauugaacugagcaacaucaaggagaauaaaugcaacggcaccgacgccaaggugaaacuuaucaagcaggaacuggauaaguauaaaaaugcugugacggagcuccagcugcugaugcaguccaccccugccgcugggucuggaagcgccauuuguuccggcaucgcggucugcaaggugcuccaccuggagggggaaguuaacaaaauuaagaaugcccuucugagcacaaacaaagcuguggucucucucuccaauggagugagcguucugaccuucaaggugcuugaccugaagaacuacaucgauaaacaacuccugccgauucugaauaagcagucuuguuccauccccaacauugagacagucaucgaauuucagcagaaaaauaaccggcuccuggagaucacccgcgaguucagcgugaaugccggcgugacgacaccugucucuaccuauaugcuuacaaacuccgaacugcucagccugauuaacgacaugcccaucaccaaugaucaaaagaaacuuauguccaacaauguucagauugugagacagcagucuuacagcaucaugugcauuaucaaggaggaagugcuggcuuaugucgugcaacucccucuguacggcguuaucgacacccccuguuggaaacugcauacauccccucucugcacgaccaacacaaaggaggggagcaauauuugucugacccggacagaucgcggaugguacugcgacaacgccggcucuguguccuuuuucccgcaggcggaaaccuguaagguccagagcaauagaguguuuugcgauacgaugaacucucuuacacugcccagcgagguuaaucucugcaacaucgacauuuucaauccuaaauaugauuguaagaucaugaccuccaaaaccgacgugucuagcuccgucauuacaagccugggggccaucgugucuugcuacggaaagaccaaauguacagcuuccaacaagaaucggggcaucauuaagacguuuagcaacgggugcgauuaugucucuaauaaaggaguggacaccguuuccgugggcaacacacuuuacugugucaacaagcaagagggccagagccuguaugugaaaggggaacccaucauuaauuucuacgacccucucguuuuucccuccgaugaguucgacgccucuaucagccaggugaacgaaaagauuaaucagucccuggcuuuuauccgcaaaucugaugagcugcuccacaacgucaaugugggaaagagcaccacaaacauuaugaucaccacgaucauuaucgugauuaucguuauucugcuucugcucaucgccgucggccuguuccuguauugcaaggccagaugaggacuaguacuggcugcaucucccuuuccucuguccuccauccuucucccaggauggugaagggggaccugguacccagugauccccaccccaggauccuaaaucaugacuuaccugcuaauaaaaacucauuggaaaagugagaagaucuaaaaaaaaaaaaaaaaaaaaaaaaaaaaaaaaaaaaaaaaaaaaaaaaaaaaaaaaaaaaaaaaugcaucccccccccccccccccccccccccccccccaaaggcucuuuucagagccaccagaauu

SEQ ID NO: 14564 - RNA, 1893 nt, Artificial Sequence
  mRNA product Design f-5 comprising derived and/or modified sequence from HRSV(Memphis-37)__AIY60640.1__F-del_DSCav1_mut1 (opt6)
gggagacuuucccauucuguagcagaauuugguguugccuguggucuuggucccgcggagaagcuuaccauggaauuaccaauacuaaaaacaaacgcaauaacaacaauucuagcagcaguaacauuaugcuuugcaucaucccaaaacaucacagaagaauuuuaucaaucaaccugcucagcaguuuccaaaggauacuuaggagcauuaagaacugguugguacacuucaguaaucaccaucgaacucucaaacaucaaggaaaacaaaugcaacggaacagacgcaaaaguuaaacucauaaaacaagaacuugacaaauacaaaaacgccguaacagaacuacaacuucucaugcaaucaacacccgcagcaggauccggaucagccauaugcucaggcauagcaguauguaaaguauuacaucuugaaggugaaguaaacaaaauaaaaaacgcacuucuaucaaccaacaaagcaguaguaucacuaucaaacggaguauccgucuuaacauuuaaaguucuagaccucaaaaacuauauagacaaacaauuacugccaauccucaauaaacaaucaugcucaauaccaaacaucgaaacaguaauagaauuucaacaaaaaaacaacagacuacuagaaauaacaagagaauuuuccgucaacgccggcguaacuacuccaguaucaacauauaugcuaaccaacucagaacuccuaucccucauaaacgacaugccaauaacuaaugaucaaaaaaaacuaaugucaaacaauguacaaauaguuagacaacaaucauacucaaucaugugcauaauaaaagaagaaguacuagcauacgucguccaacuaccccuauacggaguaauagacacaccuugcuggaaacuacacacaucaccccuaugcacaacaaauacaaaagaagguuccaacaucugccuaacaagaacugauagaggaugguacugcgacaacgccggaucaguaucauucuucccucaagcugaaaccugcaaaguacaaucaaacagaguauuuugcgauacaaugaacucccuaacacuucccucagaaguuaaucuuuguaauauagauauauucaacccaaaauacgacugcaaaauaaugacaaguaaaacagacguauccucaucuguaauuacaucacuaggagccauaguaucuugcuacggcaaaaccaaaugcacagcaucaaacaaaaacagagguauuaucaaaaccuucucaaacggaugugacuacguuucaaacaaaggaguagacacaguaucagucggaaacacccuauacuguguuaacaaacaagaaggacaaucacuguacguaaaaggagaacccauaauaaauuucuacgacccacuuguauuuccaucagacgaauuugaugcaucaaucucacaaguaaaugaaaaaauaaaccaaucauuagcauucauaagaaaaucugacgaguuacuacacaacguaaauguuggcaaaucaacaaccaauauaaugauaacaacaauaauaauaguaauaauagucauauuacuccuccucauagccgucggauuauucuuauacugcaaagcaagauaaggacuaguacuggcugcaucucccuuuccucuguccuccauccuucucccaggauggugaagggggaccugguacccagugauccccaccccaggauccuaaaucaugacuuaccugcuaauaaaaacucauuggaaaagugagaagaucuaaaaaaaaaaaaaaaaaaaaaaaaaaaaaaaaaaaaaaaaaaaaaaaaaaaaaaaaaaaaaaaaugcaucccccccccccccccccccccccccccccccaaaggcucuuuucagagccaccagaauu

SEQ ID NO: 14565 - RNA, 1893 nt, Artificial Sequence
  mRNA product Design f-5 comprising derived and/or modified sequence from HRSV(Memphis-37)__AIY60640.1__F-del_DSCav1_mut1 (opt11)
gggagacuuucccauucuguagcagaauuugguguugccuguggucuuggucccgcggagaagcuuaccauggaacuccccauacuaaaaaccaacgccaucacaacaauccucgccgccgucacacucugcuucgccagcucccaaaacaucaccgaagaguucuaucaaucaaccugcuccgcagucucaaagggauaccucggagcccuccgcaccggaugguacacuuccgucaucacaauagaacucuccaacaucaaagaaaacaaaugcaacggcaccgacgcaaaagucaagcucaucaaacaagaacucgacaaauauaaaaacgccgucaccgaacuccaacuacucaugcaauccacacccgcggccggcucaggcagcgccaucugcucaggcaucgccgucugcaaaguccuccaccucgaaggcgaagucaacaaaaucaaaaacgcccuucuuucaaccaacaaggcaguaguaucccucucaaacggcgucagcguccugaccuucaaaguccuagaccucaaaaacuacauagauaaacaacuccuccccauacugaacaaacaaucgugcuccauccccaauaucgaaaccgucauagaguuccagcagaaaaacaacagacuucucgaaauaacccgagaguucucaguaaacgccggagucaccacacccguaagcaccuacaugcucacaaacucagaacuccuaucccucaucaacgacaugcccaucaccaacgaccagaaaaagcuaauguccaacaacguccaaauaguacgccaacaaagcuacucgauaaugugcaucaucaaggaagaaguacucgccuacgucguccaacucccccucuacggcguaaucgacacacccugcuggaaacuccacacguccccacucugcacaacaaacacaaaagaaggauccaacauaugccuaacccgcaccgacaggggcugguacugcgacaacgcaggcucagucagcuucuuuccccaagccgaaacaugcaaaguccaauccaaccgugucuucugcgacaccaugaacucgcucacccuacccucggaagucaaucucugcaacaucgacaucuucaacccaaaauacgacuguaaaaucaugaccagcaaaacagacguuucuuccagcgucaucacaucacucggcgcgaucguaucaugcuauggcaaaacaaagugcaccgcuagcaauaaaaaccgaggaaucauaaaaaccuucagcaacggcugcgacuacguauccaacaaaggcgucgacaccguauccgucggaaacacccucuacugcgucaacaagcaagaaggacaaucacucuacgucaaaggcgaaccaaucauaaacuucuacgacccacucguauuccccucagacgaguucgacgcauccaucucccaagucaacgaaaagaucaaccaaucucucgccuuuauacgcaaaagcgacgaacuccuucacaacguaaacgucggcaaaagcaccacuaacauaaugaucaccacaaucauaauaguaaucaucguaauacuccuccuacucaucgccgugggccuauuccucuauugcaaagcccgauaaggacuaguacuggcugcaucucccuuuccucuguccuccauccuucucccaggauggugaagggggaccugguacccagugauccccaccccaggauccuaaaucaugacuuaccugcuaauaaaaacucauuggaaaagugagaagaucuaaaaaaaaaaaaaaaaaaaaaaaaaaaaaaaaaaaaaaaaaaaaaaaaaaaaaaaaaaaaaaaaugcaucccccccccccccccccccccccccccccccaaaggcucuuuucagagccaccagaauu

SEQ ID NO: 14566 - RNA, 1889 nt, Artificial Sequence
  mRNA product Design g-1 comprising derived and/or modified sequence from HRSV(Memphis-37)__AIY60640.1__F-del_DSCav1_mut1 (opt1)
gggagacuuucccauucuguagcagaauuugguguugccuguggucuuggucccgcggagaagcuuaccauggagcugcccauccucaagaccaacgccaucaccacgauccuggccgcggugacccugugcuucgccagcucccagaacaucaccgaggaguucuaccagagcacgugcuccgccgucagcaagggcuaccucggcgcccugcgcaccgggugguacaccagcgugaucaccaucgagcuguccaacaucaaggagaacaagugcaacggcaccgacgccaaggugaagcucaucaagcaggagcuggacaaguacaagaacgcggucacggagcugcagcuccugaugcagagcaccccggccgccggcuccgggagcgcgaucugcuccggcaucgccgucugcaaggugcugcaccucgagggcgaggugaacaagaucaagaacgcccugcuguccaccaacaaggccgucgugagccucuccaacggggugagcguccugaccuucaaggugcuggaccucaagaacuacaucgacaagcagcugcugcccauccugaacaagcagagcugcuccauccccaacaucgagaccgucaucgaguuccagcagaagaacaaccgccuccuggagaucacgcgggaguucagcgugaacgcgggcgugaccacccccgucuccaccuacaugcugacgaacagcgagcuccugucccugaucaacgacaugccgaucaccaacgaccagaagaagcucaugagcaacaacgugcagaucgugcgccagcaguccuacagcaucaugugcaucaucaaggaggagguccuggccuacguggugcagcugccccucuacggggucaucgacacccccugcuggaagcugcacaccagcccccugugcacgaccaacaccaaggagggcuccaacaucugccucacccggacggaccgcgggugguacugcgacaacgccggcagcguguccuucuucccgcaggccgagaccugcaagguccagagcaaccggguguucugcgacaccaugaacucccugacccugcccagcgaggugaaccucugcaacaucgacaucuucaaccccaaguacgacugcaagaucaugacguccaagaccgacgucagcuccagcgugaucaccucccugggcgccaucgugagcugcuacgggaagaccaagugcacggcgagcaacaagaaccgcggcaucaucaagaccuucuccaacgggugcgacuacgucagcaacaagggcguggacaccguguccgucggcaacacccuguacugcgugaacaagcaggagggccagagccucuacgugaagggggagcccaucaucaacuucuacgacccgcuggucuuccccuccgacgaguucgacgccagcaucucccaggugaacgagaagaucaaccagagccuggccuucauccggaaguccgacgagcuccugcacaacgugaacgucggcaagagcaccacgaacaucaugaucaccaccaucaucaucgugaucaucgugauccugcugcuccugaucgccgucgggcuguuccucuacugcaaggcccgcugaggacuaguggaagcauuuuccuggcugauuaaaagaaauuacucagcuauggucaucuguuccuguuagaaggcuaugcagcauauuauauacuaugcgcauguuaugaaaugcauaauaaaaaauuuuaaaaaaucuaaaagaucuaaaaaaaaaaaaaaaaaaaaaaaaaaaaaaaaaaaaaaaaaaaaaaaaaaaaaaaaaaaaaaaaugcaucccccccccccccccccccccccccccccccaaaggcucuuuucagagccaccagaauu

SEQ ID NO: 14567 - RNA, 1889 nt, Artificial Sequence
  mRNA product Design g-1 comprising derived and/or modified sequence from HRSV(Memphis-37)__AIY60640.1__F-del_DSCav1_mut1 (opt1)
gggagacuuucccauucuguagcagaauuugguguugccuguggucuuggucccgcggagaagcuuaccauggagcugcccauccucaagaccaacgccaucaccacgauccuggccgcggugacccugugcuucgccagcucccagaacaucaccgaggaguucuaccagagcacgugcuccgccgucagcaagggcuaccucggggcccugcgcaccggcugguacaccuccgugaucaccaucgagcugagcaacaucaaggagaacaagugcaacgggaccgacgccaaggugaagcucaucaagcaggagcuggacaaguacaagaacgcggucacggagcugcagcuccugaugcaguccaccccggccgccggcagcggguccgccaucugcagcggcaucgcggugugcaaggugcugcaccucgagggcgaggucaacaagaucaagaacgcccugcuguccaccaacaaggccguggugagccucuccaacggggucagcgugcugaccuucaaggugcuggaccucaagaacuacaucgacaagcagcugcugcccauccucaacaagcaguccugcagcauccccaacaucgagacggucaucgaguuccagcagaagaacaaccggcugcuggagaucacccgcgaguucuccgugaacgccggcgugaccacccccgucagcacguacaugcucaccaacuccgagcugcugagccucaucaacgacaugccgaucaccaacgaccagaagaagcugaugagcaacaacgugcagaucgugcggcagcaguccuacagcaucaugugcaucaucaaggaggagguccuggccuacguggugcagcucccccuguacggggucaucgacacccccugcuggaagcugcacacgagcccccucugcaccaccaacaccaaggagggcuccaacaucugccugacgcgcaccgaccgggggugguacugcgacaacgcgggcuccgugagcuucuucccgcaggccgagaccugcaaggugcaguccaaccgcgucuucugcgacaccaugaacagccugacgcuccccuccgaggugaaccugugcaacaucgacaucuucaaccccaaguacgacugcaagaucaugaccagcaagaccgacgucuccagcuccgugaucaccagccugggcgccaucguguccugcuacgggaagacgaagugcaccgccagcaacaagaaccggggcaucaucaagaccuucuccaacgggugcgacuacgucagcaacaagggcguggacaccguguccgucggcaacacgcucuacugcgugaacaagcaggaggggcagagccuguacgugaagggcgagcccaucaucaacuucuacgacccgcuggucuuccccagcgacgaguucgacgccuccaucagccaggugaacgagaagaucaaccagucccucgcguucauccgcaagagcgacgagcugcugcacaacgugaacgucgggaaguccaccaccaacaucaugaucaccaccaucaucaucgugaucaucgugauccuccugcugcucaucgccgucggccuguuccuguacugcaaggcccggugaggacuaguggaagcauuuuccuggcugauuaaaagaaauuacucagcuauggucaucuguuccuguuagaaggcuaugcagcauauuauauacuaugcgcauguuaugaaaugcauaauaaaaaauuuuaaaaaaucuaaaagaucuaaaaaaaaaaaaaaaaaaaaaaaaaaaaaaaaaaaaaaaaaaaaaaaaaaaaaaaaaaaaaaaaugcaucccccccccccccccccccccccccccccccaaaggcucuuuucagagccaccagaauu

SEQ ID NO: 14568 - RNA, 1889 nt, Artificial Sequence
  mRNA product Design g-1 comprising derived and/or modified sequence from HRSV(Memphis-37)__AIY60640.1__F-del_DSCav1_mut1 (opt2)
gggagacuuucccauucuguagcagaauuugguguugccuguggucuuggucccgcggagaagcuuaccauggagcuccccauccucaagaccaacgccaucaccaccauccucgccgccgucacccucugcuucgccuccucccagaacaucaccgaggaguucuaccaguccaccugcuccgccgucuccaagggcuaccucggcgcccuccgcaccggcugguacaccuccgucaucaccaucgagcucuccaacaucaaggagaacaagugcaacggcaccgacgccaaggucaagcucaucaagcaggagcucgacaaguacaagaacgccgucaccgagcuccagcuccucaugcaguccacccccgccgccggcuccggcuccgccaucugcuccggcaucgccgucugcaagguccuccaccucgagggcgaggucaacaagaucaagaacgcccuccucuccaccaacaaggccgucgucucccucuccaacggcgucuccguccucaccuucaagguccucgaccucaagaacuacaucgacaagcagcuccuccccauccucaacaagcaguccugcuccauccccaacaucgagaccgucaucgaguuccagcagaagaacaaccgccuccucgagaucacccgcgaguucuccgucaacgccggcgucaccacccccgucuccaccuacaugcucaccaacuccgagcuccucucccucaucaacgacaugcccaucaccaacgaccagaagaagcucauguccaacaacguccagaucguccgccagcaguccuacuccaucaugugcaucaucaaggaggagguccucgccuacgucguccagcucccccucuacggcgucaucgacacccccugcuggaagcuccacaccuccccccucugcaccaccaacaccaaggagggcuccaacaucugccucacccgcaccgaccgcggcugguacugcgacaacgccggcuccgucuccuucuucccccaggccgagaccugcaagguccaguccaaccgcgucuucugcgacaccaugaacucccucacccuccccuccgaggucaaccucugcaacaucgacaucuucaaccccaaguacgacugcaagaucaugaccuccaagaccgacgucuccuccuccgucaucaccucccucggcgccaucgucuccugcuacggcaagaccaagugcaccgccuccaacaagaaccgcggcaucaucaagaccuucuccaacggcugcgacuacgucuccaacaagggcgucgacaccgucuccgucggcaacacccucuacugcgucaacaagcaggagggccagucccucuacgucaagggcgagcccaucaucaacuucuacgacccccucgucuuccccuccgacgaguucgacgccuccaucucccaggucaacgagaagaucaaccagucccucgccuucauccgcaaguccgacgagcuccuccacaacgucaacgucggcaaguccaccaccaacaucaugaucaccaccaucaucaucgucaucaucgucauccuccuccuccucaucgccgucggccucuuccucuacugcaaggcccgcugaggacuaguggaagcauuuuccuggcugauuaaaagaaauuacucagcuauggucaucuguuccuguuagaaggcuaugcagcauauuauauacuaugcgcauguuaugaaaugcauaauaaaaaauuuuaaaaaaucuaaaagaucuaaaaaaaaaaaaaaaaaaaaaaaaaaaaaaaaaaaaaaaaaaaaaaaaaaaaaaaaaaaaaaaaugcaucccccccccccccccccccccccccccccccaaaggcucuuuucagagccaccagaauu

SEQ ID NO: 14569 - RNA, 1889 nt, Artificial Sequence
  mRNA product Design g-1 comprising derived and/or modified sequence from HRSV(Memphis-37)__AIY60640.1__F-del_DSCav1_mut1 (opt3)
gggagacuuucccauucuguagcagaauuugguguugccuguggucuuggucccgcggagaagcuuaccauggagcugcccauccucaagaccaacgccauuacaacuauacuugcugcagugacgcugugcuucgccagcucccagaauaucaccgaagaguuuuaccaaucuacauguucagcggucaguaaaggcuauuugggggcuuuaagaacuggaugguacaccagcguuauuacaaucgaacuguccaacauuaaggagaauaaaugcaacgguaccgacgccaaggugaaacuaaucaagcaggaacucgauaaguauaaaaaugcaguaacugagcugcagcuucugaugcagucuacuccugccgcuggcucggggucagcaauauguagcggaaucgccgugugcaaggucuugcaccucgagggcgaagugaacaaaauuaagaaugcucugcugaguaccaacaaagccguugugucccucucuaauggugucagcguguuaacguucaagguacuggaccuuaagaacuacaucgauaaacaauugcugccaauucuaaauaagcaguccuguucaaucccgaacauagagacuguuauugaauuucagcagaaaaauaacaggcuccuggagaucacccgggaguucagugugaaugcgggggucacaacucccgugagcaccuauaugcuuacaaacucugaacuguugucccucauuaacgacaugccuaucaccaaugaucaaaagaaacugaugucaaacaaugugcagaucguccgccagcagagcuacaguauuaugugcauaaucaaggaggaaguuuuagcauaugugguacaacugccacucuacggagugauugacacgcccuguuggaaacuucauacuucuccucugugcacaaccaacacuaaggagggcuccaauaucuguuugacacgaaccgaucguggcugguacugcgacaacgccgggagcgucucguuuuucccacaggcugaaacguguaaggugcagucuaauagaguguuuugcgauaccaugaacucccuaacacugcccucagagguuaaucucugcaacauagacauuuucaauccuaaauaugauuguaagaucaugacaaguaaaaccgacgucagcuccucugugaucacaagccugggagccauuguaucaugcuacgguaagacuaaauguaccgcaaguaacaagaauaggggcaucauuaagacauuuuccaacgggugcgauuauguuagcaauaaaggaguggacaccgucucugugggcaacacucuuuacugugucaacaagcaagagggucagucacuguaugugaaaggggaaccaauaaucaauuucuacgacccguugguuuuucccagugaugaguucgacgcuagcauuucccaggugaacgaaaagaucaaucagucucucgccuuuauccggaaaucggaugagcuguuacacaacguaaaugucggaaagagcacgacaaacauuaugauaaccacuaucauuaucgugauuaucguuauacugcuacuccugaucgcggugggccuuuucuuguauugcaaggcccgcugaggacuaguggaagcauuuuccuggcugauuaaaagaaauuacucagcuauggucaucuguuccuguuagaaggcuaugcagcauauuauauacuaugcgcauguuaugaaaugcauaauaaaaaauuuuaaaaaaucuaaaagaucuaaaaaaaaaaaaaaaaaaaaaaaaaaaaaaaaaaaaaaaaaaaaaaaaaaaaaaaaaaaaaaaaugcaucccccccccccccccccccccccccccccccaaaggcucuuuucagagccaccagaauu

SEQ ID NO: 14570 - RNA, 1889 nt, Artificial Sequence
  mRNA product Design g-1 comprising derived and/or modified sequence from HRSV(Memphis-37)__AIY60640.1__F-del_DSCav1_mut1 (opt4)
gggagacuuucccauucuguagcagaauuugguguugccuguggucuuggucccgcggagaagcuuaccauggagcugcccauccugaagaccaacgccaucaccaccauccuggccgccgugacccugugcuucgccagcagccagaacaucaccgaggaguucuaccagagcaccugcagcgccgugagcaagggcuaccugggcgcccugagaaccggcugguacaccagcgugaucaccaucgagcugagcaacaucaaggagaacaagugcaacggcaccgacgccaaggugaagcugaucaagcaggagcuggacaaguacaagaacgccgugaccgagcugcagcugcugaugcagagcacccccgccgccggcagcggcagcgccaucugcagcggcaucgccgugugcaaggugcugcaccuggagggcgaggugaacaagaucaagaacgcccugcugagcaccaacaaggccguggugagccugagcaacggcgugagcgugcugaccuucaaggugcuggaccugaagaacuacaucgacaagcagcugcugcccauccugaacaagcagagcugcagcauccccaacaucgagaccgugaucgaguuccagcagaagaacaacagacugcuggagaucaccagagaguucagcgugaacgccggcgugaccacccccgugagcaccuacaugcugaccaacagcgagcugcugagccugaucaacgacaugcccaucaccaacgaccagaagaagcugaugagcaacaacgugcagaucgugagacagcagagcuacagcaucaugugcaucaucaaggaggaggugcuggccuacguggugcagcugccccuguacggcgugaucgacacccccugcuggaagcugcacaccagcccccugugcaccaccaacaccaaggagggcagcaacaucugccugaccagaaccgacagaggcugguacugcgacaacgccggcagcgugagcuucuucccccaggccgagaccugcaaggugcagagcaacagaguguucugcgacaccaugaacagccugacccugcccagcgaggugaaccugugcaacaucgacaucuucaaccccaaguacgacugcaagaucaugaccagcaagaccgacgugagcagcagcgugaucaccagccugggcgccaucgugagcugcuacggcaagaccaagugcaccgccagcaacaagaacagaggcaucaucaagaccuucagcaacggcugcgacuacgugagcaacaagggcguggacaccgugagcgugggcaacacccuguacugcgugaacaagcaggagggccagagccuguacgugaagggcgagcccaucaucaacuucuacgacccccugguguuccccagcgacgaguucgacgccagcaucagccaggugaacgagaagaucaaccagagccuggccuucaucagaaagagcgacgagcugcugcacaacgugaacgugggcaagagcaccaccaacaucaugaucaccaccaucaucaucgugaucaucgugauccugcugcugcugaucgccgugggccuguuccuguacugcaaggccagaugaggacuaguggaagcauuuuccuggcugauuaaaagaaauuacucagcuauggucaucuguuccuguuagaaggcuaugcagcauauuauauacuaugcgcauguuaugaaaugcauaauaaaaaauuuuaaaaaaucuaaaagaucuaaaaaaaaaaaaaaaaaaaaaaaaaaaaaaaaaaaaaaaaaaaaaaaaaaaaaaaaaaaaaaaaugcaucccccccccccccccccccccccccccccccaaaggcucuuuucagagccaccagaauu

SEQ ID NO: 14571 - RNA, 1889 nt, Artificial Sequence
  mRNA product Design g-1 comprising derived and/or modified sequence from HRSV(Memphis-37)__AIY60640.1__F-del_DSCav1_mut1 (opt5)
gggagacuuucccauucuguagcagaauuugguguugccuguggucuuggucccgcggagaagcuuaccauggagcugcccauccucaagaccaacgccauuacaacgauccuggcugccgugacccuuugcuucgcgagcucccagaauauuacagaagaguuuuaccaaucuaccuguagcgcugucuccaaaggcuaucugggggcccucagaacaggaugguacaccucuguuaucacaauugaacugagcaacaucaaggagaauaaaugcaacggcaccgacgccaaggugaaacuuaucaagcaggaacuggauaaguauaaaaaugcugugacggagcuccagcugcugaugcaguccaccccugccgcugggucuggaagcgccauuuguuccggcaucgcggucugcaaggugcuccaccuggagggggaaguuaacaaaauuaagaaugcccuucugagcacaaacaaagcuguggucucucucuccaauggagugagcguucugaccuucaaggugcuugaccugaagaacuacaucgauaaacaacuccugccgauucugaauaagcagucuuguuccauccccaacauugagacagucaucgaauuucagcagaaaaauaaccggcuccuggagaucacccgcgaguucagcgugaaugccggcgugacgacaccugucucuaccuauaugcuuacaaacuccgaacugcucagccugauuaacgacaugcccaucaccaaugaucaaaagaaacuuauguccaacaauguucagauugugagacagcagucuuacagcaucaugugcauuaucaaggaggaagugcuggcuuaugucgugcaacucccucuguacggcguuaucgacacccccuguuggaaacugcauacauccccucucugcacgaccaacacaaaggaggggagcaauauuugucugacccggacagaucgcggaugguacugcgacaacgccggcucuguguccuuuuucccgcaggcggaaaccuguaagguccagagcaauagaguguuuugcgauacgaugaacucucuuacacugcccagcgagguuaaucucugcaacaucgacauuuucaauccuaaauaugauuguaagaucaugaccuccaaaaccgacgugucuagcuccgucauuacaagccugggggccaucgugucuugcuacggaaagaccaaauguacagcuuccaacaagaaucggggcaucauuaagacguuuagcaacgggugcgauuaugucucuaauaaaggaguggacaccguuuccgugggcaacacacuuuacugugucaacaagcaagagggccagagccuguaugugaaaggggaacccaucauuaauuucuacgacccucucguuuuucccuccgaugaguucgacgccucuaucagccaggugaacgaaaagauuaaucagucccuggcuuuuauccgcaaaucugaugagcugcuccacaacgucaaugugggaaagagcaccacaaacauuaugaucaccacgaucauuaucgugauuaucguuauucugcuucugcucaucgccgucggccuguuccuguauugcaaggccagaugaggacuaguggaagcauuuuccuggcugauuaaaagaaauuacucagcuauggucaucuguuccuguuagaaggcuaugcagcauauuauauacuaugcgcauguuaugaaaugcauaauaaaaaauuuuaaaaaaucuaaaagaucuaaaaaaaaaaaaaaaaaaaaaaaaaaaaaaaaaaaaaaaaaaaaaaaaaaaaaaaaaaaaaaaaugcaucccccccccccccccccccccccccccccccaaaggcucuuuucagagccaccagaauu

SEQ ID NO: 14572 - RNA, 1889 nt, Artificial Sequence
  mRNA product Design g-1 comprising derived and/or modified sequence from HRSV(Memphis-37)__AIY60640.1__F-del_DSCav1_mut1 (opt6)
gggagacuuucccauucuguagcagaauuugguguugccuguggucuuggucccgcggagaagcuuaccauggaauuaccaauacuaaaaacaaacgcaauaacaacaauucuagcagcaguaacauuaugcuuugcaucaucccaaaacaucacagaagaauuuuaucaaucaaccugcucagcaguuuccaaaggauacuuaggagcauuaagaacugguugguacacuucaguaaucaccaucgaacucucaaacaucaaggaaaacaaaugcaacggaacagacgcaaaaguuaaacucauaaaacaagaacuugacaaauacaaaaacgccguaacagaacuacaacuucucaugcaaucaacacccgcagcaggauccggaucagccauaugcucaggcauagcaguauguaaaguauuacaucuugaaggugaaguaaacaaaauaaaaaacgcacuucuaucaaccaacaaagcaguaguaucacuaucaaacggaguauccgucuuaacauuuaaaguucuagaccucaaaaacuauauagacaaacaauuacugccaauccucaauaaacaaucaugcucaauaccaaacaucgaaacaguaauagaauuucaacaaaaaaacaacagacuacuagaaauaacaagagaauuuuccgucaacgccggcguaacuacuccaguaucaacauauaugcuaaccaacucagaacuccuaucccucauaaacgacaugccaauaacuaaugaucaaaaaaaacuaaugucaaacaauguacaaauaguuagacaacaaucauacucaaucaugugcauaauaaaagaagaaguacuagcauacgucguccaacuaccccuauacggaguaauagacacaccuugcuggaaacuacacacaucaccccuaugcacaacaaauacaaaagaagguuccaacaucugccuaacaagaacugauagaggaugguacugcgacaacgccggaucaguaucauucuucccucaagcugaaaccugcaaaguacaaucaaacagaguauuuugcgauacaaugaacucccuaacacuucccucagaaguuaaucuuuguaauauagauauauucaacccaaaauacgacugcaaaauaaugacaaguaaaacagacguauccucaucuguaauuacaucacuaggagccauaguaucuugcuacggcaaaaccaaaugcacagcaucaaacaaaaacagagguauuaucaaaaccuucucaaacggaugugacuacguuucaaacaaaggaguagacacaguaucagucggaaacacccuauacuguguuaacaaacaagaaggacaaucacuguacguaaaaggagaacccauaauaaauuucuacgacccacuuguauuuccaucagacgaauuugaugcaucaaucucacaaguaaaugaaaaaauaaaccaaucauuagcauucauaagaaaaucugacgaguuacuacacaacguaaauguuggcaaaucaacaaccaauauaaugauaacaacaauaauaauaguaauaauagucauauuacuccuccucauagccgucggauuauucuuauacugcaaagcaagauaaggacuaguggaagcauuuuccuggcugauuaaaagaaauuacucagcuauggucaucuguuccuguuagaaggcuaugcagcauauuauauacuaugcgcauguuaugaaaugcauaauaaaaaauuuuaaaaaaucuaaaagaucuaaaaaaaaaaaaaaaaaaaaaaaaaaaaaaaaaaaaaaaaaaaaaaaaaaaaaaaaaaaaaaaaugcaucccccccccccccccccccccccccccccccaaaggcucuuuucagagccaccagaauu

SEQ ID NO: 14573 - RNA, 1889 nt, Artificial Sequence
  mRNA product Design g-1 comprising derived and/or modified sequence from HRSV(Memphis-37)__AIY60640.1__F-del_DSCav1_mut1 (opt11)
gggagacuuucccauucuguagcagaauuugguguugccuguggucuuggucccgcggagaagcuuaccauggaacuccccauacuaaaaaccaacgccaucacaacaauccucgccgccgucacacucugcuucgccagcucccaaaacaucaccgaagaguucuaucaaucaaccugcuccgcagucucaaagggauaccucggagcccuccgcaccggaugguacacuuccgucaucacaauagaacucuccaacaucaaagaaaacaaaugcaacggcaccgacgcaaaagucaagcucaucaaacaagaacucgacaaauauaaaaacgccgucaccgaacuccaacuacucaugcaauccacacccgcggccggcucaggcagcgccaucugcucaggcaucgccgucugcaaaguccuccaccucgaaggcgaagucaacaaaaucaaaaacgcccuucuuucaaccaacaaggcaguaguaucccucucaaacggcgucagcguccugaccuucaaaguccuagaccucaaaaacuacauagauaaacaacuccuccccauacugaacaaacaaucgugcuccauccccaauaucgaaaccgucauagaguuccagcagaaaaacaacagacuucucgaaauaacccgagaguucucaguaaacgccggagucaccacacccguaagcaccuacaugcucacaaacucagaacuccuaucccucaucaacgacaugcccaucaccaacgaccagaaaaagcuaauguccaacaacguccaaauaguacgccaacaaagcuacucgauaaugugcaucaucaaggaagaaguacucgccuacgucguccaacucccccucuacggcguaaucgacacacccugcuggaaacuccacacguccccacucugcacaacaaacacaaaagaaggauccaacauaugccuaacccgcaccgacaggggcugguacugcgacaacgcaggcucagucagcuucuuuccccaagccgaaacaugcaaaguccaauccaaccgugucuucugcgacaccaugaacucgcucacccuacccucggaagucaaucucugcaacaucgacaucuucaacccaaaauacgacuguaaaaucaugaccagcaaaacagacguuucuuccagcgucaucacaucacucggcgcgaucguaucaugcuauggcaaaacaaagugcaccgcuagcaauaaaaaccgaggaaucauaaaaaccuucagcaacggcugcgacuacguauccaacaaaggcgucgacaccguauccgucggaaacacccucuacugcgucaacaagcaagaaggacaaucacucuacgucaaaggcgaaccaaucauaaacuucuacgacccacucguauuccccucagacgaguucgacgcauccaucucccaagucaacgaaaagaucaaccaaucucucgccuuuauacgcaaaagcgacgaacuccuucacaacguaaacgucggcaaaagcaccacuaacauaaugaucaccacaaucauaauaguaaucaucguaauacuccuccuacucaucgccgugggccuauuccucuauugcaaagcccgauaaggacuaguggaagcauuuuccuggcugauuaaaagaaauuacucagcuauggucaucuguuccuguuagaaggcuaugcagcauauuauauacuaugcgcauguuaugaaaugcauaauaaaaaauuuuaaaaaaucuaaaagaucuaaaaaaaaaaaaaaaaaaaaaaaaaaaaaaaaaaaaaaaaaaaaaaaaaaaaaaaaaaaaaaaaugcaucccccccccccccccccccccccccccccccaaaggcucuuuucagagccaccagaauu

SEQ ID NO: 14574 - RNA, 1904 nt, Artificial Sequence
  mRNA product Design g-2 comprising derived and/or modified sequence from HRSV(Memphis-37)__AIY60640.1__F-del_DSCav1_mut1 (opt1)
gggagaguccgcucagccagguugcagaagcggcuuagcguguguccuaaucuucucucugcguguagguaggccugugccgcaaacaagcuuaccauggagcugcccauccucaagaccaacgccaucaccacgauccuggccgcggugacccugugcuucgccagcucccagaacaucaccgaggaguucuaccagagcacgugcuccgccgucagcaagggcuaccucggcgcccugcgcaccgggugguacaccagcgugaucaccaucgagcuguccaacaucaaggagaacaagugcaacggcaccgacgccaaggugaagcucaucaagcaggagcuggacaaguacaagaacgcggucacggagcugcagcuccugaugcagagcaccccggccgccggcuccgggagcgcgaucugcuccggcaucgccgucugcaaggugcugcaccucgagggcgaggugaacaagaucaagaacgcccugcuguccaccaacaaggccgucgugagccucuccaacggggugagcguccugaccuucaaggugcuggaccucaagaacuacaucgacaagcagcugcugcccauccugaacaagcagagcugcuccauccccaacaucgagaccgucaucgaguuccagcagaagaacaaccgccuccuggagaucacgcgggaguucagcgugaacgcgggcgugaccacccccgucuccaccuacaugcugacgaacagcgagcuccugucccugaucaacgacaugccgaucaccaacgaccagaagaagcucaugagcaacaacgugcagaucgugcgccagcaguccuacagcaucaugugcaucaucaaggaggagguccuggccuacguggugcagcugccccucuacggggucaucgacacccccugcuggaagcugcacaccagcccccugugcacgaccaacaccaaggagggcuccaacaucugccucacccggacggaccgcgggugguacugcgacaacgccggcagcguguccuucuucccgcaggccgagaccugcaagguccagagcaaccggguguucugcgacaccaugaacucccugacccugcccagcgaggugaaccucugcaacaucgacaucuucaaccccaaguacgacugcaagaucaugacguccaagaccgacgucagcuccagcgugaucaccucccugggcgccaucgugagcugcuacgggaagaccaagugcacggcgagcaacaagaaccgcggcaucaucaagaccuucuccaacgggugcgacuacgucagcaacaagggcguggacaccguguccgucggcaacacccuguacugcgugaacaagcaggagggccagagccucuacgugaagggggagcccaucaucaacuucuacgacccgcuggucuuccccuccgacgaguucgacgccagcaucucccaggugaacgagaagaucaaccagagccuggccuucauccggaaguccgacgagcuccugcacaacgugaacgucggcaagagcaccacgaacaucaugaucaccaccaucaucaucgugaucaucgugauccugcugcuccugaucgccgucgggcuguuccucuacugcaaggcccgcugaggacuaguaauaaggaaacuguaugaaugucugugggcaggaagugaagagauccuucuguaaagguuuuuggaauuaugucugcugaauaauaaacuuuuuugaaauaauaaaucugguagaaaaaugagaucuaaaaaaaaaaaaaaaaaaaaaaaaaaaaaaaaaaaaaaaaaaaaaaaaaaaaaaaaaaaaaaaaugcaucccccccccccccccccccccccccccccccaaaggcucuuuucagagccaccagaauu

SEQ ID NO: 14575 - RNA, 1904 nt, Artificial Sequence
  mRNA product Design g-2 comprising derived and/or modified sequence from HRSV(Memphis-37)__AIY60640.1__F-del_DSCav1_mut1 (opt1)
gggagaguccgcucagccagguugcagaagcggcuuagcguguguccuaaucuucucucugcguguagguaggccugugccgcaaacaagcuuaccauggagcugcccauccucaagaccaacgccaucaccacgauccuggccgcggugacccugugcuucgccagcucccagaacaucaccgaggaguucuaccagagcacgugcuccgccgucagcaagggcuaccucggggcccugcgcaccggcugguacaccuccgugaucaccaucgagcugagcaacaucaaggagaacaagugcaacgggaccgacgccaaggugaagcucaucaagcaggagcuggacaaguacaagaacgcggucacggagcugcagcuccugaugcaguccaccccggccgccggcagcggguccgccaucugcagcggcaucgcggugugcaaggugcugcaccucgagggcgaggucaacaagaucaagaacgcccugcuguccaccaacaaggccguggugagccucuccaacggggucagcgugcugaccuucaaggugcuggaccucaagaacuacaucgacaagcagcugcugcccauccucaacaagcaguccugcagcauccccaacaucgagacggucaucgaguuccagcagaagaacaaccggcugcuggagaucacccgcgaguucuccgugaacgccggcgugaccacccccgucagcacguacaugcucaccaacuccgagcugcugagccucaucaacgacaugccgaucaccaacgaccagaagaagcugaugagcaacaacgugcagaucgugcggcagcaguccuacagcaucaugugcaucaucaaggaggagguccuggccuacguggugcagcucccccuguacggggucaucgacacccccugcuggaagcugcacacgagcccccucugcaccaccaacaccaaggagggcuccaacaucugccugacgcgcaccgaccgggggugguacugcgacaacgcgggcuccgugagcuucuucccgcaggccgagaccugcaaggugcaguccaaccgcgucuucugcgacaccaugaacagccugacgcuccccuccgaggugaaccugugcaacaucgacaucuucaaccccaaguacgacugcaagaucaugaccagcaagaccgacgucuccagcuccgugaucaccagccugggcgccaucguguccugcuacgggaagacgaagugcaccgccagcaacaagaaccggggcaucaucaagaccuucuccaacgggugcgacuacgucagcaacaagggcguggacaccguguccgucggcaacacgcucuacugcgugaacaagcaggaggggcagagccuguacgugaagggcgagcccaucaucaacuucuacgacccgcuggucuuccccagcgacgaguucgacgccuccaucagccaggugaacgagaagaucaaccagucccucgcguucauccgcaagagcgacgagcugcugcacaacgugaacgucgggaaguccaccaccaacaucaugaucaccaccaucaucaucgugaucaucgugauccuccugcugcucaucgccgucggccuguuccuguacugcaaggcccggugaggacuaguaauaaggaaacuguaugaaugucugugggcaggaagugaagagauccuucuguaaagguuuuuggaauuaugucugcugaauaauaaacuuuuuugaaauaauaaaucugguagaaaaaugagaucuaaaaaaaaaaaaaaaaaaaaaaaaaaaaaaaaaaaaaaaaaaaaaaaaaaaaaaaaaaaaaaaaugcaucccccccccccccccccccccccccccccccaaaggcucuuuucagagccaccagaauu

SEQ ID NO: 14576 - RNA, 1904 nt, Artificial Sequence
  mRNA product Design g-2 comprising derived and/or modified sequence from HRSV(Memphis-37)__AIY60640.1__F-del_DSCav1_mut1 (opt2)
gggagaguccgcucagccagguugcagaagcggcuuagcguguguccuaaucuucucucugcguguagguaggccugugccgcaaacaagcuuaccauggagcuccccauccucaagaccaacgccaucaccaccauccucgccgccgucacccucugcuucgccuccucccagaacaucaccgaggaguucuaccaguccaccugcuccgccgucuccaagggcuaccucggcgcccuccgcaccggcugguacaccuccgucaucaccaucgagcucuccaacaucaaggagaacaagugcaacggcaccgacgccaaggucaagcucaucaagcaggagcucgacaaguacaagaacgccgucaccgagcuccagcuccucaugcaguccacccccgccgccggcuccggcuccgccaucugcuccggcaucgccgucugcaagguccuccaccucgagggcgaggucaacaagaucaagaacgcccuccucuccaccaacaaggccgucgucucccucuccaacggcgucuccguccucaccuucaagguccucgaccucaagaacuacaucgacaagcagcuccuccccauccucaacaagcaguccugcuccauccccaacaucgagaccgucaucgaguuccagcagaagaacaaccgccuccucgagaucacccgcgaguucuccgucaacgccggcgucaccacccccgucuccaccuacaugcucaccaacuccgagcuccucucccucaucaacgacaugcccaucaccaacgaccagaagaagcucauguccaacaacguccagaucguccgccagcaguccuacuccaucaugugcaucaucaaggaggagguccucgccuacgucguccagcucccccucuacggcgucaucgacacccccugcuggaagcuccacaccuccccccucugcaccaccaacaccaaggagggcuccaacaucugccucacccgcaccgaccgcggcugguacugcgacaacgccggcuccgucuccuucuucccccaggccgagaccugcaagguccaguccaaccgcgucuucugcgacaccaugaacucccucacccuccccuccgaggucaaccucugcaacaucgacaucuucaaccccaaguacgacugcaagaucaugaccuccaagaccgacgucuccuccuccgucaucaccucccucggcgccaucgucuccugcuacggcaagaccaagugcaccgccuccaacaagaaccgcggcaucaucaagaccuucuccaacggcugcgacuacgucuccaacaagggcgucgacaccgucuccgucggcaacacccucuacugcgucaacaagcaggagggccagucccucuacgucaagggcgagcccaucaucaacuucuacgacccccucgucuuccccuccgacgaguucgacgccuccaucucccaggucaacgagaagaucaaccagucccucgccuucauccgcaaguccgacgagcuccuccacaacgucaacgucggcaaguccaccaccaacaucaugaucaccaccaucaucaucgucaucaucgucauccuccuccuccucaucgccgucggccucuuccucuacugcaaggcccgcugaggacuaguaauaaggaaacuguaugaaugucugugggcaggaagugaagagauccuucuguaaagguuuuuggaauuaugucugcugaauaauaaacuuuuuugaaauaauaaaucugguagaaaaaugagaucuaaaaaaaaaaaaaaaaaaaaaaaaaaaaaaaaaaaaaaaaaaaaaaaaaaaaaaaaaaaaaaaaugcaucccccccccccccccccccccccccccccccaaaggcucuuuucagagccaccagaauu

SEQ ID NO: 14577 - RNA, 1904 nt, Artificial Sequence
  mRNA product Design g-2 comprising derived and/or modified sequence from HRSV(Memphis-37)__AIY60640.1__F-del_DSCav1_mut1 (opt3)
gggagaguccgcucagccagguugcagaagcggcuuagcguguguccuaaucuucucucugcguguagguaggccugugccgcaaacaagcuuaccauggagcugcccauccucaagaccaacgccauuacaacuauacuugcugcagugacgcugugcuucgccagcucccagaauaucaccgaagaguuuuaccaaucuacauguucagcggucaguaaaggcuauuugggggcuuuaagaacuggaugguacaccagcguuauuacaaucgaacuguccaacauuaaggagaauaaaugcaacgguaccgacgccaaggugaaacuaaucaagcaggaacucgauaaguauaaaaaugcaguaacugagcugcagcuucugaugcagucuacuccugccgcuggcucggggucagcaauauguagcggaaucgccgugugcaaggucuugcaccucgagggcgaagugaacaaaauuaagaaugcucugcugaguaccaacaaagccguugugucccucucuaauggugucagcguguuaacguucaagguacuggaccuuaagaacuacaucgauaaacaauugcugccaauucuaaauaagcaguccuguucaaucccgaacauagagacuguuauugaauuucagcagaaaaauaacaggcuccuggagaucacccgggaguucagugugaaugcgggggucacaacucccgugagcaccuauaugcuuacaaacucugaacuguugucccucauuaacgacaugccuaucaccaaugaucaaaagaaacugaugucaaacaaugugcagaucguccgccagcagagcuacaguauuaugugcauaaucaaggaggaaguuuuagcauaugugguacaacugccacucuacggagugauugacacgcccuguuggaaacuucauacuucuccucugugcacaaccaacacuaaggagggcuccaauaucuguuugacacgaaccgaucguggcugguacugcgacaacgccgggagcgucucguuuuucccacaggcugaaacguguaaggugcagucuaauagaguguuuugcgauaccaugaacucccuaacacugcccucagagguuaaucucugcaacauagacauuuucaauccuaaauaugauuguaagaucaugacaaguaaaaccgacgucagcuccucugugaucacaagccugggagccauuguaucaugcuacgguaagacuaaauguaccgcaaguaacaagaauaggggcaucauuaagacauuuuccaacgggugcgauuauguuagcaauaaaggaguggacaccgucucugugggcaacacucuuuacugugucaacaagcaagagggucagucacuguaugugaaaggggaaccaauaaucaauuucuacgacccguugguuuuucccagugaugaguucgacgcuagcauuucccaggugaacgaaaagaucaaucagucucucgccuuuauccggaaaucggaugagcuguuacacaacguaaaugucggaaagagcacgacaaacauuaugauaaccacuaucauuaucgugauuaucguuauacugcuacuccugaucgcggugggccuuuucuuguauugcaaggcccgcugaggacuaguaauaaggaaacuguaugaaugucugugggcaggaagugaagagauccuucuguaaagguuuuuggaauuaugucugcugaauaauaaacuuuuuugaaauaauaaaucugguagaaaaaugagaucuaaaaaaaaaaaaaaaaaaaaaaaaaaaaaaaaaaaaaaaaaaaaaaaaaaaaaaaaaaaaaaaaugcaucccccccccccccccccccccccccccccccaaaggcucuuuucagagccaccagaauu

SEQ ID NO: 14578 - RNA, 1904 nt, Artificial Sequence
  mRNA product Design g-2 comprising derived and/or modified sequence from HRSV(Memphis-37)__AIY60640.1__F-del_DSCav1_mut1 (opt4)
gggagaguccgcucagccagguugcagaagcggcuuagcguguguccuaaucuucucucugcguguagguaggccugugccgcaaacaagcuuaccauggagcugcccauccugaagaccaacgccaucaccaccauccuggccgccgugacccugugcuucgccagcagccagaacaucaccgaggaguucuaccagagcaccugcagcgccgugagcaagggcuaccugggcgcccugagaaccggcugguacaccagcgugaucaccaucgagcugagcaacaucaaggagaacaagugcaacggcaccgacgccaaggugaagcugaucaagcaggagcuggacaaguacaagaacgccgugaccgagcugcagcugcugaugcagagcacccccgccgccggcagcggcagcgccaucugcagcggcaucgccgugugcaaggugcugcaccuggagggcgaggugaacaagaucaagaacgcccugcugagcaccaacaaggccguggugagccugagcaacggcgugagcgugcugaccuucaaggugcuggaccugaagaacuacaucgacaagcagcugcugcccauccugaacaagcagagcugcagcauccccaacaucgagaccgugaucgaguuccagcagaagaacaacagacugcuggagaucaccagagaguucagcgugaacgccggcgugaccacccccgugagcaccuacaugcugaccaacagcgagcugcugagccugaucaacgacaugcccaucaccaacgaccagaagaagcugaugagcaacaacgugcagaucgugagacagcagagcuacagcaucaugugcaucaucaaggaggaggugcuggccuacguggugcagcugccccuguacggcgugaucgacacccccugcuggaagcugcacaccagcccccugugcaccaccaacaccaaggagggcagcaacaucugccugaccagaaccgacagaggcugguacugcgacaacgccggcagcgugagcuucuucccccaggccgagaccugcaaggugcagagcaacagaguguucugcgacaccaugaacagccugacccugcccagcgaggugaaccugugcaacaucgacaucuucaaccccaaguacgacugcaagaucaugaccagcaagaccgacgugagcagcagcgugaucaccagccugggcgccaucgugagcugcuacggcaagaccaagugcaccgccagcaacaagaacagaggcaucaucaagaccuucagcaacggcugcgacuacgugagcaacaagggcguggacaccgugagcgugggcaacacccuguacugcgugaacaagcaggagggccagagccuguacgugaagggcgagcccaucaucaacuucuacgacccccugguguuccccagcgacgaguucgacgccagcaucagccaggugaacgagaagaucaaccagagccuggccuucaucagaaagagcgacgagcugcugcacaacgugaacgugggcaagagcaccaccaacaucaugaucaccaccaucaucaucgugaucaucgugauccugcugcugcugaucgccgugggccuguuccuguacugcaaggccagaugaggacuaguaauaaggaaacuguaugaaugucugugggcaggaagugaagagauccuucuguaaagguuuuuggaauuaugucugcugaauaauaaacuuuuuugaaauaauaaaucugguagaaaaaugagaucuaaaaaaaaaaaaaaaaaaaaaaaaaaaaaaaaaaaaaaaaaaaaaaaaaaaaaaaaaaaaaaaaugcaucccccccccccccccccccccccccccccccaaaggcucuuuucagagccaccagaauu

SEQ ID NO: 14579 - RNA, 1904 nt, Artificial Sequence
  mRNA product Design g-2 comprising derived and/or modified sequence from HRSV(Memphis-37)__AIY60640.1__F-del_DSCav1_mut1 (opt5)
gggagaguccgcucagccagguugcagaagcggcuuagcguguguccuaaucuucucucugcguguagguaggccugugccgcaaacaagcuuaccauggagcugcccauccucaagaccaacgccauuacaacgauccuggcugccgugacccuuugcuucgcgagcucccagaauauuacagaagaguuuuaccaaucuaccuguagcgcugucuccaaaggcuaucugggggcccucagaacaggaugguacaccucuguuaucacaauugaacugagcaacaucaaggagaauaaaugcaacggcaccgacgccaaggugaaacuuaucaagcaggaacuggauaaguauaaaaaugcugugacggagcuccagcugcugaugcaguccaccccugccgcugggucuggaagcgccauuuguuccggcaucgcggucugcaaggugcuccaccuggagggggaaguuaacaaaauuaagaaugcccuucugagcacaaacaaagcuguggucucucucuccaauggagugagcguucugaccuucaaggugcuugaccugaagaacuacaucgauaaacaacuccugccgauucugaauaagcagucuuguuccauccccaacauugagacagucaucgaauuucagcagaaaaauaaccggcuccuggagaucacccgcgaguucagcgugaaugccggcgugacgacaccugucucuaccuauaugcuuacaaacuccgaacugcucagccugauuaacgacaugcccaucaccaaugaucaaaagaaacuuauguccaacaauguucagauugugagacagcagucuuacagcaucaugugcauuaucaaggaggaagugcuggcuuaugucgugcaacucccucuguacggcguuaucgacacccccuguuggaaacugcauacauccccucucugcacgaccaacacaaaggaggggagcaauauuugucugacccggacagaucgcggaugguacugcgacaacgccggcucuguguccuuuuucccgcaggcggaaaccuguaagguccagagcaauagaguguuuugcgauacgaugaacucucuuacacugcccagcgagguuaaucucugcaacaucgacauuuucaauccuaaauaugauuguaagaucaugaccuccaaaaccgacgugucuagcuccgucauuacaagccugggggccaucgugucuugcuacggaaagaccaaauguacagcuuccaacaagaaucggggcaucauuaagacguuuagcaacgggugcgauuaugucucuaauaaaggaguggacaccguuuccgugggcaacacacuuuacugugucaacaagcaagagggccagagccuguaugugaaaggggaacccaucauuaauuucuacgacccucucguuuuucccuccgaugaguucgacgccucuaucagccaggugaacgaaaagauuaaucagucccuggcuuuuauccgcaaaucugaugagcugcuccacaacgucaaugugggaaagagcaccacaaacauuaugaucaccacgaucauuaucgugauuaucguuauucugcuucugcucaucgccgucggccuguuccuguauugcaaggccagaugaggacuaguaauaaggaaacuguaugaaugucugugggcaggaagugaagagauccuucuguaaagguuuuuggaauuaugucugcugaauaauaaacuuuuuugaaauaauaaaucugguagaaaaaugagaucuaaaaaaaaaaaaaaaaaaaaaaaaaaaaaaaaaaaaaaaaaaaaaaaaaaaaaaaaaaaaaaaaugcaucccccccccccccccccccccccccccccccaaaggcucuuuucagagccaccagaauu

SEQ ID NO: 14580 - RNA, 1904 nt, Artificial Sequence
  mRNA product Design g-2 comprising derived and/or modified sequence from HRSV(Memphis-37)__AIY60640.1__F-del_DSCav1_mut1 (opt6)
gggagaguccgcucagccagguugcagaagcggcuuagcguguguccuaaucuucucucugcguguagguaggccugugccgcaaacaagcuuaccauggaauuaccaauacuaaaaacaaacgcaauaacaacaauucuagcagcaguaacauuaugcuuugcaucaucccaaaacaucacagaagaauuuuaucaaucaaccugcucagcaguuuccaaaggauacuuaggagcauuaagaacugguugguacacuucaguaaucaccaucgaacucucaaacaucaaggaaaacaaaugcaacggaacagacgcaaaaguuaaacucauaaaacaagaacuugacaaauacaaaaacgccguaacagaacuacaacuucucaugcaaucaacacccgcagcaggauccggaucagccauaugcucaggcauagcaguauguaaaguauuacaucuugaaggugaaguaaacaaaauaaaaaacgcacuucuaucaaccaacaaagcaguaguaucacuaucaaacggaguauccgucuuaacauuuaaaguucuagaccucaaaaacuauauagacaaacaauuacugccaauccucaauaaacaaucaugcucaauaccaaacaucgaaacaguaauagaauuucaacaaaaaaacaacagacuacuagaaauaacaagagaauuuuccgucaacgccggcguaacuacuccaguaucaacauauaugcuaaccaacucagaacuccuaucccucauaaacgacaugccaauaacuaaugaucaaaaaaaacuaaugucaaacaauguacaaauaguuagacaacaaucauacucaaucaugugcauaauaaaagaagaaguacuagcauacgucguccaacuaccccuauacggaguaauagacacaccuugcuggaaacuacacacaucaccccuaugcacaacaaauacaaaagaagguuccaacaucugccuaacaagaacugauagaggaugguacugcgacaacgccggaucaguaucauucuucccucaagcugaaaccugcaaaguacaaucaaacagaguauuuugcgauacaaugaacucccuaacacuucccucagaaguuaaucuuuguaauauagauauauucaacccaaaauacgacugcaaaauaaugacaaguaaaacagacguauccucaucuguaauuacaucacuaggagccauaguaucuugcuacggcaaaaccaaaugcacagcaucaaacaaaaacagagguauuaucaaaaccuucucaaacggaugugacuacguuucaaacaaaggaguagacacaguaucagucggaaacacccuauacuguguuaacaaacaagaaggacaaucacuguacguaaaaggagaacccauaauaaauuucuacgacccacuuguauuuccaucagacgaauuugaugcaucaaucucacaaguaaaugaaaaaauaaaccaaucauuagcauucauaagaaaaucugacgaguuacuacacaacguaaauguuggcaaaucaacaaccaauauaaugauaacaacaauaauaauaguaauaauagucauauuacuccuccucauagccgucggauuauucuuauacugcaaagcaagauaaggacuaguaauaaggaaacuguaugaaugucugugggcaggaagugaagagauccuucuguaaagguuuuuggaauuaugucugcugaauaauaaacuuuuuugaaauaauaaaucugguagaaaaaugagaucuaaaaaaaaaaaaaaaaaaaaaaaaaaaaaaaaaaaaaaaaaaaaaaaaaaaaaaaaaaaaaaaaugcaucccccccccccccccccccccccccccccccaaaggcucuuuucagagccaccagaauu

SEQ ID NO: 14581 - RNA, 1904 nt, Artificial Sequence
  mRNA product Design g-2 comprising derived and/or modified sequence from HRSV(Memphis-37)__AIY60640.1__F-del_DSCav1_mut1 (opt11)
gggagaguccgcucagccagguugcagaagcggcuuagcguguguccuaaucuucucucugcguguagguaggccugugccgcaaacaagcuuaccauggaacuccccauacuaaaaaccaacgccaucacaacaauccucgccgccgucacacucugcuucgccagcucccaaaacaucaccgaagaguucuaucaaucaaccugcuccgcagucucaaagggauaccucggagcccuccgcaccggaugguacacuuccgucaucacaauagaacucuccaacaucaaagaaaacaaaugcaacggcaccgacgcaaaagucaagcucaucaaacaagaacucgacaaauauaaaaacgccgucaccgaacuccaacuacucaugcaauccacacccgcggccggcucaggcagcgccaucugcucaggcaucgccgucugcaaaguccuccaccucgaaggcgaagucaacaaaaucaaaaacgcccuucuuucaaccaacaaggcaguaguaucccucucaaacggcgucagcguccugaccuucaaaguccuagaccucaaaaacuacauagauaaacaacuccuccccauacugaacaaacaaucgugcuccauccccaauaucgaaaccgucauagaguuccagcagaaaaacaacagacuucucgaaauaacccgagaguucucaguaaacgccggagucaccacacccguaagcaccuacaugcucacaaacucagaacuccuaucccucaucaacgacaugcccaucaccaacgaccagaaaaagcuaauguccaacaacguccaaauaguacgccaacaaagcuacucgauaaugugcaucaucaaggaagaaguacucgccuacgucguccaacucccccucuacggcguaaucgacacacccugcuggaaacuccacacguccccacucugcacaacaaacacaaaagaaggauccaacauaugccuaacccgcaccgacaggggcugguacugcgacaacgcaggcucagucagcuucuuuccccaagccgaaacaugcaaaguccaauccaaccgugucuucugcgacaccaugaacucgcucacccuacccucggaagucaaucucugcaacaucgacaucuucaacccaaaauacgacuguaaaaucaugaccagcaaaacagacguuucuuccagcgucaucacaucacucggcgcgaucguaucaugcuauggcaaaacaaagugcaccgcuagcaauaaaaaccgaggaaucauaaaaaccuucagcaacggcugcgacuacguauccaacaaaggcgucgacaccguauccgucggaaacacccucuacugcgucaacaagcaagaaggacaaucacucuacgucaaaggcgaaccaaucauaaacuucuacgacccacucguauuccccucagacgaguucgacgcauccaucucccaagucaacgaaaagaucaaccaaucucucgccuuuauacgcaaaagcgacgaacuccuucacaacguaaacgucggcaaaagcaccacuaacauaaugaucaccacaaucauaauaguaaucaucguaauacuccuccuacucaucgccgugggccuauuccucuauugcaaagcccgauaaggacuaguaauaaggaaacuguaugaaugucugugggcaggaagugaagagauccuucuguaaagguuuuuggaauuaugucugcugaauaauaaacuuuuuugaaauaauaaaucugguagaaaaaugagaucuaaaaaaaaaaaaaaaaaaaaaaaaaaaaaaaaaaaaaaaaaaaaaaaaaaaaaaaaaaaaaaaaugcaucccccccccccccccccccccccccccccccaaaggcucuuuucagagccaccagaauu

SEQ ID NO: 14582 - RNA, 2136 nt, Artificial Sequence
  mRNA product Design g-3 comprising derived and/or modified sequence from HRSV(Memphis-37)__AIY60640.1__F-del_DSCav1_mut1 (opt1)
gggagaguccgcucagccagguugcagaagcggcuuagcguguguccuaaucuucucucugcguguagguaggccugugccgcaaacaagcuuaccauggagcugcccauccucaagaccaacgccaucaccacgauccuggccgcggugacccugugcuucgccagcucccagaacaucaccgaggaguucuaccagagcacgugcuccgccgucagcaagggcuaccucggcgcccugcgcaccgggugguacaccagcgugaucaccaucgagcuguccaacaucaaggagaacaagugcaacggcaccgacgccaaggugaagcucaucaagcaggagcuggacaaguacaagaacgcggucacggagcugcagcuccugaugcagagcaccccggccgccggcuccgggagcgcgaucugcuccggcaucgccgucugcaaggugcugcaccucgagggcgaggugaacaagaucaagaacgcccugcuguccaccaacaaggccgucgugagccucuccaacggggugagcguccugaccuucaaggugcuggaccucaagaacuacaucgacaagcagcugcugcccauccugaacaagcagagcugcuccauccccaacaucgagaccgucaucgaguuccagcagaagaacaaccgccuccuggagaucacgcgggaguucagcgugaacgcgggcgugaccacccccgucuccaccuacaugcugacgaacagcgagcuccugucccugaucaacgacaugccgaucaccaacgaccagaagaagcucaugagcaacaacgugcagaucgugcgccagcaguccuacagcaucaugugcaucaucaaggaggagguccuggccuacguggugcagcugccccucuacggggucaucgacacccccugcuggaagcugcacaccagcccccugugcacgaccaacaccaaggagggcuccaacaucugccucacccggacggaccgcgggugguacugcgacaacgccggcagcguguccuucuucccgcaggccgagaccugcaagguccagagcaaccggguguucugcgacaccaugaacucccugacccugcccagcgaggugaaccucugcaacaucgacaucuucaaccccaaguacgacugcaagaucaugacguccaagaccgacgucagcuccagcgugaucaccucccugggcgccaucgugagcugcuacgggaagaccaagugcacggcgagcaacaagaaccgcggcaucaucaagaccuucuccaacgggugcgacuacgucagcaacaagggcguggacaccguguccgucggcaacacccuguacugcgugaacaagcaggagggccagagccucuacgugaagggggagcccaucaucaacuucuacgacccgcuggucuuccccuccgacgaguucgacgccagcaucucccaggugaacgagaagaucaaccagagccuggccuucauccggaaguccgacgagcuccugcacaacgugaacgucggcaagagcaccacgaacaucaugaucaccaccaucaucaucgugaucaucgugauccugcugcuccugaucgccgucgggcuguuccucuacugcaaggcccgcugaggacuagugaagggaacacccaaauuuaauucagccuuaagcacaauuaauuaagagugaaacguaauuguacaagcaguuggucacccaccauagggcaugaucaacaccgcaaccuuuccuuuuucccccagugauucugaaaaaccccucuucccuucagcuugcuuagauguuccaaauuuaguaagcuuaaggcggccuacagaagaaaaagaaaaaaaaggccacaaaaguucccucucacuuucaguaaauaaaauaaaagcagcaacagaaauaaagaaauaaaugaaauucaaaaugaaauaaauauuguguugugcagcauuaaaaaaucaauaaaaauuaaaaaugagcaagaucuaaaaaaaaaaaaaaaaaaaaaaaaaaaaaaaaaaaaaaaaaaaaaaaaaaaaaaaaaaaaaaaaugcaucccccccccccccccccccccccccccccccaaaggcucuuuucagagccaccagaauu

SEQ ID NO: 14583 - RNA, 2136 nt, Artificial Sequence
  mRNA product Design g-3 comprising derived and/or modified sequence from HRSV(Memphis-37)__AIY60640.1__F-del_DSCav1_mut1 (opt1)
gggagaguccgcucagccagguugcagaagcggcuuagcguguguccuaaucuucucucugcguguagguaggccugugccgcaaacaagcuuaccauggagcugcccauccucaagaccaacgccaucaccacgauccuggccgcggugacccugugcuucgccagcucccagaacaucaccgaggaguucuaccagagcacgugcuccgccgucagcaagggcuaccucggggcccugcgcaccggcugguacaccuccgugaucaccaucgagcugagcaacaucaaggagaacaagugcaacgggaccgacgccaaggugaagcucaucaagcaggagcuggacaaguacaagaacgcggucacggagcugcagcuccugaugcaguccaccccggccgccggcagcggguccgccaucugcagcggcaucgcggugugcaaggugcugcaccucgagggcgaggucaacaagaucaagaacgcccugcuguccaccaacaaggccguggugagccucuccaacggggucagcgugcugaccuucaaggugcuggaccucaagaacuacaucgacaagcagcugcugcccauccucaacaagcaguccugcagcauccccaacaucgagacggucaucgaguuccagcagaagaacaaccggcugcuggagaucacccgcgaguucuccgugaacgccggcgugaccacccccgucagcacguacaugcucaccaacuccgagcugcugagccucaucaacgacaugccgaucaccaacgaccagaagaagcugaugagcaacaacgugcagaucgugcggcagcaguccuacagcaucaugugcaucaucaaggaggagguccuggccuacguggugcagcucccccuguacggggucaucgacacccccugcuggaagcugcacacgagcccccucugcaccaccaacaccaaggagggcuccaacaucugccugacgcgcaccgaccgggggugguacugcgacaacgcgggcuccgugagcuucuucccgcaggccgagaccugcaaggugcaguccaaccgcgucuucugcgacaccaugaacagccugacgcuccccuccgaggugaaccugugcaacaucgacaucuucaaccccaaguacgacugcaagaucaugaccagcaagaccgacgucuccagcuccgugaucaccagccugggcgccaucguguccugcuacgggaagacgaagugcaccgccagcaacaagaaccggggcaucaucaagaccuucuccaacgggugcgacuacgucagcaacaagggcguggacaccguguccgucggcaacacgcucuacugcgugaacaagcaggaggggcagagccuguacgugaagggcgagcccaucaucaacuucuacgacccgcuggucuuccccagcgacgaguucgacgccuccaucagccaggugaacgagaagaucaaccagucccucgcguucauccgcaagagcgacgagcugcugcacaacgugaacgucgggaaguccaccaccaacaucaugaucaccaccaucaucaucgugaucaucgugauccuccugcugcucaucgccgucggccuguuccuguacugcaaggcccggugaggacuagugaagggaacacccaaauuuaauucagccuuaagcacaauuaauuaagagugaaacguaauuguacaagcaguuggucacccaccauagggcaugaucaacaccgcaaccuuuccuuuuucccccagugauucugaaaaaccccucuucccuucagcuugcuuagauguuccaaauuuaguaagcuuaaggcggccuacagaagaaaaagaaaaaaaaggccacaaaaguucccucucacuuucaguaaauaaaauaaaagcagcaacagaaauaaagaaauaaaugaaauucaaaaugaaauaaauauuguguugugcagcauuaaaaaaucaauaaaaauuaaaaaugagcaagaucuaaaaaaaaaaaaaaaaaaaaaaaaaaaaaaaaaaaaaaaaaaaaaaaaaaaaaaaaaaaaaaaaugcaucccccccccccccccccccccccccccccccaaaggcucuuuucagagccaccagaauu

SEQ ID NO: 14584 - RNA, 2136 nt, Artificial Sequence
  mRNA product Design g-3 comprising derived and/or modified sequence from HRSV(Memphis-37)__AIY60640.1__F-del_DSCav1_mut1 (opt2)
gggagaguccgcucagccagguugcagaagcggcuuagcguguguccuaaucuucucucugcguguagguaggccugugccgcaaacaagcuuaccauggagcuccccauccucaagaccaacgccaucaccaccauccucgccgccgucacccucugcuucgccuccucccagaacaucaccgaggaguucuaccaguccaccugcuccgccgucuccaagggcuaccucggcgcccuccgcaccggcugguacaccuccgucaucaccaucgagcucuccaacaucaaggagaacaagugcaacggcaccgacgccaaggucaagcucaucaagcaggagcucgacaaguacaagaacgccgucaccgagcuccagcuccucaugcaguccacccccgccgccggcuccggcuccgccaucugcuccggcaucgccgucugcaagguccuccaccucgagggcgaggucaacaagaucaagaacgcccuccucuccaccaacaaggccgucgucucccucuccaacggcgucuccguccucaccuucaagguccucgaccucaagaacuacaucgacaagcagcuccuccccauccucaacaagcaguccugcuccauccccaacaucgagaccgucaucgaguuccagcagaagaacaaccgccuccucgagaucacccgcgaguucuccgucaacgccggcgucaccacccccgucuccaccuacaugcucaccaacuccgagcuccucucccucaucaacgacaugcccaucaccaacgaccagaagaagcucauguccaacaacguccagaucguccgccagcaguccuacuccaucaugugcaucaucaaggaggagguccucgccuacgucguccagcucccccucuacggcgucaucgacacccccugcuggaagcuccacaccuccccccucugcaccaccaacaccaaggagggcuccaacaucugccucacccgcaccgaccgcggcugguacugcgacaacgccggcuccgucuccuucuucccccaggccgagaccugcaagguccaguccaaccgcgucuucugcgacaccaugaacucccucacccuccccuccgaggucaaccucugcaacaucgacaucuucaaccccaaguacgacugcaagaucaugaccuccaagaccgacgucuccuccuccgucaucaccucccucggcgccaucgucuccugcuacggcaagaccaagugcaccgccuccaacaagaaccgcggcaucaucaagaccuucuccaacggcugcgacuacgucuccaacaagggcgucgacaccgucuccgucggcaacacccucuacugcgucaacaagcaggagggccagucccucuacgucaagggcgagcccaucaucaacuucuacgacccccucgucuuccccuccgacgaguucgacgccuccaucucccaggucaacgagaagaucaaccagucccucgccuucauccgcaaguccgacgagcuccuccacaacgucaacgucggcaaguccaccaccaacaucaugaucaccaccaucaucaucgucaucaucgucauccuccuccuccucaucgccgucggccucuuccucuacugcaaggcccgcugaggacuagugaagggaacacccaaauuuaauucagccuuaagcacaauuaauuaagagugaaacguaauuguacaagcaguuggucacccaccauagggcaugaucaacaccgcaaccuuuccuuuuucccccagugauucugaaaaaccccucuucccuucagcuugcuuagauguuccaaauuuaguaagcuuaaggcggccuacagaagaaaaagaaaaaaaaggccacaaaaguucccucucacuuucaguaaauaaaauaaaagcagcaacagaaauaaagaaauaaaugaaauucaaaaugaaauaaauauuguguugugcagcauuaaaaaaucaauaaaaauuaaaaaugagcaagaucuaaaaaaaaaaaaaaaaaaaaaaaaaaaaaaaaaaaaaaaaaaaaaaaaaaaaaaaaaaaaaaaaugcaucccccccccccccccccccccccccccccccaaaggcucuuuucagagccaccagaauu

SEQ ID NO: 14585 - RNA, 2136 nt, Artificial Sequence
  mRNA product Design g-3 comprising derived and/or modified sequence from HRSV(Memphis-37)__AIY60640.1__F-del_DSCav1_mut1 (opt3)
gggagaguccgcucagccagguugcagaagcggcuuagcguguguccuaaucuucucucugcguguagguaggccugugccgcaaacaagcuuaccauggagcugcccauccucaagaccaacgccauuacaacuauacuugcugcagugacgcugugcuucgccagcucccagaauaucaccgaagaguuuuaccaaucuacauguucagcggucaguaaaggcuauuugggggcuuuaagaacuggaugguacaccagcguuauuacaaucgaacuguccaacauuaaggagaauaaaugcaacgguaccgacgccaaggugaaacuaaucaagcaggaacucgauaaguauaaaaaugcaguaacugagcugcagcuucugaugcagucuacuccugccgcuggcucggggucagcaauauguagcggaaucgccgugugcaaggucuugcaccucgagggcgaagugaacaaaauuaagaaugcucugcugaguaccaacaaagccguugugucccucucuaauggugucagcguguuaacguucaagguacuggaccuuaagaacuacaucgauaaacaauugcugccaauucuaaauaagcaguccuguucaaucccgaacauagagacuguuauugaauuucagcagaaaaauaacaggcuccuggagaucacccgggaguucagugugaaugcgggggucacaacucccgugagcaccuauaugcuuacaaacucugaacuguugucccucauuaacgacaugccuaucaccaaugaucaaaagaaacugaugucaaacaaugugcagaucguccgccagcagagcuacaguauuaugugcauaaucaaggaggaaguuuuagcauaugugguacaacugccacucuacggagugauugacacgcccuguuggaaacuucauacuucuccucugugcacaaccaacacuaaggagggcuccaauaucuguuugacacgaaccgaucguggcugguacugcgacaacgccgggagcgucucguuuuucccacaggcugaaacguguaaggugcagucuaauagaguguuuugcgauaccaugaacucccuaacacugcccucagagguuaaucucugcaacauagacauuuucaauccuaaauaugauuguaagaucaugacaaguaaaaccgacgucagcuccucugugaucacaagccugggagccauuguaucaugcuacgguaagacuaaauguaccgcaaguaacaagaauaggggcaucauuaagacauuuuccaacgggugcgauuauguuagcaauaaaggaguggacaccgucucugugggcaacacucuuuacugugucaacaagcaagagggucagucacuguaugugaaaggggaaccaauaaucaauuucuacgacccguugguuuuucccagugaugaguucgacgcuagcauuucccaggugaacgaaaagaucaaucagucucucgccuuuauccggaaaucggaugagcuguuacacaacguaaaugucggaaagagcacgacaaacauuaugauaaccacuaucauuaucgugauuaucguuauacugcuacuccugaucgcggugggccuuuucuuguauugcaaggcccgcugaggacuagugaagggaacacccaaauuuaauucagccuuaagcacaauuaauuaagagugaaacguaauuguacaagcaguuggucacccaccauagggcaugaucaacaccgcaaccuuuccuuuuucccccagugauucugaaaaaccccucuucccuucagcuugcuuagauguuccaaauuuaguaagcuuaaggcggccuacagaagaaaaagaaaaaaaaggccacaaaaguucccucucacuuucaguaaauaaaauaaaagcagcaacagaaauaaagaaauaaaugaaauucaaaaugaaauaaauauuguguugugcagcauuaaaaaaucaauaaaaauuaaaaaugagcaagaucuaaaaaaaaaaaaaaaaaaaaaaaaaaaaaaaaaaaaaaaaaaaaaaaaaaaaaaaaaaaaaaaaugcaucccccccccccccccccccccccccccccccaaaggcucuuuucagagccaccagaauu

SEQ ID NO: 14586 - RNA, 2136 nt, Artificial Sequence
  mRNA product Design g-3 comprising derived and/or modified sequence from HRSV(Memphis-37)__AIY60640.1__F-del_DSCav1_mut1 (opt4)
gggagaguccgcucagccagguugcagaagcggcuuagcguguguccuaaucuucucucugcguguagguaggccugugccgcaaacaagcuuaccauggagcugcccauccugaagaccaacgccaucaccaccauccuggccgccgugacccugugcuucgccagcagccagaacaucaccgaggaguucuaccagagcaccugcagcgccgugagcaagggcuaccugggcgcccugagaaccggcugguacaccagcgugaucaccaucgagcugagcaacaucaaggagaacaagugcaacggcaccgacgccaaggugaagcugaucaagcaggagcuggacaaguacaagaacgccgugaccgagcugcagcugcugaugcagagcacccccgccgccggcagcggcagcgccaucugcagcggcaucgccgugugcaaggugcugcaccuggagggcgaggugaacaagaucaagaacgcccugcugagcaccaacaaggccguggugagccugagcaacggcgugagcgugcugaccuucaaggugcuggaccugaagaacuacaucgacaagcagcugcugcccauccugaacaagcagagcugcagcauccccaacaucgagaccgugaucgaguuccagcagaagaacaacagacugcuggagaucaccagagaguucagcgugaacgccggcgugaccacccccgugagcaccuacaugcugaccaacagcgagcugcugagccugaucaacgacaugcccaucaccaacgaccagaagaagcugaugagcaacaacgugcagaucgugagacagcagagcuacagcaucaugugcaucaucaaggaggaggugcuggccuacguggugcagcugccccuguacggcgugaucgacacccccugcuggaagcugcacaccagcccccugugcaccaccaacaccaaggagggcagcaacaucugccugaccagaaccgacagaggcugguacugcgacaacgccggcagcgugagcuucuucccccaggccgagaccugcaaggugcagagcaacagaguguucugcgacaccaugaacagccugacccugcccagcgaggugaaccugugcaacaucgacaucuucaaccccaaguacgacugcaagaucaugaccagcaagaccgacgugagcagcagcgugaucaccagccugggcgccaucgugagcugcuacggcaagaccaagugcaccgccagcaacaagaacagaggcaucaucaagaccuucagcaacggcugcgacuacgugagcaacaagggcguggacaccgugagcgugggcaacacccuguacugcgugaacaagcaggagggccagagccuguacgugaagggcgagcccaucaucaacuucuacgacccccugguguuccccagcgacgaguucgacgccagcaucagccaggugaacgagaagaucaaccagagccuggccuucaucagaaagagcgacgagcugcugcacaacgugaacgugggcaagagcaccaccaacaucaugaucaccaccaucaucaucgugaucaucgugauccugcugcugcugaucgccgugggccuguuccuguacugcaaggccagaugaggacuagugaagggaacacccaaauuuaauucagccuuaagcacaauuaauuaagagugaaacguaauuguacaagcaguuggucacccaccauagggcaugaucaacaccgcaaccuuuccuuuuucccccagugauucugaaaaaccccucuucccuucagcuugcuuagauguuccaaauuuaguaagcuuaaggcggccuacagaagaaaaagaaaaaaaaggccacaaaaguucccucucacuuucaguaaauaaaauaaaagcagcaacagaaauaaagaaauaaaugaaauucaaaaugaaauaaauauuguguugugcagcauuaaaaaaucaauaaaaauuaaaaaugagcaagaucuaaaaaaaaaaaaaaaaaaaaaaaaaaaaaaaaaaaaaaaaaaaaaaaaaaaaaaaaaaaaaaaaugcaucccccccccccccccccccccccccccccccaaaggcucuuuucagagccaccagaauu

SEQ ID NO: 14587 - RNA, 2136 nt, Artificial Sequence
  mRNA product Design g-3 comprising derived and/or modified sequence from HRSV(Memphis-37)__AIY60640.1__F-del_DSCav1_mut1 (opt5)
gggagaguccgcucagccagguugcagaagcggcuuagcguguguccuaaucuucucucugcguguagguaggccugugccgcaaacaagcuuaccauggagcugcccauccucaagaccaacgccauuacaacgauccuggcugccgugacccuuugcuucgcgagcucccagaauauuacagaagaguuuuaccaaucuaccuguagcgcugucuccaaaggcuaucugggggcccucagaacaggaugguacaccucuguuaucacaauugaacugagcaacaucaaggagaauaaaugcaacggcaccgacgccaaggugaaacuuaucaagcaggaacuggauaaguauaaaaaugcugugacggagcuccagcugcugaugcaguccaccccugccgcugggucuggaagcgccauuuguuccggcaucgcggucugcaaggugcuccaccuggagggggaaguuaacaaaauuaagaaugcccuucugagcacaaacaaagcuguggucucucucuccaauggagugagcguucugaccuucaaggugcuugaccugaagaacuacaucgauaaacaacuccugccgauucugaauaagcagucuuguuccauccccaacauugagacagucaucgaauuucagcagaaaaauaaccggcuccuggagaucacccgcgaguucagcgugaaugccggcgugacgacaccugucucuaccuauaugcuuacaaacuccgaacugcucagccugauuaacgacaugcccaucaccaaugaucaaaagaaacuuauguccaacaauguucagauugugagacagcagucuuacagcaucaugugcauuaucaaggaggaagugcuggcuuaugucgugcaacucccucuguacggcguuaucgacacccccuguuggaaacugcauacauccccucucugcacgaccaacacaaaggaggggagcaauauuugucugacccggacagaucgcggaugguacugcgacaacgccggcucuguguccuuuuucccgcaggcggaaaccuguaagguccagagcaauagaguguuuugcgauacgaugaacucucuuacacugcccagcgagguuaaucucugcaacaucgacauuuucaauccuaaauaugauuguaagaucaugaccuccaaaaccgacgugucuagcuccgucauuacaagccugggggccaucgugucuugcuacggaaagaccaaauguacagcuuccaacaagaaucggggcaucauuaagacguuuagcaacgggugcgauuaugucucuaauaaaggaguggacaccguuuccgugggcaacacacuuuacugugucaacaagcaagagggccagagccuguaugugaaaggggaacccaucauuaauuucuacgacccucucguuuuucccuccgaugaguucgacgccucuaucagccaggugaacgaaaagauuaaucagucccuggcuuuuauccgcaaaucugaugagcugcuccacaacgucaaugugggaaagagcaccacaaacauuaugaucaccacgaucauuaucgugauuaucguuauucugcuucugcucaucgccgucggccuguuccuguauugcaaggccagaugaggacuagugaagggaacacccaaauuuaauucagccuuaagcacaauuaauuaagagugaaacguaauuguacaagcaguuggucacccaccauagggcaugaucaacaccgcaaccuuuccuuuuucccccagugauucugaaaaaccccucuucccuucagcuugcuuagauguuccaaauuuaguaagcuuaaggcggccuacagaagaaaaagaaaaaaaaggccacaaaaguucccucucacuuucaguaaauaaaauaaaagcagcaacagaaauaaagaaauaaaugaaauucaaaaugaaauaaauauuguguugugcagcauuaaaaaaucaauaaaaauuaaaaaugagcaagaucuaaaaaaaaaaaaaaaaaaaaaaaaaaaaaaaaaaaaaaaaaaaaaaaaaaaaaaaaaaaaaaaaugcaucccccccccccccccccccccccccccccccaaaggcucuuuucagagccaccagaauu

SEQ ID NO: 14588 - RNA, 2136 nt, Artificial Sequence
  mRNA product Design g-3 comprising derived and/or modified sequence from HRSV(Memphis-37)__AIY60640.1__F-del_DSCav1_mut1 (opt6)
gggagaguccgcucagccagguugcagaagcggcuuagcguguguccuaaucuucucucugcguguagguaggccugugccgcaaacaagcuuaccauggaauuaccaauacuaaaaacaaacgcaauaacaacaauucuagcagcaguaacauuaugcuuugcaucaucccaaaacaucacagaagaauuuuaucaaucaaccugcucagcaguuuccaaaggauacuuaggagcauuaagaacugguugguacacuucaguaaucaccaucgaacucucaaacaucaaggaaaacaaaugcaacggaacagacgcaaaaguuaaacucauaaaacaagaacuugacaaauacaaaaacgccguaacagaacuacaacuucucaugcaaucaacacccgcagcaggauccggaucagccauaugcucaggcauagcaguauguaaaguauuacaucuugaaggugaaguaaacaaaauaaaaaacgcacuucuaucaaccaacaaagcaguaguaucacuaucaaacggaguauccgucuuaacauuuaaaguucuagaccucaaaaacuauauagacaaacaauuacugccaauccucaauaaacaaucaugcucaauaccaaacaucgaaacaguaauagaauuucaacaaaaaaacaacagacuacuagaaauaacaagagaauuuuccgucaacgccggcguaacuacuccaguaucaacauauaugcuaaccaacucagaacuccuaucccucauaaacgacaugccaauaacuaaugaucaaaaaaaacuaaugucaaacaauguacaaauaguuagacaacaaucauacucaaucaugugcauaauaaaagaagaaguacuagcauacgucguccaacuaccccuauacggaguaauagacacaccuugcuggaaacuacacacaucaccccuaugcacaacaaauacaaaagaagguuccaacaucugccuaacaagaacugauagaggaugguacugcgacaacgccggaucaguaucauucuucccucaagcugaaaccugcaaaguacaaucaaacagaguauuuugcgauacaaugaacucccuaacacuucccucagaaguuaaucuuuguaauauagauauauucaacccaaaauacgacugcaaaauaaugacaaguaaaacagacguauccucaucuguaauuacaucacuaggagccauaguaucuugcuacggcaaaaccaaaugcacagcaucaaacaaaaacagagguauuaucaaaaccuucucaaacggaugugacuacguuucaaacaaaggaguagacacaguaucagucggaaacacccuauacuguguuaacaaacaagaaggacaaucacuguacguaaaaggagaacccauaauaaauuucuacgacccacuuguauuuccaucagacgaauuugaugcaucaaucucacaaguaaaugaaaaaauaaaccaaucauuagcauucauaagaaaaucugacgaguuacuacacaacguaaauguuggcaaaucaacaaccaauauaaugauaacaacaauaauaauaguaauaauagucauauuacuccuccucauagccgucggauuauucuuauacugcaaagcaagauaaggacuagugaagggaacacccaaauuuaauucagccuuaagcacaauuaauuaagagugaaacguaauuguacaagcaguuggucacccaccauagggcaugaucaacaccgcaaccuuuccuuuuucccccagugauucugaaaaaccccucuucccuucagcuugcuuagauguuccaaauuuaguaagcuuaaggcggccuacagaagaaaaagaaaaaaaaggccacaaaaguucccucucacuuucaguaaauaaaauaaaagcagcaacagaaauaaagaaauaaaugaaauucaaaaugaaauaaauauuguguugugcagcauuaaaaaaucaauaaaaauuaaaaaugagcaagaucuaaaaaaaaaaaaaaaaaaaaaaaaaaaaaaaaaaaaaaaaaaaaaaaaaaaaaaaaaaaaaaaaugcaucccccccccccccccccccccccccccccccaaaggcucuuuucagagccaccagaauu

SEQ ID NO: 14589 - RNA, 2136 nt, Artificial Sequence
  mRNA product Design g-3 comprising derived and/or modified sequence from HRSV(Memphis-37)__AIY60640.1__F-del_DSCav1_mut1 (opt11)
gggagaguccgcucagccagguugcagaagcggcuuagcguguguccuaaucuucucucugcguguagguaggccugugccgcaaacaagcuuaccauggaacuccccauacuaaaaaccaacgccaucacaacaauccucgccgccgucacacucugcuucgccagcucccaaaacaucaccgaagaguucuaucaaucaaccugcuccgcagucucaaagggauaccucggagcccuccgcaccggaugguacacuuccgucaucacaauagaacucuccaacaucaaagaaaacaaaugcaacggcaccgacgcaaaagucaagcucaucaaacaagaacucgacaaauauaaaaacgccgucaccgaacuccaacuacucaugcaauccacacccgcggccggcucaggcagcgccaucugcucaggcaucgccgucugcaaaguccuccaccucgaaggcgaagucaacaaaaucaaaaacgcccuucuuucaaccaacaaggcaguaguaucccucucaaacggcgucagcguccugaccuucaaaguccuagaccucaaaaacuacauagauaaacaacuccuccccauacugaacaaacaaucgugcuccauccccaauaucgaaaccgucauagaguuccagcagaaaaacaacagacuucucgaaauaacccgagaguucucaguaaacgccggagucaccacacccguaagcaccuacaugcucacaaacucagaacuccuaucccucaucaacgacaugcccaucaccaacgaccagaaaaagcuaauguccaacaacguccaaauaguacgccaacaaagcuacucgauaaugugcaucaucaaggaagaaguacucgccuacgucguccaacucccccucuacggcguaaucgacacacccugcuggaaacuccacacguccccacucugcacaacaaacacaaaagaaggauccaacauaugccuaacccgcaccgacaggggcugguacugcgacaacgcaggcucagucagcuucuuuccccaagccgaaacaugcaaaguccaauccaaccgugucuucugcgacaccaugaacucgcucacccuacccucggaagucaaucucugcaacaucgacaucuucaacccaaaauacgacuguaaaaucaugaccagcaaaacagacguuucuuccagcgucaucacaucacucggcgcgaucguaucaugcuauggcaaaacaaagugcaccgcuagcaauaaaaaccgaggaaucauaaaaaccuucagcaacggcugcgacuacguauccaacaaaggcgucgacaccguauccgucggaaacacccucuacugcgucaacaagcaagaaggacaaucacucuacgucaaaggcgaaccaaucauaaacuucuacgacccacucguauuccccucagacgaguucgacgcauccaucucccaagucaacgaaaagaucaaccaaucucucgccuuuauacgcaaaagcgacgaacuccuucacaacguaaacgucggcaaaagcaccacuaacauaaugaucaccacaaucauaauaguaaucaucguaauacuccuccuacucaucgccgugggccuauuccucuauugcaaagcccgauaaggacuagugaagggaacacccaaauuuaauucagccuuaagcacaauuaauuaagagugaaacguaauuguacaagcaguuggucacccaccauagggcaugaucaacaccgcaaccuuuccuuuuucccccagugauucugaaaaaccccucuucccuucagcuugcuuagauguuccaaauuuaguaagcuuaaggcggccuacagaagaaaaagaaaaaaaaggccacaaaaguucccucucacuuucaguaaauaaaauaaaagcagcaacagaaauaaagaaauaaaugaaauucaaaaugaaauaaauauuguguugugcagcauuaaaaaaucaauaaaaauuaaaaaugagcaagaucuaaaaaaaaaaaaaaaaaaaaaaaaaaaaaaaaaaaaaaaaaaaaaaaaaaaaaaaaaaaaaaaaugcaucccccccccccccccccccccccccccccccaaaggcucuuuucagagccaccagaauu

SEQ ID NO: 14590 - RNA, 1931 nt, Artificial Sequence
  mRNA product Design g-4 comprising derived and/or modified sequence from HRSV(Memphis-37)__AIY60640.1__F-del_DSCav1_mut1 (opt1)
gggagacuccugucgggcggaaguaggaggaguagaguuuaaaaacaguacucuuuuuccgguucgggacguaguugaagcaacgacaagccggauaaccgcucuugagacaggaagcuuaccauggagcugcccauccucaagaccaacgccaucaccacgauccuggccgcggugacccugugcuucgccagcucccagaacaucaccgaggaguucuaccagagcacgugcuccgccgucagcaagggcuaccucggcgcccugcgcaccgggugguacaccagcgugaucaccaucgagcuguccaacaucaaggagaacaagugcaacggcaccgacgccaaggugaagcucaucaagcaggagcuggacaaguacaagaacgcggucacggagcugcagcuccugaugcagagcaccccggccgccggcuccgggagcgcgaucugcuccggcaucgccgucugcaaggugcugcaccucgagggcgaggugaacaagaucaagaacgcccugcuguccaccaacaaggccgucgugagccucuccaacggggugagcguccugaccuucaaggugcuggaccucaagaacuacaucgacaagcagcugcugcccauccugaacaagcagagcugcuccauccccaacaucgagaccgucaucgaguuccagcagaagaacaaccgccuccuggagaucacgcgggaguucagcgugaacgcgggcgugaccacccccgucuccaccuacaugcugacgaacagcgagcuccugucccugaucaacgacaugccgaucaccaacgaccagaagaagcucaugagcaacaacgugcagaucgugcgccagcaguccuacagcaucaugugcaucaucaaggaggagguccuggccuacguggugcagcugccccucuacggggucaucgacacccccugcuggaagcugcacaccagcccccugugcacgaccaacaccaaggagggcuccaacaucugccucacccggacggaccgcgggugguacugcgacaacgccggcagcguguccuucuucccgcaggccgagaccugcaagguccagagcaaccggguguucugcgacaccaugaacucccugacccugcccagcgaggugaaccucugcaacaucgacaucuucaaccccaaguacgacugcaagaucaugacguccaagaccgacgucagcuccagcgugaucaccucccugggcgccaucgugagcugcuacgggaagaccaagugcacggcgagcaacaagaaccgcggcaucaucaagaccuucuccaacgggugcgacuacgucagcaacaagggcguggacaccguguccgucggcaacacccuguacugcgugaacaagcaggagggccagagccucuacgugaagggggagcccaucaucaacuucuacgacccgcuggucuuccccuccgacgaguucgacgccagcaucucccaggugaacgagaagaucaaccagagccuggccuucauccggaaguccgacgagcuccugcacaacgugaacgucggcaagagcaccacgaacaucaugaucaccaccaucaucaucgugaucaucgugauccugcugcuccugaucgccgucgggcuguuccucuacugcaaggcccgcugaggacuaguaauaaggaaacuguaugaaugucugugggcaggaagugaagagauccuucuguaaagguuuuuggaauuaugucugcugaauaauaaacuuuuuugaaauaauaaaucugguagaaaaaugagaucuaaaaaaaaaaaaaaaaaaaaaaaaaaaaaaaaaaaaaaaaaaaaaaaaaaaaaaaaaaaaaaaaugcaucccccccccccccccccccccccccccccccaaaggcucuuuucagagccaccagaauu

SEQ ID NO: 14591 - RNA, 1931 nt, Artificial Sequence
  mRNA product Design g-4 comprising derived and/or modified sequence from HRSV(Memphis-37)__AIY60640.1__F-del_DSCav1_mut1 (opt1)
gggagacuccugucgggcggaaguaggaggaguagaguuuaaaaacaguacucuuuuuccgguucgggacguaguugaagcaacgacaagccggauaaccgcucuugagacaggaagcuuaccauggagcugcccauccucaagaccaacgccaucaccacgauccuggccgcggugacccugugcuucgccagcucccagaacaucaccgaggaguucuaccagagcacgugcuccgccgucagcaagggcuaccucggggcccugcgcaccggcugguacaccuccgugaucaccaucgagcugagcaacaucaaggagaacaagugcaacgggaccgacgccaaggugaagcucaucaagcaggagcuggacaaguacaagaacgcggucacggagcugcagcuccugaugcaguccaccccggccgccggcagcggguccgccaucugcagcggcaucgcggugugcaaggugcugcaccucgagggcgaggucaacaagaucaagaacgcccugcuguccaccaacaaggccguggugagccucuccaacggggucagcgugcugaccuucaaggugcuggaccucaagaacuacaucgacaagcagcugcugcccauccucaacaagcaguccugcagcauccccaacaucgagacggucaucgaguuccagcagaagaacaaccggcugcuggagaucacccgcgaguucuccgugaacgccggcgugaccacccccgucagcacguacaugcucaccaacuccgagcugcugagccucaucaacgacaugccgaucaccaacgaccagaagaagcugaugagcaacaacgugcagaucgugcggcagcaguccuacagcaucaugugcaucaucaaggaggagguccuggccuacguggugcagcucccccuguacggggucaucgacacccccugcuggaagcugcacacgagcccccucugcaccaccaacaccaaggagggcuccaacaucugccugacgcgcaccgaccgggggugguacugcgacaacgcgggcuccgugagcuucuucccgcaggccgagaccugcaaggugcaguccaaccgcgucuucugcgacaccaugaacagccugacgcuccccuccgaggugaaccugugcaacaucgacaucuucaaccccaaguacgacugcaagaucaugaccagcaagaccgacgucuccagcuccgugaucaccagccugggcgccaucguguccugcuacgggaagacgaagugcaccgccagcaacaagaaccggggcaucaucaagaccuucuccaacgggugcgacuacgucagcaacaagggcguggacaccguguccgucggcaacacgcucuacugcgugaacaagcaggaggggcagagccuguacgugaagggcgagcccaucaucaacuucuacgacccgcuggucuuccccagcgacgaguucgacgccuccaucagccaggugaacgagaagaucaaccagucccucgcguucauccgcaagagcgacgagcugcugcacaacgugaacgucgggaaguccaccaccaacaucaugaucaccaccaucaucaucgugaucaucgugauccuccugcugcucaucgccgucggccuguuccuguacugcaaggcccggugaggacuaguaauaaggaaacuguaugaaugucugugggcaggaagugaagagauccuucuguaaagguuuuuggaauuaugucugcugaauaauaaacuuuuuugaaauaauaaaucugguagaaaaaugagaucuaaaaaaaaaaaaaaaaaaaaaaaaaaaaaaaaaaaaaaaaaaaaaaaaaaaaaaaaaaaaaaaaugcaucccccccccccccccccccccccccccccccaaaggcucuuuucagagccaccagaauu

SEQ ID NO: 14592 - RNA, 1931 nt, Artificial Sequence
  mRNA product Design g-4 comprising derived and/or modified sequence from HRSV(Memphis-37)__AIY60640.1__F-del_DSCav1_mut1 (opt2)
gggagacuccugucgggcggaaguaggaggaguagaguuuaaaaacaguacucuuuuuccgguucgggacguaguugaagcaacgacaagccggauaaccgcucuugagacaggaagcuuaccauggagcuccccauccucaagaccaacgccaucaccaccauccucgccgccgucacccucugcuucgccuccucccagaacaucaccgaggaguucuaccaguccaccugcuccgccgucuccaagggcuaccucggcgcccuccgcaccggcugguacaccuccgucaucaccaucgagcucuccaacaucaaggagaacaagugcaacggcaccgacgccaaggucaagcucaucaagcaggagcucgacaaguacaagaacgccgucaccgagcuccagcuccucaugcaguccacccccgccgccggcuccggcuccgccaucugcuccggcaucgccgucugcaagguccuccaccucgagggcgaggucaacaagaucaagaacgcccuccucuccaccaacaaggccgucgucucccucuccaacggcgucuccguccucaccuucaagguccucgaccucaagaacuacaucgacaagcagcuccuccccauccucaacaagcaguccugcuccauccccaacaucgagaccgucaucgaguuccagcagaagaacaaccgccuccucgagaucacccgcgaguucuccgucaacgccggcgucaccacccccgucuccaccuacaugcucaccaacuccgagcuccucucccucaucaacgacaugcccaucaccaacgaccagaagaagcucauguccaacaacguccagaucguccgccagcaguccuacuccaucaugugcaucaucaaggaggagguccucgccuacgucguccagcucccccucuacggcgucaucgacacccccugcuggaagcuccacaccuccccccucugcaccaccaacaccaaggagggcuccaacaucugccucacccgcaccgaccgcggcugguacugcgacaacgccggcuccgucuccuucuucccccaggccgagaccugcaagguccaguccaaccgcgucuucugcgacaccaugaacucccucacccuccccuccgaggucaaccucugcaacaucgacaucuucaaccccaaguacgacugcaagaucaugaccuccaagaccgacgucuccuccuccgucaucaccucccucggcgccaucgucuccugcuacggcaagaccaagugcaccgccuccaacaagaaccgcggcaucaucaagaccuucuccaacggcugcgacuacgucuccaacaagggcgucgacaccgucuccgucggcaacacccucuacugcgucaacaagcaggagggccagucccucuacgucaagggcgagcccaucaucaacuucuacgacccccucgucuuccccuccgacgaguucgacgccuccaucucccaggucaacgagaagaucaaccagucccucgccuucauccgcaaguccgacgagcuccuccacaacgucaacgucggcaaguccaccaccaacaucaugaucaccaccaucaucaucgucaucaucgucauccuccuccuccucaucgccgucggccucuuccucuacugcaaggcccgcugaggacuaguaauaaggaaacuguaugaaugucugugggcaggaagugaagagauccuucuguaaagguuuuuggaauuaugucugcugaauaauaaacuuuuuugaaauaauaaaucugguagaaaaaugagaucuaaaaaaaaaaaaaaaaaaaaaaaaaaaaaaaaaaaaaaaaaaaaaaaaaaaaaaaaaaaaaaaaugcaucccccccccccccccccccccccccccccccaaaggcucuuuucagagccaccagaauu

SEQ ID NO: 14593 - RNA, 1931 nt, Artificial Sequence
  mRNA product Design g-4 comprising derived and/or modified sequence from HRSV(Memphis-37)__AIY60640.1__F-del_DSCav1_mut1 (opt3)
gggagacuccugucgggcggaaguaggaggaguagaguuuaaaaacaguacucuuuuuccgguucgggacguaguugaagcaacgacaagccggauaaccgcucuugagacaggaagcuuaccauggagcugcccauccucaagaccaacgccauuacaacuauacuugcugcagugacgcugugcuucgccagcucccagaauaucaccgaagaguuuuaccaaucuacauguucagcggucaguaaaggcuauuugggggcuuuaagaacuggaugguacaccagcguuauuacaaucgaacuguccaacauuaaggagaauaaaugcaacgguaccgacgccaaggugaaacuaaucaagcaggaacucgauaaguauaaaaaugcaguaacugagcugcagcuucugaugcagucuacuccugccgcuggcucggggucagcaauauguagcggaaucgccgugugcaaggucuugcaccucgagggcgaagugaacaaaauuaagaaugcucugcugaguaccaacaaagccguugugucccucucuaauggugucagcguguuaacguucaagguacuggaccuuaagaacuacaucgauaaacaauugcugccaauucuaaauaagcaguccuguucaaucccgaacauagagacuguuauugaauuucagcagaaaaauaacaggcuccuggagaucacccgggaguucagugugaaugcgggggucacaacucccgugagcaccuauaugcuuacaaacucugaacuguugucccucauuaacgacaugccuaucaccaaugaucaaaagaaacugaugucaaacaaugugcagaucguccgccagcagagcuacaguauuaugugcauaaucaaggaggaaguuuuagcauaugugguacaacugccacucuacggagugauugacacgcccuguuggaaacuucauacuucuccucugugcacaaccaacacuaaggagggcuccaauaucuguuugacacgaaccgaucguggcugguacugcgacaacgccgggagcgucucguuuuucccacaggcugaaacguguaaggugcagucuaauagaguguuuugcgauaccaugaacucccuaacacugcccucagagguuaaucucugcaacauagacauuuucaauccuaaauaugauuguaagaucaugacaaguaaaaccgacgucagcuccucugugaucacaagccugggagccauuguaucaugcuacgguaagacuaaauguaccgcaaguaacaagaauaggggcaucauuaagacauuuuccaacgggugcgauuauguuagcaauaaaggaguggacaccgucucugugggcaacacucuuuacugugucaacaagcaagagggucagucacuguaugugaaaggggaaccaauaaucaauuucuacgacccguugguuuuucccagugaugaguucgacgcuagcauuucccaggugaacgaaaagaucaaucagucucucgccuuuauccggaaaucggaugagcuguuacacaacguaaaugucggaaagagcacgacaaacauuaugauaaccacuaucauuaucgugauuaucguuauacugcuacuccugaucgcggugggccuuuucuuguauugcaaggcccgcugaggacuaguaauaaggaaacuguaugaaugucugugggcaggaagugaagagauccuucuguaaagguuuuuggaauuaugucugcugaauaauaaacuuuuuugaaauaauaaaucugguagaaaaaugagaucuaaaaaaaaaaaaaaaaaaaaaaaaaaaaaaaaaaaaaaaaaaaaaaaaaaaaaaaaaaaaaaaaugcaucccccccccccccccccccccccccccccccaaaggcucuuuucagagccaccagaauu

SEQ ID NO: 14594 - RNA, 1931 nt, Artificial Sequence
  mRNA product Design g-4 comprising derived and/or modified sequence from HRSV(Memphis-37)__AIY60640.1__F-del_DSCav1_mut1 (opt4)
gggagacuccugucgggcggaaguaggaggaguagaguuuaaaaacaguacucuuuuuccgguucgggacguaguugaagcaacgacaagccggauaaccgcucuugagacaggaagcuuaccauggagcugcccauccugaagaccaacgccaucaccaccauccuggccgccgugacccugugcuucgccagcagccagaacaucaccgaggaguucuaccagagcaccugcagcgccgugagcaagggcuaccugggcgcccugagaaccggcugguacaccagcgugaucaccaucgagcugagcaacaucaaggagaacaagugcaacggcaccgacgccaaggugaagcugaucaagcaggagcuggacaaguacaagaacgccgugaccgagcugcagcugcugaugcagagcacccccgccgccggcagcggcagcgccaucugcagcggcaucgccgugugcaaggugcugcaccuggagggcgaggugaacaagaucaagaacgcccugcugagcaccaacaaggccguggugagccugagcaacggcgugagcgugcugaccuucaaggugcuggaccugaagaacuacaucgacaagcagcugcugcccauccugaacaagcagagcugcagcauccccaacaucgagaccgugaucgaguuccagcagaagaacaacagacugcuggagaucaccagagaguucagcgugaacgccggcgugaccacccccgugagcaccuacaugcugaccaacagcgagcugcugagccugaucaacgacaugcccaucaccaacgaccagaagaagcugaugagcaacaacgugcagaucgugagacagcagagcuacagcaucaugugcaucaucaaggaggaggugcuggccuacguggugcagcugccccuguacggcgugaucgacacccccugcuggaagcugcacaccagcccccugugcaccaccaacaccaaggagggcagcaacaucugccugaccagaaccgacagaggcugguacugcgacaacgccggcagcgugagcuucuucccccaggccgagaccugcaaggugcagagcaacagaguguucugcgacaccaugaacagccugacccugcccagcgaggugaaccugugcaacaucgacaucuucaaccccaaguacgacugcaagaucaugaccagcaagaccgacgugagcagcagcgugaucaccagccugggcgccaucgugagcugcuacggcaagaccaagugcaccgccagcaacaagaacagaggcaucaucaagaccuucagcaacggcugcgacuacgugagcaacaagggcguggacaccgugagcgugggcaacacccuguacugcgugaacaagcaggagggccagagccuguacgugaagggcgagcccaucaucaacuucuacgacccccugguguuccccagcgacgaguucgacgccagcaucagccaggugaacgagaagaucaaccagagccuggccuucaucagaaagagcgacgagcugcugcacaacgugaacgugggcaagagcaccaccaacaucaugaucaccaccaucaucaucgugaucaucgugauccugcugcugcugaucgccgugggccuguuccuguacugcaaggccagaugaggacuaguaauaaggaaacuguaugaaugucugugggcaggaagugaagagauccuucuguaaagguuuuuggaauuaugucugcugaauaauaaacuuuuuugaaauaauaaaucugguagaaaaaugagaucuaaaaaaaaaaaaaaaaaaaaaaaaaaaaaaaaaaaaaaaaaaaaaaaaaaaaaaaaaaaaaaaaugcaucccccccccccccccccccccccccccccccaaaggcucuuuucagagccaccagaauu

SEQ ID NO: 14595 - RNA, 1931 nt, Artificial Sequence
  mRNA product Design g-4 comprising derived and/or modified sequence from HRSV(Memphis-37)__AIY60640.1__F-del_DSCav1_mut1 (opt5)
gggagacuccugucgggcggaaguaggaggaguagaguuuaaaaacaguacucuuuuuccgguucgggacguaguugaagcaacgacaagccggauaaccgcucuugagacaggaagcuuaccauggagcugcccauccucaagaccaacgccauuacaacgauccuggcugccgugacccuuugcuucgcgagcucccagaauauuacagaagaguuuuaccaaucuaccuguagcgcugucuccaaaggcuaucugggggcccucagaacaggaugguacaccucuguuaucacaauugaacugagcaacaucaaggagaauaaaugcaacggcaccgacgccaaggugaaacuuaucaagcaggaacuggauaaguauaaaaaugcugugacggagcuccagcugcugaugcaguccaccccugccgcugggucuggaagcgccauuuguuccggcaucgcggucugcaaggugcuccaccuggagggggaaguuaacaaaauuaagaaugcccuucugagcacaaacaaagcuguggucucucucuccaauggagugagcguucugaccuucaaggugcuugaccugaagaacuacaucgauaaacaacuccugccgauucugaauaagcagucuuguuccauccccaacauugagacagucaucgaauuucagcagaaaaauaaccggcuccuggagaucacccgcgaguucagcgugaaugccggcgugacgacaccugucucuaccuauaugcuuacaaacuccgaacugcucagccugauuaacgacaugcccaucaccaaugaucaaaagaaacuuauguccaacaauguucagauugugagacagcagucuuacagcaucaugugcauuaucaaggaggaagugcuggcuuaugucgugcaacucccucuguacggcguuaucgacacccccuguuggaaacugcauacauccccucucugcacgaccaacacaaaggaggggagcaauauuugucugacccggacagaucgcggaugguacugcgacaacgccggcucuguguccuuuuucccgcaggcggaaaccuguaagguccagagcaauagaguguuuugcgauacgaugaacucucuuacacugcccagcgagguuaaucucugcaacaucgacauuuucaauccuaaauaugauuguaagaucaugaccuccaaaaccgacgugucuagcuccgucauuacaagccugggggccaucgugucuugcuacggaaagaccaaauguacagcuuccaacaagaaucggggcaucauuaagacguuuagcaacgggugcgauuaugucucuaauaaaggaguggacaccguuuccgugggcaacacacuuuacugugucaacaagcaagagggccagagccuguaugugaaaggggaacccaucauuaauuucuacgacccucucguuuuucccuccgaugaguucgacgccucuaucagccaggugaacgaaaagauuaaucagucccuggcuuuuauccgcaaaucugaugagcugcuccacaacgucaaugugggaaagagcaccacaaacauuaugaucaccacgaucauuaucgugauuaucguuauucugcuucugcucaucgccgucggccuguuccuguauugcaaggccagaugaggacuaguaauaaggaaacuguaugaaugucugugggcaggaagugaagagauccuucuguaaagguuuuuggaauuaugucugcugaauaauaaacuuuuuugaaauaauaaaucugguagaaaaaugagaucuaaaaaaaaaaaaaaaaaaaaaaaaaaaaaaaaaaaaaaaaaaaaaaaaaaaaaaaaaaaaaaaaugcaucccccccccccccccccccccccccccccccaaaggcucuuuucagagccaccagaauu

SEQ ID NO: 14596 - RNA, 1931 nt, Artificial Sequence
  mRNA product Design g-4 comprising derived and/or modified sequence from HRSV(Memphis-37)__AIY60640.1__F-del_DSCav1_mut1 (opt6)
gggagacuccugucgggcggaaguaggaggaguagaguuuaaaaacaguacucuuuuuccgguucgggacguaguugaagcaacgacaagccggauaaccgcucuugagacaggaagcuuaccauggaauuaccaauacuaaaaacaaacgcaauaacaacaauucuagcagcaguaacauuaugcuuugcaucaucccaaaacaucacagaagaauuuuaucaaucaaccugcucagcaguuuccaaaggauacuuaggagcauuaagaacugguugguacacuucaguaaucaccaucgaacucucaaacaucaaggaaaacaaaugcaacggaacagacgcaaaaguuaaacucauaaaacaagaacuugacaaauacaaaaacgccguaacagaacuacaacuucucaugcaaucaacacccgcagcaggauccggaucagccauaugcucaggcauagcaguauguaaaguauuacaucuugaaggugaaguaaacaaaauaaaaaacgcacuucuaucaaccaacaaagcaguaguaucacuaucaaacggaguauccgucuuaacauuuaaaguucuagaccucaaaaacuauauagacaaacaauuacugccaauccucaauaaacaaucaugcucaauaccaaacaucgaaacaguaauagaauuucaacaaaaaaacaacagacuacuagaaauaacaagagaauuuuccgucaacgccggcguaacuacuccaguaucaacauauaugcuaaccaacucagaacuccuaucccucauaaacgacaugccaauaacuaaugaucaaaaaaaacuaaugucaaacaauguacaaauaguuagacaacaaucauacucaaucaugugcauaauaaaagaagaaguacuagcauacgucguccaacuaccccuauacggaguaauagacacaccuugcuggaaacuacacacaucaccccuaugcacaacaaauacaaaagaagguuccaacaucugccuaacaagaacugauagaggaugguacugcgacaacgccggaucaguaucauucuucccucaagcugaaaccugcaaaguacaaucaaacagaguauuuugcgauacaaugaacucccuaacacuucccucagaaguuaaucuuuguaauauagauauauucaacccaaaauacgacugcaaaauaaugacaaguaaaacagacguauccucaucuguaauuacaucacuaggagccauaguaucuugcuacggcaaaaccaaaugcacagcaucaaacaaaaacagagguauuaucaaaaccuucucaaacggaugugacuacguuucaaacaaaggaguagacacaguaucagucggaaacacccuauacuguguuaacaaacaagaaggacaaucacuguacguaaaaggagaacccauaauaaauuucuacgacccacuuguauuuccaucagacgaauuugaugcaucaaucucacaaguaaaugaaaaaauaaaccaaucauuagcauucauaagaaaaucugacgaguuacuacacaacguaaauguuggcaaaucaacaaccaauauaaugauaacaacaauaauaauaguaauaauagucauauuacuccuccucauagccgucggauuauucuuauacugcaaagcaagauaaggacuaguaauaaggaaacuguaugaaugucugugggcaggaagugaagagauccuucuguaaagguuuuuggaauuaugucugcugaauaauaaacuuuuuugaaauaauaaaucugguagaaaaaugagaucuaaaaaaaaaaaaaaaaaaaaaaaaaaaaaaaaaaaaaaaaaaaaaaaaaaaaaaaaaaaaaaaaugcaucccccccccccccccccccccccccccccccaaaggcucuuuucagagccaccagaauu

SEQ ID NO: 14597 - RNA, 1931 nt, Artificial Sequence
  mRNA product Design g-4 comprising derived and/or modified sequence from HRSV(Memphis-37)__AIY60640.1__F-del_DSCav1_mut1 (opt11)
gggagacuccugucgggcggaaguaggaggaguagaguuuaaaaacaguacucuuuuuccgguucgggacguaguugaagcaacgacaagccggauaaccgcucuugagacaggaagcuuaccauggaacuccccauacuaaaaaccaacgccaucacaacaauccucgccgccgucacacucugcuucgccagcucccaaaacaucaccgaagaguucuaucaaucaaccugcuccgcagucucaaagggauaccucggagcccuccgcaccggaugguacacuuccgucaucacaauagaacucuccaacaucaaagaaaacaaaugcaacggcaccgacgcaaaagucaagcucaucaaacaagaacucgacaaauauaaaaacgccgucaccgaacuccaacuacucaugcaauccacacccgcggccggcucaggcagcgccaucugcucaggcaucgccgucugcaaaguccuccaccucgaaggcgaagucaacaaaaucaaaaacgcccuucuuucaaccaacaaggcaguaguaucccucucaaacggcgucagcguccugaccuucaaaguccuagaccucaaaaacuacauagauaaacaacuccuccccauacugaacaaacaaucgugcuccauccccaauaucgaaaccgucauagaguuccagcagaaaaacaacagacuucucgaaauaacccgagaguucucaguaaacgccggagucaccacacccguaagcaccuacaugcucacaaacucagaacuccuaucccucaucaacgacaugcccaucaccaacgaccagaaaaagcuaauguccaacaacguccaaauaguacgccaacaaagcuacucgauaaugugcaucaucaaggaagaaguacucgccuacgucguccaacucccccucuacggcguaaucgacacacccugcuggaaacuccacacguccccacucugcacaacaaacacaaaagaaggauccaacauaugccuaacccgcaccgacaggggcugguacugcgacaacgcaggcucagucagcuucuuuccccaagccgaaacaugcaaaguccaauccaaccgugucuucugcgacaccaugaacucgcucacccuacccucggaagucaaucucugcaacaucgacaucuucaacccaaaauacgacuguaaaaucaugaccagcaaaacagacguuucuuccagcgucaucacaucacucggcgcgaucguaucaugcuauggcaaaacaaagugcaccgcuagcaauaaaaaccgaggaaucauaaaaaccuucagcaacggcugcgacuacguauccaacaaaggcgucgacaccguauccgucggaaacacccucuacugcgucaacaagcaagaaggacaaucacucuacgucaaaggcgaaccaaucauaaacuucuacgacccacucguauuccccucagacgaguucgacgcauccaucucccaagucaacgaaaagaucaaccaaucucucgccuuuauacgcaaaagcgacgaacuccuucacaacguaaacgucggcaaaagcaccacuaacauaaugaucaccacaaucauaauaguaaucaucguaauacuccuccuacucaucgccgugggccuauuccucuauugcaaagcccgauaaggacuaguaauaaggaaacuguaugaaugucugugggcaggaagugaagagauccuucuguaaagguuuuuggaauuaugucugcugaauaauaaacuuuuuugaaauaauaaaucugguagaaaaaugagaucuaaaaaaaaaaaaaaaaaaaaaaaaaaaaaaaaaaaaaaaaaaaaaaaaaaaaaaaaaaaaaaaaugcaucccccccccccccccccccccccccccccccaaaggcucuuuucagagccaccagaauu

SEQ ID NO: 14598 - RNA, 1907 nt, Artificial Sequence
  mRNA product Design g-5 comprising derived and/or modified sequence from HRSV(Memphis-37)__AIY60640.1__F-del_DSCav1_mut1 (opt1)
gggagacccgugacccggaaguuguacggcuacgcgacuuucccucccacaaacccucgcgcccuuccuuuccuacuugggcccggcagaaagcuuaccauggagcugcccauccucaagaccaacgccaucaccacgauccuggccgcggugacccugugcuucgccagcucccagaacaucaccgaggaguucuaccagagcacgugcuccgccgucagcaagggcuaccucggcgcccugcgcaccgggugguacaccagcgugaucaccaucgagcuguccaacaucaaggagaacaagugcaacggcaccgacgccaaggugaagcucaucaagcaggagcuggacaaguacaagaacgcggucacggagcugcagcuccugaugcagagcaccccggccgccggcuccgggagcgcgaucugcuccggcaucgccgucugcaaggugcugcaccucgagggcgaggugaacaagaucaagaacgcccugcuguccaccaacaaggccgucgugagccucuccaacggggugagcguccugaccuucaaggugcuggaccucaagaacuacaucgacaagcagcugcugcccauccugaacaagcagagcugcuccauccccaacaucgagaccgucaucgaguuccagcagaagaacaaccgccuccuggagaucacgcgggaguucagcgugaacgcgggcgugaccacccccgucuccaccuacaugcugacgaacagcgagcuccugucccugaucaacgacaugccgaucaccaacgaccagaagaagcucaugagcaacaacgugcagaucgugcgccagcaguccuacagcaucaugugcaucaucaaggaggagguccuggccuacguggugcagcugccccucuacggggucaucgacacccccugcuggaagcugcacaccagcccccugugcacgaccaacaccaaggagggcuccaacaucugccucacccggacggaccgcgggugguacugcgacaacgccggcagcguguccuucuucccgcaggccgagaccugcaagguccagagcaaccggguguucugcgacaccaugaacucccugacccugcccagcgaggugaaccucugcaacaucgacaucuucaaccccaaguacgacugcaagaucaugacguccaagaccgacgucagcuccagcgugaucaccucccugggcgccaucgugagcugcuacgggaagaccaagugcacggcgagcaacaagaaccgcggcaucaucaagaccuucuccaacgggugcgacuacgucagcaacaagggcguggacaccguguccgucggcaacacccuguacugcgugaacaagcaggagggccagagccucuacgugaagggggagcccaucaucaacuucuacgacccgcuggucuuccccuccgacgaguucgacgccagcaucucccaggugaacgagaagaucaaccagagccuggccuucauccggaaguccgacgagcuccugcacaacgugaacgucggcaagagcaccacgaacaucaugaucaccaccaucaucaucgugaucaucgugauccugcugcuccugaucgccgucgggcuguuccucuacugcaaggcccgcugaggacuaguaauaaggaaacuguaugaaugucugugggcaggaagugaagagauccuucuguaaagguuuuuggaauuaugucugcugaauaauaaacuuuuuugaaauaauaaaucugguagaaaaaugagaucuaaaaaaaaaaaaaaaaaaaaaaaaaaaaaaaaaaaaaaaaaaaaaaaaaaaaaaaaaaaaaaaaugcaucccccccccccccccccccccccccccccccaaaggcucuuuucagagccaccagaauu

SEQ ID NO: 14599 - RNA, 1907 nt, Artificial Sequence
  mRNA product Design g-5 comprising derived and/or modified sequence from HRSV(Memphis-37)__AIY60640.1__F-del_DSCav1_mut1 (opt1)
gggagacccgugacccggaaguuguacggcuacgcgacuuucccucccacaaacccucgcgcccuuccuuuccuacuugggcccggcagaaagcuuaccauggagcugcccauccucaagaccaacgccaucaccacgauccuggccgcggugacccugugcuucgccagcucccagaacaucaccgaggaguucuaccagagcacgugcuccgccgucagcaagggcuaccucggggcccugcgcaccggcugguacaccuccgugaucaccaucgagcugagcaacaucaaggagaacaagugcaacgggaccgacgccaaggugaagcucaucaagcaggagcuggacaaguacaagaacgcggucacggagcugcagcuccugaugcaguccaccccggccgccggcagcggguccgccaucugcagcggcaucgcggugugcaaggugcugcaccucgagggcgaggucaacaagaucaagaacgcccugcuguccaccaacaaggccguggugagccucuccaacggggucagcgugcugaccuucaaggugcuggaccucaagaacuacaucgacaagcagcugcugcccauccucaacaagcaguccugcagcauccccaacaucgagacggucaucgaguuccagcagaagaacaaccggcugcuggagaucacccgcgaguucuccgugaacgccggcgugaccacccccgucagcacguacaugcucaccaacuccgagcugcugagccucaucaacgacaugccgaucaccaacgaccagaagaagcugaugagcaacaacgugcagaucgugcggcagcaguccuacagcaucaugugcaucaucaaggaggagguccuggccuacguggugcagcucccccuguacggggucaucgacacccccugcuggaagcugcacacgagcccccucugcaccaccaacaccaaggagggcuccaacaucugccugacgcgcaccgaccgggggugguacugcgacaacgcgggcuccgugagcuucuucccgcaggccgagaccugcaaggugcaguccaaccgcgucuucugcgacaccaugaacagccugacgcuccccuccgaggugaaccugugcaacaucgacaucuucaaccccaaguacgacugcaagaucaugaccagcaagaccgacgucuccagcuccgugaucaccagccugggcgccaucguguccugcuacgggaagacgaagugcaccgccagcaacaagaaccggggcaucaucaagaccuucuccaacgggugcgacuacgucagcaacaagggcguggacaccguguccgucggcaacacgcucuacugcgugaacaagcaggaggggcagagccuguacgugaagggcgagcccaucaucaacuucuacgacccgcuggucuuccccagcgacgaguucgacgccuccaucagccaggugaacgagaagaucaaccagucccucgcguucauccgcaagagcgacgagcugcugcacaacgugaacgucgggaaguccaccaccaacaucaugaucaccaccaucaucaucgugaucaucgugauccuccugcugcucaucgccgucggccuguuccuguacugcaaggcccggugaggacuaguaauaaggaaacuguaugaaugucugugggcaggaagugaagagauccuucuguaaagguuuuuggaauuaugucugcugaauaauaaacuuuuuugaaauaauaaaucugguagaaaaaugagaucuaaaaaaaaaaaaaaaaaaaaaaaaaaaaaaaaaaaaaaaaaaaaaaaaaaaaaaaaaaaaaaaaugcaucccccccccccccccccccccccccccccccaaaggcucuuuucagagccaccagaauu

SEQ ID NO: 14600 - RNA, 1907 nt, Artificial Sequence
  mRNA product Design g-5 comprising derived and/or modified sequence from HRSV(Memphis-37)__AIY60640.1__F-del_DSCav1_mut1 (opt2)
gggagacccgugacccggaaguuguacggcuacgcgacuuucccucccacaaacccucgcgcccuuccuuuccuacuugggcccggcagaaagcuuaccauggagcuccccauccucaagaccaacgccaucaccaccauccucgccgccgucacccucugcuucgccuccucccagaacaucaccgaggaguucuaccaguccaccugcuccgccgucuccaagggcuaccucggcgcccuccgcaccggcugguacaccuccgucaucaccaucgagcucuccaacaucaaggagaacaagugcaacggcaccgacgccaaggucaagcucaucaagcaggagcucgacaaguacaagaacgccgucaccgagcuccagcuccucaugcaguccacccccgccgccggcuccggcuccgccaucugcuccggcaucgccgucugcaagguccuccaccucgagggcgaggucaacaagaucaagaacgcccuccucuccaccaacaaggccgucgucucccucuccaacggcgucuccguccucaccuucaagguccucgaccucaagaacuacaucgacaagcagcuccuccccauccucaacaagcaguccugcuccauccccaacaucgagaccgucaucgaguuccagcagaagaacaaccgccuccucgagaucacccgcgaguucuccgucaacgccggcgucaccacccccgucuccaccuacaugcucaccaacuccgagcuccucucccucaucaacgacaugcccaucaccaacgaccagaagaagcucauguccaacaacguccagaucguccgccagcaguccuacuccaucaugugcaucaucaaggaggagguccucgccuacgucguccagcucccccucuacggcgucaucgacacccccugcuggaagcuccacaccuccccccucugcaccaccaacaccaaggagggcuccaacaucugccucacccgcaccgaccgcggcugguacugcgacaacgccggcuccgucuccuucuucccccaggccgagaccugcaagguccaguccaaccgcgucuucugcgacaccaugaacucccucacccuccccuccgaggucaaccucugcaacaucgacaucuucaaccccaaguacgacugcaagaucaugaccuccaagaccgacgucuccuccuccgucaucaccucccucggcgccaucgucuccugcuacggcaagaccaagugcaccgccuccaacaagaaccgcggcaucaucaagaccuucuccaacggcugcgacuacgucuccaacaagggcgucgacaccgucuccgucggcaacacccucuacugcgucaacaagcaggagggccagucccucuacgucaagggcgagcccaucaucaacuucuacgacccccucgucuuccccuccgacgaguucgacgccuccaucucccaggucaacgagaagaucaaccagucccucgccuucauccgcaaguccgacgagcuccuccacaacgucaacgucggcaaguccaccaccaacaucaugaucaccaccaucaucaucgucaucaucgucauccuccuccuccucaucgccgucggccucuuccucuacugcaaggcccgcugaggacuaguaauaaggaaacuguaugaaugucugugggcaggaagugaagagauccuucuguaaagguuuuuggaauuaugucugcugaauaauaaacuuuuuugaaauaauaaaucugguagaaaaaugagaucuaaaaaaaaaaaaaaaaaaaaaaaaaaaaaaaaaaaaaaaaaaaaaaaaaaaaaaaaaaaaaaaaugcaucccccccccccccccccccccccccccccccaaaggcucuuuucagagccaccagaauu

SEQ ID NO: 14601 - RNA, 1907 nt, Artificial Sequence
  mRNA product Design g-5 comprising derived and/or modified sequence from HRSV(Memphis-37)__AIY60640.1__F-del_DSCav1_mut1 (opt3)
gggagacccgugacccggaaguuguacggcuacgcgacuuucccucccacaaacccucgcgcccuuccuuuccuacuugggcccggcagaaagcuuaccauggagcugcccauccucaagaccaacgccauuacaacuauacuugcugcagugacgcugugcuucgccagcucccagaauaucaccgaagaguuuuaccaaucuacauguucagcggucaguaaaggcuauuugggggcuuuaagaacuggaugguacaccagcguuauuacaaucgaacuguccaacauuaaggagaauaaaugcaacgguaccgacgccaaggugaaacuaaucaagcaggaacucgauaaguauaaaaaugcaguaacugagcugcagcuucugaugcagucuacuccugccgcuggcucggggucagcaauauguagcggaaucgccgugugcaaggucuugcaccucgagggcgaagugaacaaaauuaagaaugcucugcugaguaccaacaaagccguugugucccucucuaauggugucagcguguuaacguucaagguacuggaccuuaagaacuacaucgauaaacaauugcugccaauucuaaauaagcaguccuguucaaucccgaacauagagacuguuauugaauuucagcagaaaaauaacaggcuccuggagaucacccgggaguucagugugaaugcgggggucacaacucccgugagcaccuauaugcuuacaaacucugaacuguugucccucauuaacgacaugccuaucaccaaugaucaaaagaaacugaugucaaacaaugugcagaucguccgccagcagagcuacaguauuaugugcauaaucaaggaggaaguuuuagcauaugugguacaacugccacucuacggagugauugacacgcccuguuggaaacuucauacuucuccucugugcacaaccaacacuaaggagggcuccaauaucuguuugacacgaaccgaucguggcugguacugcgacaacgccgggagcgucucguuuuucccacaggcugaaacguguaaggugcagucuaauagaguguuuugcgauaccaugaacucccuaacacugcccucagagguuaaucucugcaacauagacauuuucaauccuaaauaugauuguaagaucaugacaaguaaaaccgacgucagcuccucugugaucacaagccugggagccauuguaucaugcuacgguaagacuaaauguaccgcaaguaacaagaauaggggcaucauuaagacauuuuccaacgggugcgauuauguuagcaauaaaggaguggacaccgucucugugggcaacacucuuuacugugucaacaagcaagagggucagucacuguaugugaaaggggaaccaauaaucaauuucuacgacccguugguuuuucccagugaugaguucgacgcuagcauuucccaggugaacgaaaagaucaaucagucucucgccuuuauccggaaaucggaugagcuguuacacaacguaaaugucggaaagagcacgacaaacauuaugauaaccacuaucauuaucgugauuaucguuauacugcuacuccugaucgcggugggccuuuucuuguauugcaaggcccgcugaggacuaguaauaaggaaacuguaugaaugucugugggcaggaagugaagagauccuucuguaaagguuuuuggaauuaugucugcugaauaauaaacuuuuuugaaauaauaaaucugguagaaaaaugagaucuaaaaaaaaaaaaaaaaaaaaaaaaaaaaaaaaaaaaaaaaaaaaaaaaaaaaaaaaaaaaaaaaugcaucccccccccccccccccccccccccccccccaaaggcucuuuucagagccaccagaauu

SEQ ID NO: 14602 - RNA, 1907 nt, Artificial Sequence
  mRNA product Design g-5 comprising derived and/or modified sequence from HRSV(Memphis-37)__AIY60640.1__F-del_DSCav1_mut1 (opt4)
gggagacccgugacccggaaguuguacggcuacgcgacuuucccucccacaaacccucgcgcccuuccuuuccuacuugggcccggcagaaagcuuaccauggagcugcccauccugaagaccaacgccaucaccaccauccuggccgccgugacccugugcuucgccagcagccagaacaucaccgaggaguucuaccagagcaccugcagcgccgugagcaagggcuaccugggcgcccugagaaccggcugguacaccagcgugaucaccaucgagcugagcaacaucaaggagaacaagugcaacggcaccgacgccaaggugaagcugaucaagcaggagcuggacaaguacaagaacgccgugaccgagcugcagcugcugaugcagagcacccccgccgccggcagcggcagcgccaucugcagcggcaucgccgugugcaaggugcugcaccuggagggcgaggugaacaagaucaagaacgcccugcugagcaccaacaaggccguggugagccugagcaacggcgugagcgugcugaccuucaaggugcuggaccugaagaacuacaucgacaagcagcugcugcccauccugaacaagcagagcugcagcauccccaacaucgagaccgugaucgaguuccagcagaagaacaacagacugcuggagaucaccagagaguucagcgugaacgccggcgugaccacccccgugagcaccuacaugcugaccaacagcgagcugcugagccugaucaacgacaugcccaucaccaacgaccagaagaagcugaugagcaacaacgugcagaucgugagacagcagagcuacagcaucaugugcaucaucaaggaggaggugcuggccuacguggugcagcugccccuguacggcgugaucgacacccccugcuggaagcugcacaccagcccccugugcaccaccaacaccaaggagggcagcaacaucugccugaccagaaccgacagaggcugguacugcgacaacgccggcagcgugagcuucuucccccaggccgagaccugcaaggugcagagcaacagaguguucugcgacaccaugaacagccugacccugcccagcgaggugaaccugugcaacaucgacaucuucaaccccaaguacgacugcaagaucaugaccagcaagaccgacgugagcagcagcgugaucaccagccugggcgccaucgugagcugcuacggcaagaccaagugcaccgccagcaacaagaacagaggcaucaucaagaccuucagcaacggcugcgacuacgugagcaacaagggcguggacaccgugagcgugggcaacacccuguacugcgugaacaagcaggagggccagagccuguacgugaagggcgagcccaucaucaacuucuacgacccccugguguuccccagcgacgaguucgacgccagcaucagccaggugaacgagaagaucaaccagagccuggccuucaucagaaagagcgacgagcugcugcacaacgugaacgugggcaagagcaccaccaacaucaugaucaccaccaucaucaucgugaucaucgugauccugcugcugcugaucgccgugggccuguuccuguacugcaaggccagaugaggacuaguaauaaggaaacuguaugaaugucugugggcaggaagugaagagauccuucuguaaagguuuuuggaauuaugucugcugaauaauaaacuuuuuugaaauaauaaaucugguagaaaaaugagaucuaaaaaaaaaaaaaaaaaaaaaaaaaaaaaaaaaaaaaaaaaaaaaaaaaaaaaaaaaaaaaaaaugcaucccccccccccccccccccccccccccccccaaaggcucuuuucagagccaccagaauu

SEQ ID NO: 14603 - RNA, 1907 nt, Artificial Sequence
  mRNA product Design g-5 comprising derived and/or modified sequence from HRSV(Memphis-37)__AIY60640.1__F-del_DSCav1_mut1 (opt5)
gggagacccgugacccggaaguuguacggcuacgcgacuuucccucccacaaacccucgcgcccuuccuuuccuacuugggcccggcagaaagcuuaccauggagcugcccauccucaagaccaacgccauuacaacgauccuggcugccgugacccuuugcuucgcgagcucccagaauauuacagaagaguuuuaccaaucuaccuguagcgcugucuccaaaggcuaucugggggcccucagaacaggaugguacaccucuguuaucacaauugaacugagcaacaucaaggagaauaaaugcaacggcaccgacgccaaggugaaacuuaucaagcaggaacuggauaaguauaaaaaugcugugacggagcuccagcugcugaugcaguccaccccugccgcugggucuggaagcgccauuuguuccggcaucgcggucugcaaggugcuccaccuggagggggaaguuaacaaaauuaagaaugcccuucugagcacaaacaaagcuguggucucucucuccaauggagugagcguucugaccuucaaggugcuugaccugaagaacuacaucgauaaacaacuccugccgauucugaauaagcagucuuguuccauccccaacauugagacagucaucgaauuucagcagaaaaauaaccggcuccuggagaucacccgcgaguucagcgugaaugccggcgugacgacaccugucucuaccuauaugcuuacaaacuccgaacugcucagccugauuaacgacaugcccaucaccaaugaucaaaagaaacuuauguccaacaauguucagauugugagacagcagucuuacagcaucaugugcauuaucaaggaggaagugcuggcuuaugucgugcaacucccucuguacggcguuaucgacacccccuguuggaaacugcauacauccccucucugcacgaccaacacaaaggaggggagcaauauuugucugacccggacagaucgcggaugguacugcgacaacgccggcucuguguccuuuuucccgcaggcggaaaccuguaagguccagagcaauagaguguuuugcgauacgaugaacucucuuacacugcccagcgagguuaaucucugcaacaucgacauuuucaauccuaaauaugauuguaagaucaugaccuccaaaaccgacgugucuagcuccgucauuacaagccugggggccaucgugucuugcuacggaaagaccaaauguacagcuuccaacaagaaucggggcaucauuaagacguuuagcaacgggugcgauuaugucucuaauaaaggaguggacaccguuuccgugggcaacacacuuuacugugucaacaagcaagagggccagagccuguaugugaaaggggaacccaucauuaauuucuacgacccucucguuuuucccuccgaugaguucgacgccucuaucagccaggugaacgaaaagauuaaucagucccuggcuuuuauccgcaaaucugaugagcugcuccacaacgucaaugugggaaagagcaccacaaacauuaugaucaccacgaucauuaucgugauuaucguuauucugcuucugcucaucgccgucggccuguuccuguauugcaaggccagaugaggacuaguaauaaggaaacuguaugaaugucugugggcaggaagugaagagauccuucuguaaagguuuuuggaauuaugucugcugaauaauaaacuuuuuugaaauaauaaaucugguagaaaaaugagaucuaaaaaaaaaaaaaaaaaaaaaaaaaaaaaaaaaaaaaaaaaaaaaaaaaaaaaaaaaaaaaaaaugcaucccccccccccccccccccccccccccccccaaaggcucuuuucagagccaccagaauu

SEQ ID NO: 14604 - RNA, 1907 nt, Artificial Sequence
  mRNA product Design g-5 comprising derived and/or modified sequence from HRSV(Memphis-37)__AIY60640.1__F-del_DSCav1_mut1 (opt6)
gggagacccgugacccggaaguuguacggcuacgcgacuuucccucccacaaacccucgcgcccuuccuuuccuacuugggcccggcagaaagcuuaccauggaauuaccaauacuaaaaacaaacgcaauaacaacaauucuagcagcaguaacauuaugcuuugcaucaucccaaaacaucacagaagaauuuuaucaaucaaccugcucagcaguuuccaaaggauacuuaggagcauuaagaacugguugguacacuucaguaaucaccaucgaacucucaaacaucaaggaaaacaaaugcaacggaacagacgcaaaaguuaaacucauaaaacaagaacuugacaaauacaaaaacgccguaacagaacuacaacuucucaugcaaucaacacccgcagcaggauccggaucagccauaugcucaggcauagcaguauguaaaguauuacaucuugaaggugaaguaaacaaaauaaaaaacgcacuucuaucaaccaacaaagcaguaguaucacuaucaaacggaguauccgucuuaacauuuaaaguucuagaccucaaaaacuauauagacaaacaauuacugccaauccucaauaaacaaucaugcucaauaccaaacaucgaaacaguaauagaauuucaacaaaaaaacaacagacuacuagaaauaacaagagaauuuuccgucaacgccggcguaacuacuccaguaucaacauauaugcuaaccaacucagaacuccuaucccucauaaacgacaugccaauaacuaaugaucaaaaaaaacuaaugucaaacaauguacaaauaguuagacaacaaucauacucaaucaugugcauaauaaaagaagaaguacuagcauacgucguccaacuaccccuauacggaguaauagacacaccuugcuggaaacuacacacaucaccccuaugcacaacaaauacaaaagaagguuccaacaucugccuaacaagaacugauagaggaugguacugcgacaacgccggaucaguaucauucuucccucaagcugaaaccugcaaaguacaaucaaacagaguauuuugcgauacaaugaacucccuaacacuucccucagaaguuaaucuuuguaauauagauauauucaacccaaaauacgacugcaaaauaaugacaaguaaaacagacguauccucaucuguaauuacaucacuaggagccauaguaucuugcuacggcaaaaccaaaugcacagcaucaaacaaaaacagagguauuaucaaaaccuucucaaacggaugugacuacguuucaaacaaaggaguagacacaguaucagucggaaacacccuauacuguguuaacaaacaagaaggacaaucacuguacguaaaaggagaacccauaauaaauuucuacgacccacuuguauuuccaucagacgaauuugaugcaucaaucucacaaguaaaugaaaaaauaaaccaaucauuagcauucauaagaaaaucugacgaguuacuacacaacguaaauguuggcaaaucaacaaccaauauaaugauaacaacaauaauaauaguaauaauagucauauuacuccuccucauagccgucggauuauucuuauacugcaaagcaagauaaggacuaguaauaaggaaacuguaugaaugucugugggcaggaagugaagagauccuucuguaaagguuuuuggaauuaugucugcugaauaauaaacuuuuuugaaauaauaaaucugguagaaaaaugagaucuaaaaaaaaaaaaaaaaaaaaaaaaaaaaaaaaaaaaaaaaaaaaaaaaaaaaaaaaaaaaaaaaugcaucccccccccccccccccccccccccccccccaaaggcucuuuucagagccaccagaauu

SEQ ID NO: 14605 - RNA, 1907 nt, Artificial Sequence
  mRNA product Design g-5 comprising derived and/or modified sequence from HRSV(Memphis-37)__AIY60640.1__F-del_DSCav1_mut1 (opt11)
gggagacccgugacccggaaguuguacggcuacgcgacuuucccucccacaaacccucgcgcccuuccuuuccuacuugggcccggcagaaagcuuaccauggaacuccccauacuaaaaaccaacgccaucacaacaauccucgccgccgucacacucugcuucgccagcucccaaaacaucaccgaagaguucuaucaaucaaccugcuccgcagucucaaagggauaccucggagcccuccgcaccggaugguacacuuccgucaucacaauagaacucuccaacaucaaagaaaacaaaugcaacggcaccgacgcaaaagucaagcucaucaaacaagaacucgacaaauauaaaaacgccgucaccgaacuccaacuacucaugcaauccacacccgcggccggcucaggcagcgccaucugcucaggcaucgccgucugcaaaguccuccaccucgaaggcgaagucaacaaaaucaaaaacgcccuucuuucaaccaacaaggcaguaguaucccucucaaacggcgucagcguccugaccuucaaaguccuagaccucaaaaacuacauagauaaacaacuccuccccauacugaacaaacaaucgugcuccauccccaauaucgaaaccgucauagaguuccagcagaaaaacaacagacuucucgaaauaacccgagaguucucaguaaacgccggagucaccacacccguaagcaccuacaugcucacaaacucagaacuccuaucccucaucaacgacaugcccaucaccaacgaccagaaaaagcuaauguccaacaacguccaaauaguacgccaacaaagcuacucgauaaugugcaucaucaaggaagaaguacucgccuacgucguccaacucccccucuacggcguaaucgacacacccugcuggaaacuccacacguccccacucugcacaacaaacacaaaagaaggauccaacauaugccuaacccgcaccgacaggggcugguacugcgacaacgcaggcucagucagcuucuuuccccaagccgaaacaugcaaaguccaauccaaccgugucuucugcgacaccaugaacucgcucacccuacccucggaagucaaucucugcaacaucgacaucuucaacccaaaauacgacuguaaaaucaugaccagcaaaacagacguuucuuccagcgucaucacaucacucggcgcgaucguaucaugcuauggcaaaacaaagugcaccgcuagcaauaaaaaccgaggaaucauaaaaaccuucagcaacggcugcgacuacguauccaacaaaggcgucgacaccguauccgucggaaacacccucuacugcgucaacaagcaagaaggacaaucacucuacgucaaaggcgaaccaaucauaaacuucuacgacccacucguauuccccucagacgaguucgacgcauccaucucccaagucaacgaaaagaucaaccaaucucucgccuuuauacgcaaaagcgacgaacuccuucacaacguaaacgucggcaaaagcaccacuaacauaaugaucaccacaaucauaauaguaaucaucguaauacuccuccuacucaucgccgugggccuauuccucuauugcaaagcccgauaaggacuaguaauaaggaaacuguaugaaugucugugggcaggaagugaagagauccuucuguaaagguuuuuggaauuaugucugcugaauaauaaacuuuuuugaaauaauaaaucugguagaaaaaugagaucuaaaaaaaaaaaaaaaaaaaaaaaaaaaaaaaaaaaaaaaaaaaaaaaaaaaaaaaaaaaaaaaaugcaucccccccccccccccccccccccccccccccaaaggcucuuuucagagccaccagaauu

SEQ ID NO: 14606 - RNA, 1923 nt, Artificial Sequence
  mRNA product Design h-1 comprising derived and/or modified sequence from HRSV(Memphis-37)__AIY60640.1__F-del_DSCav1_mut1 (opt1)
gggagacccgugacccggaaguuguacggcuacgcgacuuucccucccacaaacccucgcgcccuuccuuuccuacuugggcccggcagaaagcuuaccauggagcugcccauccucaagaccaacgccaucaccacgauccuggccgcggugacccugugcuucgccagcucccagaacaucaccgaggaguucuaccagagcacgugcuccgccgucagcaagggcuaccucggcgcccugcgcaccgggugguacaccagcgugaucaccaucgagcuguccaacaucaaggagaacaagugcaacggcaccgacgccaaggugaagcucaucaagcaggagcuggacaaguacaagaacgcggucacggagcugcagcuccugaugcagagcaccccggccgccggcuccgggagcgcgaucugcuccggcaucgccgucugcaaggugcugcaccucgagggcgaggugaacaagaucaagaacgcccugcuguccaccaacaaggccgucgugagccucuccaacggggugagcguccugaccuucaaggugcuggaccucaagaacuacaucgacaagcagcugcugcccauccugaacaagcagagcugcuccauccccaacaucgagaccgucaucgaguuccagcagaagaacaaccgccuccuggagaucacgcgggaguucagcgugaacgcgggcgugaccacccccgucuccaccuacaugcugacgaacagcgagcuccugucccugaucaacgacaugccgaucaccaacgaccagaagaagcucaugagcaacaacgugcagaucgugcgccagcaguccuacagcaucaugugcaucaucaaggaggagguccuggccuacguggugcagcugccccucuacggggucaucgacacccccugcuggaagcugcacaccagcccccugugcacgaccaacaccaaggagggcuccaacaucugccucacccggacggaccgcgggugguacugcgacaacgccggcagcguguccuucuucccgcaggccgagaccugcaagguccagagcaaccggguguucugcgacaccaugaacucccugacccugcccagcgaggugaaccucugcaacaucgacaucuucaaccccaaguacgacugcaagaucaugacguccaagaccgacgucagcuccagcgugaucaccucccugggcgccaucgugagcugcuacgggaagaccaagugcacggcgagcaacaagaaccgcggcaucaucaagaccuucuccaacgggugcgacuacgucagcaacaagggcguggacaccguguccgucggcaacacccuguacugcgugaacaagcaggagggccagagccucuacgugaagggggagcccaucaucaacuucuacgacccgcuggucuuccccuccgacgaguucgacgccagcaucucccaggugaacgagaagaucaaccagagccuggccuucauccggaaguccgacgagcuccugcacaacgugaacgucggcaagagcaccacgaacaucaugaucaccaccaucaucaucgugaucaucgugauccugcugcuccugaucgccgucgggcuguuccucuacugcaaggcccgcugaggacuaguacuggcugcaucucccuuuccucuguccuccauccuucucccaggauggugaagggggaccugguacccagugauccccaccccaggauccuaaaucaugacuuaccugcuaauaaaaacucauuggaaaagugagaagaucuaaaaaaaaaaaaaaaaaaaaaaaaaaaaaaaaaaaaaaaaaaaaaaaaaaaaaaaaaaaaaaaaugcaucccccccccccccccccccccccccccccccaaaggcucuuuucagagccaccagaauu

SEQ ID NO: 14607 - RNA, 1923 nt, Artificial Sequence
  mRNA product Design h-1 comprising derived and/or modified sequence from HRSV(Memphis-37)__AIY60640.1__F-del_DSCav1_mut1 (opt1)
gggagacccgugacccggaaguuguacggcuacgcgacuuucccucccacaaacccucgcgcccuuccuuuccuacuugggcccggcagaaagcuuaccauggagcugcccauccucaagaccaacgccaucaccacgauccuggccgcggugacccugugcuucgccagcucccagaacaucaccgaggaguucuaccagagcacgugcuccgccgucagcaagggcuaccucggggcccugcgcaccggcugguacaccuccgugaucaccaucgagcugagcaacaucaaggagaacaagugcaacgggaccgacgccaaggugaagcucaucaagcaggagcuggacaaguacaagaacgcggucacggagcugcagcuccugaugcaguccaccccggccgccggcagcggguccgccaucugcagcggcaucgcggugugcaaggugcugcaccucgagggcgaggucaacaagaucaagaacgcccugcuguccaccaacaaggccguggugagccucuccaacggggucagcgugcugaccuucaaggugcuggaccucaagaacuacaucgacaagcagcugcugcccauccucaacaagcaguccugcagcauccccaacaucgagacggucaucgaguuccagcagaagaacaaccggcugcuggagaucacccgcgaguucuccgugaacgccggcgugaccacccccgucagcacguacaugcucaccaacuccgagcugcugagccucaucaacgacaugccgaucaccaacgaccagaagaagcugaugagcaacaacgugcagaucgugcggcagcaguccuacagcaucaugugcaucaucaaggaggagguccuggccuacguggugcagcucccccuguacggggucaucgacacccccugcuggaagcugcacacgagcccccucugcaccaccaacaccaaggagggcuccaacaucugccugacgcgcaccgaccgggggugguacugcgacaacgcgggcuccgugagcuucuucccgcaggccgagaccugcaaggugcaguccaaccgcgucuucugcgacaccaugaacagccugacgcuccccuccgaggugaaccugugcaacaucgacaucuucaaccccaaguacgacugcaagaucaugaccagcaagaccgacgucuccagcuccgugaucaccagccugggcgccaucguguccugcuacgggaagacgaagugcaccgccagcaacaagaaccggggcaucaucaagaccuucuccaacgggugcgacuacgucagcaacaagggcguggacaccguguccgucggcaacacgcucuacugcgugaacaagcaggaggggcagagccuguacgugaagggcgagcccaucaucaacuucuacgacccgcuggucuuccccagcgacgaguucgacgccuccaucagccaggugaacgagaagaucaaccagucccucgcguucauccgcaagagcgacgagcugcugcacaacgugaacgucgggaaguccaccaccaacaucaugaucaccaccaucaucaucgugaucaucgugauccuccugcugcucaucgccgucggccuguuccuguacugcaaggcccggugaggacuaguacuggcugcaucucccuuuccucuguccuccauccuucucccaggauggugaagggggaccugguacccagugauccccaccccaggauccuaaaucaugacuuaccugcuaauaaaaacucauuggaaaagugagaagaucuaaaaaaaaaaaaaaaaaaaaaaaaaaaaaaaaaaaaaaaaaaaaaaaaaaaaaaaaaaaaaaaaugcaucccccccccccccccccccccccccccccccaaaggcucuuuucagagccaccagaauu

SEQ ID NO: 14608 - RNA, 1923 nt, Artificial Sequence
  mRNA product Design h-1 comprising derived and/or modified sequence from HRSV(Memphis-37)__AIY60640.1__F-del_DSCav1_mut1 (opt2)
gggagacccgugacccggaaguuguacggcuacgcgacuuucccucccacaaacccucgcgcccuuccuuuccuacuugggcccggcagaaagcuuaccauggagcuccccauccucaagaccaacgccaucaccaccauccucgccgccgucacccucugcuucgccuccucccagaacaucaccgaggaguucuaccaguccaccugcuccgccgucuccaagggcuaccucggcgcccuccgcaccggcugguacaccuccgucaucaccaucgagcucuccaacaucaaggagaacaagugcaacggcaccgacgccaaggucaagcucaucaagcaggagcucgacaaguacaagaacgccgucaccgagcuccagcuccucaugcaguccacccccgccgccggcuccggcuccgccaucugcuccggcaucgccgucugcaagguccuccaccucgagggcgaggucaacaagaucaagaacgcccuccucuccaccaacaaggccgucgucucccucuccaacggcgucuccguccucaccuucaagguccucgaccucaagaacuacaucgacaagcagcuccuccccauccucaacaagcaguccugcuccauccccaacaucgagaccgucaucgaguuccagcagaagaacaaccgccuccucgagaucacccgcgaguucuccgucaacgccggcgucaccacccccgucuccaccuacaugcucaccaacuccgagcuccucucccucaucaacgacaugcccaucaccaacgaccagaagaagcucauguccaacaacguccagaucguccgccagcaguccuacuccaucaugugcaucaucaaggaggagguccucgccuacgucguccagcucccccucuacggcgucaucgacacccccugcuggaagcuccacaccuccccccucugcaccaccaacaccaaggagggcuccaacaucugccucacccgcaccgaccgcggcugguacugcgacaacgccggcuccgucuccuucuucccccaggccgagaccugcaagguccaguccaaccgcgucuucugcgacaccaugaacucccucacccuccccuccgaggucaaccucugcaacaucgacaucuucaaccccaaguacgacugcaagaucaugaccuccaagaccgacgucuccuccuccgucaucaccucccucggcgccaucgucuccugcuacggcaagaccaagugcaccgccuccaacaagaaccgcggcaucaucaagaccuucuccaacggcugcgacuacgucuccaacaagggcgucgacaccgucuccgucggcaacacccucuacugcgucaacaagcaggagggccagucccucuacgucaagggcgagcccaucaucaacuucuacgacccccucgucuuccccuccgacgaguucgacgccuccaucucccaggucaacgagaagaucaaccagucccucgccuucauccgcaaguccgacgagcuccuccacaacgucaacgucggcaaguccaccaccaacaucaugaucaccaccaucaucaucgucaucaucgucauccuccuccuccucaucgccgucggccucuuccucuacugcaaggcccgcugaggacuaguacuggcugcaucucccuuuccucuguccuccauccuucucccaggauggugaagggggaccugguacccagugauccccaccccaggauccuaaaucaugacuuaccugcuaauaaaaacucauuggaaaagugagaagaucuaaaaaaaaaaaaaaaaaaaaaaaaaaaaaaaaaaaaaaaaaaaaaaaaaaaaaaaaaaaaaaaaugcaucccccccccccccccccccccccccccccccaaaggcucuuuucagagccaccagaauu

SEQ ID NO: 14609 - RNA, 1923 nt, Artificial Sequence
  mRNA product Design h-1 comprising derived and/or modified sequence from HRSV(Memphis-37)__AIY60640.1__F-del_DSCav1_mut1 (opt3)
gggagacccgugacccggaaguuguacggcuacgcgacuuucccucccacaaacccucgcgcccuuccuuuccuacuugggcccggcagaaagcuuaccauggagcugcccauccucaagaccaacgccauuacaacuauacuugcugcagugacgcugugcuucgccagcucccagaauaucaccgaagaguuuuaccaaucuacauguucagcggucaguaaaggcuauuugggggcuuuaagaacuggaugguacaccagcguuauuacaaucgaacuguccaacauuaaggagaauaaaugcaacgguaccgacgccaaggugaaacuaaucaagcaggaacucgauaaguauaaaaaugcaguaacugagcugcagcuucugaugcagucuacuccugccgcuggcucggggucagcaauauguagcggaaucgccgugugcaaggucuugcaccucgagggcgaagugaacaaaauuaagaaugcucugcugaguaccaacaaagccguugugucccucucuaauggugucagcguguuaacguucaagguacuggaccuuaagaacuacaucgauaaacaauugcugccaauucuaaauaagcaguccuguucaaucccgaacauagagacuguuauugaauuucagcagaaaaauaacaggcuccuggagaucacccgggaguucagugugaaugcgggggucacaacucccgugagcaccuauaugcuuacaaacucugaacuguugucccucauuaacgacaugccuaucaccaaugaucaaaagaaacugaugucaaacaaugugcagaucguccgccagcagagcuacaguauuaugugcauaaucaaggaggaaguuuuagcauaugugguacaacugccacucuacggagugauugacacgcccuguuggaaacuucauacuucuccucugugcacaaccaacacuaaggagggcuccaauaucuguuugacacgaaccgaucguggcugguacugcgacaacgccgggagcgucucguuuuucccacaggcugaaacguguaaggugcagucuaauagaguguuuugcgauaccaugaacucccuaacacugcccucagagguuaaucucugcaacauagacauuuucaauccuaaauaugauuguaagaucaugacaaguaaaaccgacgucagcuccucugugaucacaagccugggagccauuguaucaugcuacgguaagacuaaauguaccgcaaguaacaagaauaggggcaucauuaagacauuuuccaacgggugcgauuauguuagcaauaaaggaguggacaccgucucugugggcaacacucuuuacugugucaacaagcaagagggucagucacuguaugugaaaggggaaccaauaaucaauuucuacgacccguugguuuuucccagugaugaguucgacgcuagcauuucccaggugaacgaaaagaucaaucagucucucgccuuuauccggaaaucggaugagcuguuacacaacguaaaugucggaaagagcacgacaaacauuaugauaaccacuaucauuaucgugauuaucguuauacugcuacuccugaucgcggugggccuuuucuuguauugcaaggcccgcugaggacuaguacuggcugcaucucccuuuccucuguccuccauccuucucccaggauggugaagggggaccugguacccagugauccccaccccaggauccuaaaucaugacuuaccugcuaauaaaaacucauuggaaaagugagaagaucuaaaaaaaaaaaaaaaaaaaaaaaaaaaaaaaaaaaaaaaaaaaaaaaaaaaaaaaaaaaaaaaaugcaucccccccccccccccccccccccccccccccaaaggcucuuuucagagccaccagaauu

SEQ ID NO: 14610 - RNA, 1923 nt, Artificial Sequence
  mRNA product Design h-1 comprising derived and/or modified sequence from HRSV(Memphis-37)__AIY60640.1__F-del_DSCav1_mut1 (opt4)
gggagacccgugacccggaaguuguacggcuacgcgacuuucccucccacaaacccucgcgcccuuccuuuccuacuugggcccggcagaaagcuuaccauggagcugcccauccugaagaccaacgccaucaccaccauccuggccgccgugacccugugcuucgccagcagccagaacaucaccgaggaguucuaccagagcaccugcagcgccgugagcaagggcuaccugggcgcccugagaaccggcugguacaccagcgugaucaccaucgagcugagcaacaucaaggagaacaagugcaacggcaccgacgccaaggugaagcugaucaagcaggagcuggacaaguacaagaacgccgugaccgagcugcagcugcugaugcagagcacccccgccgccggcagcggcagcgccaucugcagcggcaucgccgugugcaaggugcugcaccuggagggcgaggugaacaagaucaagaacgcccugcugagcaccaacaaggccguggugagccugagcaacggcgugagcgugcugaccuucaaggugcuggaccugaagaacuacaucgacaagcagcugcugcccauccugaacaagcagagcugcagcauccccaacaucgagaccgugaucgaguuccagcagaagaacaacagacugcuggagaucaccagagaguucagcgugaacgccggcgugaccacccccgugagcaccuacaugcugaccaacagcgagcugcugagccugaucaacgacaugcccaucaccaacgaccagaagaagcugaugagcaacaacgugcagaucgugagacagcagagcuacagcaucaugugcaucaucaaggaggaggugcuggccuacguggugcagcugccccuguacggcgugaucgacacccccugcuggaagcugcacaccagcccccugugcaccaccaacaccaaggagggcagcaacaucugccugaccagaaccgacagaggcugguacugcgacaacgccggcagcgugagcuucuucccccaggccgagaccugcaaggugcagagcaacagaguguucugcgacaccaugaacagccugacccugcccagcgaggugaaccugugcaacaucgacaucuucaaccccaaguacgacugcaagaucaugaccagcaagaccgacgugagcagcagcgugaucaccagccugggcgccaucgugagcugcuacggcaagaccaagugcaccgccagcaacaagaacagaggcaucaucaagaccuucagcaacggcugcgacuacgugagcaacaagggcguggacaccgugagcgugggcaacacccuguacugcgugaacaagcaggagggccagagccuguacgugaagggcgagcccaucaucaacuucuacgacccccugguguuccccagcgacgaguucgacgccagcaucagccaggugaacgagaagaucaaccagagccuggccuucaucagaaagagcgacgagcugcugcacaacgugaacgugggcaagagcaccaccaacaucaugaucaccaccaucaucaucgugaucaucgugauccugcugcugcugaucgccgugggccuguuccuguacugcaaggccagaugaggacuaguacuggcugcaucucccuuuccucuguccuccauccuucucccaggauggugaagggggaccugguacccagugauccccaccccaggauccuaaaucaugacuuaccugcuaauaaaaacucauuggaaaagugagaagaucuaaaaaaaaaaaaaaaaaaaaaaaaaaaaaaaaaaaaaaaaaaaaaaaaaaaaaaaaaaaaaaaaugcaucccccccccccccccccccccccccccccccaaaggcucuuuucagagccaccagaauu

SEQ ID NO: 14611 - RNA, 1923 nt, Artificial Sequence
  mRNA product Design h-1 comprising derived and/or modified sequence from HRSV(Memphis-37)__AIY60640.1__F-del_DSCav1_mut1 (opt5)
gggagacccgugacccggaaguuguacggcuacgcgacuuucccucccacaaacccucgcgcccuuccuuuccuacuugggcccggcagaaagcuuaccauggagcugcccauccucaagaccaacgccauuacaacgauccuggcugccgugacccuuugcuucgcgagcucccagaauauuacagaagaguuuuaccaaucuaccuguagcgcugucuccaaaggcuaucugggggcccucagaacaggaugguacaccucuguuaucacaauugaacugagcaacaucaaggagaauaaaugcaacggcaccgacgccaaggugaaacuuaucaagcaggaacuggauaaguauaaaaaugcugugacggagcuccagcugcugaugcaguccaccccugccgcugggucuggaagcgccauuuguuccggcaucgcggucugcaaggugcuccaccuggagggggaaguuaacaaaauuaagaaugcccuucugagcacaaacaaagcuguggucucucucuccaauggagugagcguucugaccuucaaggugcuugaccugaagaacuacaucgauaaacaacuccugccgauucugaauaagcagucuuguuccauccccaacauugagacagucaucgaauuucagcagaaaaauaaccggcuccuggagaucacccgcgaguucagcgugaaugccggcgugacgacaccugucucuaccuauaugcuuacaaacuccgaacugcucagccugauuaacgacaugcccaucaccaaugaucaaaagaaacuuauguccaacaauguucagauugugagacagcagucuuacagcaucaugugcauuaucaaggaggaagugcuggcuuaugucgugcaacucccucuguacggcguuaucgacacccccuguuggaaacugcauacauccccucucugcacgaccaacacaaaggaggggagcaauauuugucugacccggacagaucgcggaugguacugcgacaacgccggcucuguguccuuuuucccgcaggcggaaaccuguaagguccagagcaauagaguguuuugcgauacgaugaacucucuuacacugcccagcgagguuaaucucugcaacaucgacauuuucaauccuaaauaugauuguaagaucaugaccuccaaaaccgacgugucuagcuccgucauuacaagccugggggccaucgugucuugcuacggaaagaccaaauguacagcuuccaacaagaaucggggcaucauuaagacguuuagcaacgggugcgauuaugucucuaauaaaggaguggacaccguuuccgugggcaacacacuuuacugugucaacaagcaagagggccagagccuguaugugaaaggggaacccaucauuaauuucuacgacccucucguuuuucccuccgaugaguucgacgccucuaucagccaggugaacgaaaagauuaaucagucccuggcuuuuauccgcaaaucugaugagcugcuccacaacgucaaugugggaaagagcaccacaaacauuaugaucaccacgaucauuaucgugauuaucguuauucugcuucugcucaucgccgucggccuguuccuguauugcaaggccagaugaggacuaguacuggcugcaucucccuuuccucuguccuccauccuucucccaggauggugaagggggaccugguacccagugauccccaccccaggauccuaaaucaugacuuaccugcuaauaaaaacucauuggaaaagugagaagaucuaaaaaaaaaaaaaaaaaaaaaaaaaaaaaaaaaaaaaaaaaaaaaaaaaaaaaaaaaaaaaaaaugcaucccccccccccccccccccccccccccccccaaaggcucuuuucagagccaccagaauu

SEQ ID NO: 14612 - RNA, 1923 nt, Artificial Sequence
  mRNA product Design h-1 comprising derived and/or modified sequence from HRSV(Memphis-37)__AIY60640.1__F-del_DSCav1_mut1 (opt6)
gggagacccgugacccggaaguuguacggcuacgcgacuuucccucccacaaacccucgcgcccuuccuuuccuacuugggcccggcagaaagcuuaccauggaauuaccaauacuaaaaacaaacgcaauaacaacaauucuagcagcaguaacauuaugcuuugcaucaucccaaaacaucacagaagaauuuuaucaaucaaccugcucagcaguuuccaaaggauacuuaggagcauuaagaacugguugguacacuucaguaaucaccaucgaacucucaaacaucaaggaaaacaaaugcaacggaacagacgcaaaaguuaaacucauaaaacaagaacuugacaaauacaaaaacgccguaacagaacuacaacuucucaugcaaucaacacccgcagcaggauccggaucagccauaugcucaggcauagcaguauguaaaguauuacaucuugaaggugaaguaaacaaaauaaaaaacgcacuucuaucaaccaacaaagcaguaguaucacuaucaaacggaguauccgucuuaacauuuaaaguucuagaccucaaaaacuauauagacaaacaauuacugccaauccucaauaaacaaucaugcucaauaccaaacaucgaaacaguaauagaauuucaacaaaaaaacaacagacuacuagaaauaacaagagaauuuuccgucaacgccggcguaacuacuccaguaucaacauauaugcuaaccaacucagaacuccuaucccucauaaacgacaugccaauaacuaaugaucaaaaaaaacuaaugucaaacaauguacaaauaguuagacaacaaucauacucaaucaugugcauaauaaaagaagaaguacuagcauacgucguccaacuaccccuauacggaguaauagacacaccuugcuggaaacuacacacaucaccccuaugcacaacaaauacaaaagaagguuccaacaucugccuaacaagaacugauagaggaugguacugcgacaacgccggaucaguaucauucuucccucaagcugaaaccugcaaaguacaaucaaacagaguauuuugcgauacaaugaacucccuaacacuucccucagaaguuaaucuuuguaauauagauauauucaacccaaaauacgacugcaaaauaaugacaaguaaaacagacguauccucaucuguaauuacaucacuaggagccauaguaucuugcuacggcaaaaccaaaugcacagcaucaaacaaaaacagagguauuaucaaaaccuucucaaacggaugugacuacguuucaaacaaaggaguagacacaguaucagucggaaacacccuauacuguguuaacaaacaagaaggacaaucacuguacguaaaaggagaacccauaauaaauuucuacgacccacuuguauuuccaucagacgaauuugaugcaucaaucucacaaguaaaugaaaaaauaaaccaaucauuagcauucauaagaaaaucugacgaguuacuacacaacguaaauguuggcaaaucaacaaccaauauaaugauaacaacaauaauaauaguaauaauagucauauuacuccuccucauagccgucggauuauucuuauacugcaaagcaagauaaggacuaguacuggcugcaucucccuuuccucuguccuccauccuucucccaggauggugaagggggaccugguacccagugauccccaccccaggauccuaaaucaugacuuaccugcuaauaaaaacucauuggaaaagugagaagaucuaaaaaaaaaaaaaaaaaaaaaaaaaaaaaaaaaaaaaaaaaaaaaaaaaaaaaaaaaaaaaaaaugcaucccccccccccccccccccccccccccccccaaaggcucuuuucagagccaccagaauu

SEQ ID NO: 14613 - RNA, 1923 nt, Artificial Sequence
  mRNA product Design h-1 comprising derived and/or modified sequence from HRSV(Memphis-37)__AIY60640.1__F-del_DSCav1_mut1 (opt11)
gggagacccgugacccggaaguuguacggcuacgcgacuuucccucccacaaacccucgcgcccuuccuuuccuacuugggcccggcagaaagcuuaccauggaacuccccauacuaaaaaccaacgccaucacaacaauccucgccgccgucacacucugcuucgccagcucccaaaacaucaccgaagaguucuaucaaucaaccugcuccgcagucucaaagggauaccucggagcccuccgcaccggaugguacacuuccgucaucacaauagaacucuccaacaucaaagaaaacaaaugcaacggcaccgacgcaaaagucaagcucaucaaacaagaacucgacaaauauaaaaacgccgucaccgaacuccaacuacucaugcaauccacacccgcggccggcucaggcagcgccaucugcucaggcaucgccgucugcaaaguccuccaccucgaaggcgaagucaacaaaaucaaaaacgcccuucuuucaaccaacaaggcaguaguaucccucucaaacggcgucagcguccugaccuucaaaguccuagaccucaaaaacuacauagauaaacaacuccuccccauacugaacaaacaaucgugcuccauccccaauaucgaaaccgucauagaguuccagcagaaaaacaacagacuucucgaaauaacccgagaguucucaguaaacgccggagucaccacacccguaagcaccuacaugcucacaaacucagaacuccuaucccucaucaacgacaugcccaucaccaacgaccagaaaaagcuaauguccaacaacguccaaauaguacgccaacaaagcuacucgauaaugugcaucaucaaggaagaaguacucgccuacgucguccaacucccccucuacggcguaaucgacacacccugcuggaaacuccacacguccccacucugcacaacaaacacaaaagaaggauccaacauaugccuaacccgcaccgacaggggcugguacugcgacaacgcaggcucagucagcuucuuuccccaagccgaaacaugcaaaguccaauccaaccgugucuucugcgacaccaugaacucgcucacccuacccucggaagucaaucucugcaacaucgacaucuucaacccaaaauacgacuguaaaaucaugaccagcaaaacagacguuucuuccagcgucaucacaucacucggcgcgaucguaucaugcuauggcaaaacaaagugcaccgcuagcaauaaaaaccgaggaaucauaaaaaccuucagcaacggcugcgacuacguauccaacaaaggcgucgacaccguauccgucggaaacacccucuacugcgucaacaagcaagaaggacaaucacucuacgucaaaggcgaaccaaucauaaacuucuacgacccacucguauuccccucagacgaguucgacgcauccaucucccaagucaacgaaaagaucaaccaaucucucgccuuuauacgcaaaagcgacgaacuccuucacaacguaaacgucggcaaaagcaccacuaacauaaugaucaccacaaucauaauaguaaucaucguaauacuccuccuacucaucgccgugggccuauuccucuauugcaaagcccgauaaggacuaguacuggcugcaucucccuuuccucuguccuccauccuucucccaggauggugaagggggaccugguacccagugauccccaccccaggauccuaaaucaugacuuaccugcuaauaaaaacucauuggaaaagugagaagaucuaaaaaaaaaaaaaaaaaaaaaaaaaaaaaaaaaaaaaaaaaaaaaaaaaaaaaaaaaaaaaaaaugcaucccccccccccccccccccccccccccccccaaaggcucuuuucagagccaccagaauu

SEQ ID NO: 14614 - RNA, 2139 nt, Artificial Sequence
  mRNA product Design h-2 comprising derived and/or modified sequence from HRSV(Memphis-37)__AIY60640.1__F-del_DSCav1_mut1 (opt1)
gggagacccgugacccggaaguuguacggcuacgcgacuuucccucccacaaacccucgcgcccuuccuuuccuacuugggcccggcagaaagcuuaccauggagcugcccauccucaagaccaacgccaucaccacgauccuggccgcggugacccugugcuucgccagcucccagaacaucaccgaggaguucuaccagagcacgugcuccgccgucagcaagggcuaccucggcgcccugcgcaccgggugguacaccagcgugaucaccaucgagcuguccaacaucaaggagaacaagugcaacggcaccgacgccaaggugaagcucaucaagcaggagcuggacaaguacaagaacgcggucacggagcugcagcuccugaugcagagcaccccggccgccggcuccgggagcgcgaucugcuccggcaucgccgucugcaaggugcugcaccucgagggcgaggugaacaagaucaagaacgcccugcuguccaccaacaaggccgucgugagccucuccaacggggugagcguccugaccuucaaggugcuggaccucaagaacuacaucgacaagcagcugcugcccauccugaacaagcagagcugcuccauccccaacaucgagaccgucaucgaguuccagcagaagaacaaccgccuccuggagaucacgcgggaguucagcgugaacgcgggcgugaccacccccgucuccaccuacaugcugacgaacagcgagcuccugucccugaucaacgacaugccgaucaccaacgaccagaagaagcucaugagcaacaacgugcagaucgugcgccagcaguccuacagcaucaugugcaucaucaaggaggagguccuggccuacguggugcagcugccccucuacggggucaucgacacccccugcuggaagcugcacaccagcccccugugcacgaccaacaccaaggagggcuccaacaucugccucacccggacggaccgcgggugguacugcgacaacgccggcagcguguccuucuucccgcaggccgagaccugcaagguccagagcaaccggguguucugcgacaccaugaacucccugacccugcccagcgaggugaaccucugcaacaucgacaucuucaaccccaaguacgacugcaagaucaugacguccaagaccgacgucagcuccagcgugaucaccucccugggcgccaucgugagcugcuacgggaagaccaagugcacggcgagcaacaagaaccgcggcaucaucaagaccuucuccaacgggugcgacuacgucagcaacaagggcguggacaccguguccgucggcaacacccuguacugcgugaacaagcaggagggccagagccucuacgugaagggggagcccaucaucaacuucuacgacccgcuggucuuccccuccgacgaguucgacgccagcaucucccaggugaacgagaagaucaaccagagccuggccuucauccggaaguccgacgagcuccugcacaacgugaacgucggcaagagcaccacgaacaucaugaucaccaccaucaucaucgugaucaucgugauccugcugcuccugaucgccgucgggcuguuccucuacugcaaggcccgcugaggacuagugaagggaacacccaaauuuaauucagccuuaagcacaauuaauuaagagugaaacguaauuguacaagcaguuggucacccaccauagggcaugaucaacaccgcaaccuuuccuuuuucccccagugauucugaaaaaccccucuucccuucagcuugcuuagauguuccaaauuuaguaagcuuaaggcggccuacagaagaaaaagaaaaaaaaggccacaaaaguucccucucacuuucaguaaauaaaauaaaagcagcaacagaaauaaagaaauaaaugaaauucaaaaugaaauaaauauuguguugugcagcauuaaaaaaucaauaaaaauuaaaaaugagcaagaucuaaaaaaaaaaaaaaaaaaaaaaaaaaaaaaaaaaaaaaaaaaaaaaaaaaaaaaaaaaaaaaaaugcaucccccccccccccccccccccccccccccccaaaggcucuuuucagagccaccagaauu

SEQ ID NO: 14615 - RNA, 2139 nt, Artificial Sequence
  mRNA product Design h-2 comprising derived and/or modified sequence from HRSV(Memphis-37)__AIY60640.1__F-del_DSCav1_mut1 (opt1)
gggagacccgugacccggaaguuguacggcuacgcgacuuucccucccacaaacccucgcgcccuuccuuuccuacuugggcccggcagaaagcuuaccauggagcugcccauccucaagaccaacgccaucaccacgauccuggccgcggugacccugugcuucgccagcucccagaacaucaccgaggaguucuaccagagcacgugcuccgccgucagcaagggcuaccucggggcccugcgcaccggcugguacaccuccgugaucaccaucgagcugagcaacaucaaggagaacaagugcaacgggaccgacgccaaggugaagcucaucaagcaggagcuggacaaguacaagaacgcggucacggagcugcagcuccugaugcaguccaccccggccgccggcagcggguccgccaucugcagcggcaucgcggugugcaaggugcugcaccucgagggcgaggucaacaagaucaagaacgcccugcuguccaccaacaaggccguggugagccucuccaacggggucagcgugcugaccuucaaggugcuggaccucaagaacuacaucgacaagcagcugcugcccauccucaacaagcaguccugcagcauccccaacaucgagacggucaucgaguuccagcagaagaacaaccggcugcuggagaucacccgcgaguucuccgugaacgccggcgugaccacccccgucagcacguacaugcucaccaacuccgagcugcugagccucaucaacgacaugccgaucaccaacgaccagaagaagcugaugagcaacaacgugcagaucgugcggcagcaguccuacagcaucaugugcaucaucaaggaggagguccuggccuacguggugcagcucccccuguacggggucaucgacacccccugcuggaagcugcacacgagcccccucugcaccaccaacaccaaggagggcuccaacaucugccugacgcgcaccgaccgggggugguacugcgacaacgcgggcuccgugagcuucuucccgcaggccgagaccugcaaggugcaguccaaccgcgucuucugcgacaccaugaacagccugacgcuccccuccgaggugaaccugugcaacaucgacaucuucaaccccaaguacgacugcaagaucaugaccagcaagaccgacgucuccagcuccgugaucaccagccugggcgccaucguguccugcuacgggaagacgaagugcaccgccagcaacaagaaccggggcaucaucaagaccuucuccaacgggugcgacuacgucagcaacaagggcguggacaccguguccgucggcaacacgcucuacugcgugaacaagcaggaggggcagagccuguacgugaagggcgagcccaucaucaacuucuacgacccgcuggucuuccccagcgacgaguucgacgccuccaucagccaggugaacgagaagaucaaccagucccucgcguucauccgcaagagcgacgagcugcugcacaacgugaacgucgggaaguccaccaccaacaucaugaucaccaccaucaucaucgugaucaucgugauccuccugcugcucaucgccgucggccuguuccuguacugcaaggcccggugaggacuagugaagggaacacccaaauuuaauucagccuuaagcacaauuaauuaagagugaaacguaauuguacaagcaguuggucacccaccauagggcaugaucaacaccgcaaccuuuccuuuuucccccagugauucugaaaaaccccucuucccuucagcuugcuuagauguuccaaauuuaguaagcuuaaggcggccuacagaagaaaaagaaaaaaaaggccacaaaaguucccucucacuuucaguaaauaaaauaaaagcagcaacagaaauaaagaaauaaaugaaauucaaaaugaaauaaauauuguguugugcagcauuaaaaaaucaauaaaaauuaaaaaugagcaagaucuaaaaaaaaaaaaaaaaaaaaaaaaaaaaaaaaaaaaaaaaaaaaaaaaaaaaaaaaaaaaaaaaugcaucccccccccccccccccccccccccccccccaaaggcucuuuucagagccaccagaauu

SEQ ID NO: 14616 - RNA, 2139 nt, Artificial Sequence
  mRNA product Design h-2 comprising derived and/or modified sequence from HRSV(Memphis-37)__AIY60640.1__F-del_DSCav1_mut1 (opt2)
gggagacccgugacccggaaguuguacggcuacgcgacuuucccucccacaaacccucgcgcccuuccuuuccuacuugggcccggcagaaagcuuaccauggagcuccccauccucaagaccaacgccaucaccaccauccucgccgccgucacccucugcuucgccuccucccagaacaucaccgaggaguucuaccaguccaccugcuccgccgucuccaagggcuaccucggcgcccuccgcaccggcugguacaccuccgucaucaccaucgagcucuccaacaucaaggagaacaagugcaacggcaccgacgccaaggucaagcucaucaagcaggagcucgacaaguacaagaacgccgucaccgagcuccagcuccucaugcaguccacccccgccgccggcuccggcuccgccaucugcuccggcaucgccgucugcaagguccuccaccucgagggcgaggucaacaagaucaagaacgcccuccucuccaccaacaaggccgucgucucccucuccaacggcgucuccguccucaccuucaagguccucgaccucaagaacuacaucgacaagcagcuccuccccauccucaacaagcaguccugcuccauccccaacaucgagaccgucaucgaguuccagcagaagaacaaccgccuccucgagaucacccgcgaguucuccgucaacgccggcgucaccacccccgucuccaccuacaugcucaccaacuccgagcuccucucccucaucaacgacaugcccaucaccaacgaccagaagaagcucauguccaacaacguccagaucguccgccagcaguccuacuccaucaugugcaucaucaaggaggagguccucgccuacgucguccagcucccccucuacggcgucaucgacacccccugcuggaagcuccacaccuccccccucugcaccaccaacaccaaggagggcuccaacaucugccucacccgcaccgaccgcggcugguacugcgacaacgccggcuccgucuccuucuucccccaggccgagaccugcaagguccaguccaaccgcgucuucugcgacaccaugaacucccucacccuccccuccgaggucaaccucugcaacaucgacaucuucaaccccaaguacgacugcaagaucaugaccuccaagaccgacgucuccuccuccgucaucaccucccucggcgccaucgucuccugcuacggcaagaccaagugcaccgccuccaacaagaaccgcggcaucaucaagaccuucuccaacggcugcgacuacgucuccaacaagggcgucgacaccgucuccgucggcaacacccucuacugcgucaacaagcaggagggccagucccucuacgucaagggcgagcccaucaucaacuucuacgacccccucgucuuccccuccgacgaguucgacgccuccaucucccaggucaacgagaagaucaaccagucccucgccuucauccgcaaguccgacgagcuccuccacaacgucaacgucggcaaguccaccaccaacaucaugaucaccaccaucaucaucgucaucaucgucauccuccuccuccucaucgccgucggccucuuccucuacugcaaggcccgcugaggacuagugaagggaacacccaaauuuaauucagccuuaagcacaauuaauuaagagugaaacguaauuguacaagcaguuggucacccaccauagggcaugaucaacaccgcaaccuuuccuuuuucccccagugauucugaaaaaccccucuucccuucagcuugcuuagauguuccaaauuuaguaagcuuaaggcggccuacagaagaaaaagaaaaaaaaggccacaaaaguucccucucacuuucaguaaauaaaauaaaagcagcaacagaaauaaagaaauaaaugaaauucaaaaugaaauaaauauuguguugugcagcauuaaaaaaucaauaaaaauuaaaaaugagcaagaucuaaaaaaaaaaaaaaaaaaaaaaaaaaaaaaaaaaaaaaaaaaaaaaaaaaaaaaaaaaaaaaaaugcaucccccccccccccccccccccccccccccccaaaggcucuuuucagagccaccagaauu

SEQ ID NO: 14617 - RNA, 2139 nt, Artificial Sequence
  mRNA product Design h-2 comprising derived and/or modified sequence from HRSV(Memphis-37)__AIY60640.1__F-del_DSCav1_mut1 (opt3)
gggagacccgugacccggaaguuguacggcuacgcgacuuucccucccacaaacccucgcgcccuuccuuuccuacuugggcccggcagaaagcuuaccauggagcugcccauccucaagaccaacgccauuacaacuauacuugcugcagugacgcugugcuucgccagcucccagaauaucaccgaagaguuuuaccaaucuacauguucagcggucaguaaaggcuauuugggggcuuuaagaacuggaugguacaccagcguuauuacaaucgaacuguccaacauuaaggagaauaaaugcaacgguaccgacgccaaggugaaacuaaucaagcaggaacucgauaaguauaaaaaugcaguaacugagcugcagcuucugaugcagucuacuccugccgcuggcucggggucagcaauauguagcggaaucgccgugugcaaggucuugcaccucgagggcgaagugaacaaaauuaagaaugcucugcugaguaccaacaaagccguugugucccucucuaauggugucagcguguuaacguucaagguacuggaccuuaagaacuacaucgauaaacaauugcugccaauucuaaauaagcaguccuguucaaucccgaacauagagacuguuauugaauuucagcagaaaaauaacaggcuccuggagaucacccgggaguucagugugaaugcgggggucacaacucccgugagcaccuauaugcuuacaaacucugaacuguugucccucauuaacgacaugccuaucaccaaugaucaaaagaaacugaugucaaacaaugugcagaucguccgccagcagagcuacaguauuaugugcauaaucaaggaggaaguuuuagcauaugugguacaacugccacucuacggagugauugacacgcccuguuggaaacuucauacuucuccucugugcacaaccaacacuaaggagggcuccaauaucuguuugacacgaaccgaucguggcugguacugcgacaacgccgggagcgucucguuuuucccacaggcugaaacguguaaggugcagucuaauagaguguuuugcgauaccaugaacucccuaacacugcccucagagguuaaucucugcaacauagacauuuucaauccuaaauaugauuguaagaucaugacaaguaaaaccgacgucagcuccucugugaucacaagccugggagccauuguaucaugcuacgguaagacuaaauguaccgcaaguaacaagaauaggggcaucauuaagacauuuuccaacgggugcgauuauguuagcaauaaaggaguggacaccgucucugugggcaacacucuuuacugugucaacaagcaagagggucagucacuguaugugaaaggggaaccaauaaucaauuucuacgacccguugguuuuucccagugaugaguucgacgcuagcauuucccaggugaacgaaaagaucaaucagucucucgccuuuauccggaaaucggaugagcuguuacacaacguaaaugucggaaagagcacgacaaacauuaugauaaccacuaucauuaucgugauuaucguuauacugcuacuccugaucgcggugggccuuuucuuguauugcaaggcccgcugaggacuagugaagggaacacccaaauuuaauucagccuuaagcacaauuaauuaagagugaaacguaauuguacaagcaguuggucacccaccauagggcaugaucaacaccgcaaccuuuccuuuuucccccagugauucugaaaaaccccucuucccuucagcuugcuuagauguuccaaauuuaguaagcuuaaggcggccuacagaagaaaaagaaaaaaaaggccacaaaaguucccucucacuuucaguaaauaaaauaaaagcagcaacagaaauaaagaaauaaaugaaauucaaaaugaaauaaauauuguguugugcagcauuaaaaaaucaauaaaaauuaaaaaugagcaagaucuaaaaaaaaaaaaaaaaaaaaaaaaaaaaaaaaaaaaaaaaaaaaaaaaaaaaaaaaaaaaaaaaugcaucccccccccccccccccccccccccccccccaaaggcucuuuucagagccaccagaauu

SEQ ID NO: 14618 - RNA, 2139 nt, Artificial Sequence
  mRNA product Design h-2 comprising derived and/or modified sequence from HRSV(Memphis-37)__AIY60640.1__F-del_DSCav1_mut1 (opt4)
gggagacccgugacccggaaguuguacggcuacgcgacuuucccucccacaaacccucgcgcccuuccuuuccuacuugggcccggcagaaagcuuaccauggagcugcccauccugaagaccaacgccaucaccaccauccuggccgccgugacccugugcuucgccagcagccagaacaucaccgaggaguucuaccagagcaccugcagcgccgugagcaagggcuaccugggcgcccugagaaccggcugguacaccagcgugaucaccaucgagcugagcaacaucaaggagaacaagugcaacggcaccgacgccaaggugaagcugaucaagcaggagcuggacaaguacaagaacgccgugaccgagcugcagcugcugaugcagagcacccccgccgccggcagcggcagcgccaucugcagcggcaucgccgugugcaaggugcugcaccuggagggcgaggugaacaagaucaagaacgcccugcugagcaccaacaaggccguggugagccugagcaacggcgugagcgugcugaccuucaaggugcuggaccugaagaacuacaucgacaagcagcugcugcccauccugaacaagcagagcugcagcauccccaacaucgagaccgugaucgaguuccagcagaagaacaacagacugcuggagaucaccagagaguucagcgugaacgccggcgugaccacccccgugagcaccuacaugcugaccaacagcgagcugcugagccugaucaacgacaugcccaucaccaacgaccagaagaagcugaugagcaacaacgugcagaucgugagacagcagagcuacagcaucaugugcaucaucaaggaggaggugcuggccuacguggugcagcugccccuguacggcgugaucgacacccccugcuggaagcugcacaccagcccccugugcaccaccaacaccaaggagggcagcaacaucugccugaccagaaccgacagaggcugguacugcgacaacgccggcagcgugagcuucuucccccaggccgagaccugcaaggugcagagcaacagaguguucugcgacaccaugaacagccugacccugcccagcgaggugaaccugugcaacaucgacaucuucaaccccaaguacgacugcaagaucaugaccagcaagaccgacgugagcagcagcgugaucaccagccugggcgccaucgugagcugcuacggcaagaccaagugcaccgccagcaacaagaacagaggcaucaucaagaccuucagcaacggcugcgacuacgugagcaacaagggcguggacaccgugagcgugggcaacacccuguacugcgugaacaagcaggagggccagagccuguacgugaagggcgagcccaucaucaacuucuacgacccccugguguuccccagcgacgaguucgacgccagcaucagccaggugaacgagaagaucaaccagagccuggccuucaucagaaagagcgacgagcugcugcacaacgugaacgugggcaagagcaccaccaacaucaugaucaccaccaucaucaucgugaucaucgugauccugcugcugcugaucgccgugggccuguuccuguacugcaaggccagaugaggacuagugaagggaacacccaaauuuaauucagccuuaagcacaauuaauuaagagugaaacguaauuguacaagcaguuggucacccaccauagggcaugaucaacaccgcaaccuuuccuuuuucccccagugauucugaaaaaccccucuucccuucagcuugcuuagauguuccaaauuuaguaagcuuaaggcggccuacagaagaaaaagaaaaaaaaggccacaaaaguucccucucacuuucaguaaauaaaauaaaagcagcaacagaaauaaagaaauaaaugaaauucaaaaugaaauaaauauuguguugugcagcauuaaaaaaucaauaaaaauuaaaaaugagcaagaucuaaaaaaaaaaaaaaaaaaaaaaaaaaaaaaaaaaaaaaaaaaaaaaaaaaaaaaaaaaaaaaaaugcaucccccccccccccccccccccccccccccccaaaggcucuuuucagagccaccagaauu

SEQ ID NO: 14619 - RNA, 2139 nt, Artificial Sequence
  mRNA product Design h-2 comprising derived and/or modified sequence from HRSV(Memphis-37)__AIY60640.1__F-del_DSCav1_mut1 (opt5)
gggagacccgugacccggaaguuguacggcuacgcgacuuucccucccacaaacccucgcgcccuuccuuuccuacuugggcccggcagaaagcuuaccauggagcugcccauccucaagaccaacgccauuacaacgauccuggcugccgugacccuuugcuucgcgagcucccagaauauuacagaagaguuuuaccaaucuaccuguagcgcugucuccaaaggcuaucugggggcccucagaacaggaugguacaccucuguuaucacaauugaacugagcaacaucaaggagaauaaaugcaacggcaccgacgccaaggugaaacuuaucaagcaggaacuggauaaguauaaaaaugcugugacggagcuccagcugcugaugcaguccaccccugccgcugggucuggaagcgccauuuguuccggcaucgcggucugcaaggugcuccaccuggagggggaaguuaacaaaauuaagaaugcccuucugagcacaaacaaagcuguggucucucucuccaauggagugagcguucugaccuucaaggugcuugaccugaagaacuacaucgauaaacaacuccugccgauucugaauaagcagucuuguuccauccccaacauugagacagucaucgaauuucagcagaaaaauaaccggcuccuggagaucacccgcgaguucagcgugaaugccggcgugacgacaccugucucuaccuauaugcuuacaaacuccgaacugcucagccugauuaacgacaugcccaucaccaaugaucaaaagaaacuuauguccaacaauguucagauugugagacagcagucuuacagcaucaugugcauuaucaaggaggaagugcuggcuuaugucgugcaacucccucuguacggcguuaucgacacccccuguuggaaacugcauacauccccucucugcacgaccaacacaaaggaggggagcaauauuugucugacccggacagaucgcggaugguacugcgacaacgccggcucuguguccuuuuucccgcaggcggaaaccuguaagguccagagcaauagaguguuuugcgauacgaugaacucucuuacacugcccagcgagguuaaucucugcaacaucgacauuuucaauccuaaauaugauuguaagaucaugaccuccaaaaccgacgugucuagcuccgucauuacaagccugggggccaucgugucuugcuacggaaagaccaaauguacagcuuccaacaagaaucggggcaucauuaagacguuuagcaacgggugcgauuaugucucuaauaaaggaguggacaccguuuccgugggcaacacacuuuacugugucaacaagcaagagggccagagccuguaugugaaaggggaacccaucauuaauuucuacgacccucucguuuuucccuccgaugaguucgacgccucuaucagccaggugaacgaaaagauuaaucagucccuggcuuuuauccgcaaaucugaugagcugcuccacaacgucaaugugggaaagagcaccacaaacauuaugaucaccacgaucauuaucgugauuaucguuauucugcuucugcucaucgccgucggccuguuccuguauugcaaggccagaugaggacuagugaagggaacacccaaauuuaauucagccuuaagcacaauuaauuaagagugaaacguaauuguacaagcaguuggucacccaccauagggcaugaucaacaccgcaaccuuuccuuuuucccccagugauucugaaaaaccccucuucccuucagcuugcuuagauguuccaaauuuaguaagcuuaaggcggccuacagaagaaaaagaaaaaaaaggccacaaaaguucccucucacuuucaguaaauaaaauaaaagcagcaacagaaauaaagaaauaaaugaaauucaaaaugaaauaaauauuguguugugcagcauuaaaaaaucaauaaaaauuaaaaaugagcaagaucuaaaaaaaaaaaaaaaaaaaaaaaaaaaaaaaaaaaaaaaaaaaaaaaaaaaaaaaaaaaaaaaaugcaucccccccccccccccccccccccccccccccaaaggcucuuuucagagccaccagaauu

SEQ ID NO: 14620 - RNA, 2139 nt, Artificial Sequence
  mRNA product Design h-2 comprising derived and/or modified sequence from HRSV(Memphis-37)__AIY60640.1__F-del_DSCav1_mut1 (opt6)
gggagacccgugacccggaaguuguacggcuacgcgacuuucccucccacaaacccucgcgcccuuccuuuccuacuugggcccggcagaaagcuuaccauggaauuaccaauacuaaaaacaaacgcaauaacaacaauucuagcagcaguaacauuaugcuuugcaucaucccaaaacaucacagaagaauuuuaucaaucaaccugcucagcaguuuccaaaggauacuuaggagcauuaagaacugguugguacacuucaguaaucaccaucgaacucucaaacaucaaggaaaacaaaugcaacggaacagacgcaaaaguuaaacucauaaaacaagaacuugacaaauacaaaaacgccguaacagaacuacaacuucucaugcaaucaacacccgcagcaggauccggaucagccauaugcucaggcauagcaguauguaaaguauuacaucuugaaggugaaguaaacaaaauaaaaaacgcacuucuaucaaccaacaaagcaguaguaucacuaucaaacggaguauccgucuuaacauuuaaaguucuagaccucaaaaacuauauagacaaacaauuacugccaauccucaauaaacaaucaugcucaauaccaaacaucgaaacaguaauagaauuucaacaaaaaaacaacagacuacuagaaauaacaagagaauuuuccgucaacgccggcguaacuacuccaguaucaacauauaugcuaaccaacucagaacuccuaucccucauaaacgacaugccaauaacuaaugaucaaaaaaaacuaaugucaaacaauguacaaauaguuagacaacaaucauacucaaucaugugcauaauaaaagaagaaguacuagcauacgucguccaacuaccccuauacggaguaauagacacaccuugcuggaaacuacacacaucaccccuaugcacaacaaauacaaaagaagguuccaacaucugccuaacaagaacugauagaggaugguacugcgacaacgccggaucaguaucauucuucccucaagcugaaaccugcaaaguacaaucaaacagaguauuuugcgauacaaugaacucccuaacacuucccucagaaguuaaucuuuguaauauagauauauucaacccaaaauacgacugcaaaauaaugacaaguaaaacagacguauccucaucuguaauuacaucacuaggagccauaguaucuugcuacggcaaaaccaaaugcacagcaucaaacaaaaacagagguauuaucaaaaccuucucaaacggaugugacuacguuucaaacaaaggaguagacacaguaucagucggaaacacccuauacuguguuaacaaacaagaaggacaaucacuguacguaaaaggagaacccauaauaaauuucuacgacccacuuguauuuccaucagacgaauuugaugcaucaaucucacaaguaaaugaaaaaauaaaccaaucauuagcauucauaagaaaaucugacgaguuacuacacaacguaaauguuggcaaaucaacaaccaauauaaugauaacaacaauaauaauaguaauaauagucauauuacuccuccucauagccgucggauuauucuuauacugcaaagcaagauaaggacuagugaagggaacacccaaauuuaauucagccuuaagcacaauuaauuaagagugaaacguaauuguacaagcaguuggucacccaccauagggcaugaucaacaccgcaaccuuuccuuuuucccccagugauucugaaaaaccccucuucccuucagcuugcuuagauguuccaaauuuaguaagcuuaaggcggccuacagaagaaaaagaaaaaaaaggccacaaaaguucccucucacuuucaguaaauaaaauaaaagcagcaacagaaauaaagaaauaaaugaaauucaaaaugaaauaaauauuguguugugcagcauuaaaaaaucaauaaaaauuaaaaaugagcaagaucuaaaaaaaaaaaaaaaaaaaaaaaaaaaaaaaaaaaaaaaaaaaaaaaaaaaaaaaaaaaaaaaaugcaucccccccccccccccccccccccccccccccaaaggcucuuuucagagccaccagaauu

SEQ ID NO: 14621 - RNA, 2139 nt, Artificial Sequence
  mRNA product Design h-2 comprising derived and/or modified sequence from HRSV(Memphis-37)__AIY60640.1__F-del_DSCav1_mut1 (opt11)
gggagacccgugacccggaaguuguacggcuacgcgacuuucccucccacaaacccucgcgcccuuccuuuccuacuugggcccggcagaaagcuuaccauggaacuccccauacuaaaaaccaacgccaucacaacaauccucgccgccgucacacucugcuucgccagcucccaaaacaucaccgaagaguucuaucaaucaaccugcuccgcagucucaaagggauaccucggagcccuccgcaccggaugguacacuuccgucaucacaauagaacucuccaacaucaaagaaaacaaaugcaacggcaccgacgcaaaagucaagcucaucaaacaagaacucgacaaauauaaaaacgccgucaccgaacuccaacuacucaugcaauccacacccgcggccggcucaggcagcgccaucugcucaggcaucgccgucugcaaaguccuccaccucgaaggcgaagucaacaaaaucaaaaacgcccuucuuucaaccaacaaggcaguaguaucccucucaaacggcgucagcguccugaccuucaaaguccuagaccucaaaaacuacauagauaaacaacuccuccccauacugaacaaacaaucgugcuccauccccaauaucgaaaccgucauagaguuccagcagaaaaacaacagacuucucgaaauaacccgagaguucucaguaaacgccggagucaccacacccguaagcaccuacaugcucacaaacucagaacuccuaucccucaucaacgacaugcccaucaccaacgaccagaaaaagcuaauguccaacaacguccaaauaguacgccaacaaagcuacucgauaaugugcaucaucaaggaagaaguacucgccuacgucguccaacucccccucuacggcguaaucgacacacccugcuggaaacuccacacguccccacucugcacaacaaacacaaaagaaggauccaacauaugccuaacccgcaccgacaggggcugguacugcgacaacgcaggcucagucagcuucuuuccccaagccgaaacaugcaaaguccaauccaaccgugucuucugcgacaccaugaacucgcucacccuacccucggaagucaaucucugcaacaucgacaucuucaacccaaaauacgacuguaaaaucaugaccagcaaaacagacguuucuuccagcgucaucacaucacucggcgcgaucguaucaugcuauggcaaaacaaagugcaccgcuagcaauaaaaaccgaggaaucauaaaaaccuucagcaacggcugcgacuacguauccaacaaaggcgucgacaccguauccgucggaaacacccucuacugcgucaacaagcaagaaggacaaucacucuacgucaaaggcgaaccaaucauaaacuucuacgacccacucguauuccccucagacgaguucgacgcauccaucucccaagucaacgaaaagaucaaccaaucucucgccuuuauacgcaaaagcgacgaacuccuucacaacguaaacgucggcaaaagcaccacuaacauaaugaucaccacaaucauaauaguaaucaucguaauacuccuccuacucaucgccgugggccuauuccucuauugcaaagcccgauaaggacuagugaagggaacacccaaauuuaauucagccuuaagcacaauuaauuaagagugaaacguaauuguacaagcaguuggucacccaccauagggcaugaucaacaccgcaaccuuuccuuuuucccccagugauucugaaaaaccccucuucccuucagcuugcuuagauguuccaaauuuaguaagcuuaaggcggccuacagaagaaaaagaaaaaaaaggccacaaaaguucccucucacuuucaguaaauaaaauaaaagcagcaacagaaauaaagaaauaaaugaaauucaaaaugaaauaaauauuguguugugcagcauuaaaaaaucaauaaaaauuaaaaaugagcaagaucuaaaaaaaaaaaaaaaaaaaaaaaaaaaaaaaaaaaaaaaaaaaaaaaaaaaaaaaaaaaaaaaaugcaucccccccccccccccccccccccccccccccaaaggcucuuuucagagccaccagaauu

SEQ ID NO: 14622 - RNA, 1919 nt, Artificial Sequence
  mRNA product Design h-3 comprising derived and/or modified sequence from HRSV(Memphis-37)__AIY60640.1__F-del_DSCav1_mut1 (opt1)
gggagacccgugacccggaaguuguacggcuacgcgacuuucccucccacaaacccucgcgcccuuccuuuccuacuugggcccggcagaaagcuuaccauggagcugcccauccucaagaccaacgccaucaccacgauccuggccgcggugacccugugcuucgccagcucccagaacaucaccgaggaguucuaccagagcacgugcuccgccgucagcaagggcuaccucggcgcccugcgcaccgggugguacaccagcgugaucaccaucgagcuguccaacaucaaggagaacaagugcaacggcaccgacgccaaggugaagcucaucaagcaggagcuggacaaguacaagaacgcggucacggagcugcagcuccugaugcagagcaccccggccgccggcuccgggagcgcgaucugcuccggcaucgccgucugcaaggugcugcaccucgagggcgaggugaacaagaucaagaacgcccugcuguccaccaacaaggccgucgugagccucuccaacggggugagcguccugaccuucaaggugcuggaccucaagaacuacaucgacaagcagcugcugcccauccugaacaagcagagcugcuccauccccaacaucgagaccgucaucgaguuccagcagaagaacaaccgccuccuggagaucacgcgggaguucagcgugaacgcgggcgugaccacccccgucuccaccuacaugcugacgaacagcgagcuccugucccugaucaacgacaugccgaucaccaacgaccagaagaagcucaugagcaacaacgugcagaucgugcgccagcaguccuacagcaucaugugcaucaucaaggaggagguccuggccuacguggugcagcugccccucuacggggucaucgacacccccugcuggaagcugcacaccagcccccugugcacgaccaacaccaaggagggcuccaacaucugccucacccggacggaccgcgggugguacugcgacaacgccggcagcguguccuucuucccgcaggccgagaccugcaagguccagagcaaccggguguucugcgacaccaugaacucccugacccugcccagcgaggugaaccucugcaacaucgacaucuucaaccccaaguacgacugcaagaucaugacguccaagaccgacgucagcuccagcgugaucaccucccugggcgccaucgugagcugcuacgggaagaccaagugcacggcgagcaacaagaaccgcggcaucaucaagaccuucuccaacgggugcgacuacgucagcaacaagggcguggacaccguguccgucggcaacacccuguacugcgugaacaagcaggagggccagagccucuacgugaagggggagcccaucaucaacuucuacgacccgcuggucuuccccuccgacgaguucgacgccagcaucucccaggugaacgagaagaucaaccagagccuggccuucauccggaaguccgacgagcuccugcacaacgugaacgucggcaagagcaccacgaacaucaugaucaccaccaucaucaucgugaucaucgugauccugcugcuccugaucgccgucgggcuguuccucuacugcaaggcccgcugaggacuaguggaagcauuuuccuggcugauuaaaagaaauuacucagcuauggucaucuguuccuguuagaaggcuaugcagcauauuauauacuaugcgcauguuaugaaaugcauaauaaaaaauuuuaaaaaaucuaaaagaucuaaaaaaaaaaaaaaaaaaaaaaaaaaaaaaaaaaaaaaaaaaaaaaaaaaaaaaaaaaaaaaaaugcaucccccccccccccccccccccccccccccccaaaggcucuuuucagagccaccagaauu

SEQ ID NO: 14623 - RNA, 1919 nt, Artificial Sequence
  mRNA product Design h-3 comprising derived and/or modified sequence from HRSV(Memphis-37)__AIY60640.1__F-del_DSCav1_mut1 (opt1)
gggagacccgugacccggaaguuguacggcuacgcgacuuucccucccacaaacccucgcgcccuuccuuuccuacuugggcccggcagaaagcuuaccauggagcugcccauccucaagaccaacgccaucaccacgauccuggccgcggugacccugugcuucgccagcucccagaacaucaccgaggaguucuaccagagcacgugcuccgccgucagcaagggcuaccucggggcccugcgcaccggcugguacaccuccgugaucaccaucgagcugagcaacaucaaggagaacaagugcaacgggaccgacgccaaggugaagcucaucaagcaggagcuggacaaguacaagaacgcggucacggagcugcagcuccugaugcaguccaccccggccgccggcagcggguccgccaucugcagcggcaucgcggugugcaaggugcugcaccucgagggcgaggucaacaagaucaagaacgcccugcuguccaccaacaaggccguggugagccucuccaacggggucagcgugcugaccuucaaggugcuggaccucaagaacuacaucgacaagcagcugcugcccauccucaacaagcaguccugcagcauccccaacaucgagacggucaucgaguuccagcagaagaacaaccggcugcuggagaucacccgcgaguucuccgugaacgccggcgugaccacccccgucagcacguacaugcucaccaacuccgagcugcugagccucaucaacgacaugccgaucaccaacgaccagaagaagcugaugagcaacaacgugcagaucgugcggcagcaguccuacagcaucaugugcaucaucaaggaggagguccuggccuacguggugcagcucccccuguacggggucaucgacacccccugcuggaagcugcacacgagcccccucugcaccaccaacaccaaggagggcuccaacaucugccugacgcgcaccgaccgggggugguacugcgacaacgcgggcuccgugagcuucuucccgcaggccgagaccugcaaggugcaguccaaccgcgucuucugcgacaccaugaacagccugacgcuccccuccgaggugaaccugugcaacaucgacaucuucaaccccaaguacgacugcaagaucaugaccagcaagaccgacgucuccagcuccgugaucaccagccugggcgccaucguguccugcuacgggaagacgaagugcaccgccagcaacaagaaccggggcaucaucaagaccuucuccaacgggugcgacuacgucagcaacaagggcguggacaccguguccgucggcaacacgcucuacugcgugaacaagcaggaggggcagagccuguacgugaagggcgagcccaucaucaacuucuacgacccgcuggucuuccccagcgacgaguucgacgccuccaucagccaggugaacgagaagaucaaccagucccucgcguucauccgcaagagcgacgagcugcugcacaacgugaacgucgggaaguccaccaccaacaucaugaucaccaccaucaucaucgugaucaucgugauccuccugcugcucaucgccgucggccuguuccuguacugcaaggcccggugaggacuaguggaagcauuuuccuggcugauuaaaagaaauuacucagcuauggucaucuguuccuguuagaaggcuaugcagcauauuauauacuaugcgcauguuaugaaaugcauaauaaaaaauuuuaaaaaaucuaaaagaucuaaaaaaaaaaaaaaaaaaaaaaaaaaaaaaaaaaaaaaaaaaaaaaaaaaaaaaaaaaaaaaaaugcaucccccccccccccccccccccccccccccccaaaggcucuuuucagagccaccagaauu

SEQ ID NO: 14624 - RNA, 1919 nt, Artificial Sequence
  mRNA product Design h-3 comprising derived and/or modified sequence from HRSV(Memphis-37)__AIY60640.1__F-del_DSCav1_mut1 (opt2)
gggagacccgugacccggaaguuguacggcuacgcgacuuucccucccacaaacccucgcgcccuuccuuuccuacuugggcccggcagaaagcuuaccauggagcuccccauccucaagaccaacgccaucaccaccauccucgccgccgucacccucugcuucgccuccucccagaacaucaccgaggaguucuaccaguccaccugcuccgccgucuccaagggcuaccucggcgcccuccgcaccggcugguacaccuccgucaucaccaucgagcucuccaacaucaaggagaacaagugcaacggcaccgacgccaaggucaagcucaucaagcaggagcucgacaaguacaagaacgccgucaccgagcuccagcuccucaugcaguccacccccgccgccggcuccggcuccgccaucugcuccggcaucgccgucugcaagguccuccaccucgagggcgaggucaacaagaucaagaacgcccuccucuccaccaacaaggccgucgucucccucuccaacggcgucuccguccucaccuucaagguccucgaccucaagaacuacaucgacaagcagcuccuccccauccucaacaagcaguccugcuccauccccaacaucgagaccgucaucgaguuccagcagaagaacaaccgccuccucgagaucacccgcgaguucuccgucaacgccggcgucaccacccccgucuccaccuacaugcucaccaacuccgagcuccucucccucaucaacgacaugcccaucaccaacgaccagaagaagcucauguccaacaacguccagaucguccgccagcaguccuacuccaucaugugcaucaucaaggaggagguccucgccuacgucguccagcucccccucuacggcgucaucgacacccccugcuggaagcuccacaccuccccccucugcaccaccaacaccaaggagggcuccaacaucugccucacccgcaccgaccgcggcugguacugcgacaacgccggcuccgucuccuucuucccccaggccgagaccugcaagguccaguccaaccgcgucuucugcgacaccaugaacucccucacccuccccuccgaggucaaccucugcaacaucgacaucuucaaccccaaguacgacugcaagaucaugaccuccaagaccgacgucuccuccuccgucaucaccucccucggcgccaucgucuccugcuacggcaagaccaagugcaccgccuccaacaagaaccgcggcaucaucaagaccuucuccaacggcugcgacuacgucuccaacaagggcgucgacaccgucuccgucggcaacacccucuacugcgucaacaagcaggagggccagucccucuacgucaagggcgagcccaucaucaacuucuacgacccccucgucuuccccuccgacgaguucgacgccuccaucucccaggucaacgagaagaucaaccagucccucgccuucauccgcaaguccgacgagcuccuccacaacgucaacgucggcaaguccaccaccaacaucaugaucaccaccaucaucaucgucaucaucgucauccuccuccuccucaucgccgucggccucuuccucuacugcaaggcccgcugaggacuaguggaagcauuuuccuggcugauuaaaagaaauuacucagcuauggucaucuguuccuguuagaaggcuaugcagcauauuauauacuaugcgcauguuaugaaaugcauaauaaaaaauuuuaaaaaaucuaaaagaucuaaaaaaaaaaaaaaaaaaaaaaaaaaaaaaaaaaaaaaaaaaaaaaaaaaaaaaaaaaaaaaaaugcaucccccccccccccccccccccccccccccccaaaggcucuuuucagagccaccagaauu

SEQ ID NO: 14625 - RNA, 1919 nt, Artificial Sequence
  mRNA product Design h-3 comprising derived and/or modified sequence from HRSV(Memphis-37)__AIY60640.1__F-del_DSCav1_mut1 (opt3)
gggagacccgugacccggaaguuguacggcuacgcgacuuucccucccacaaacccucgcgcccuuccuuuccuacuugggcccggcagaaagcuuaccauggagcugcccauccucaagaccaacgccauuacaacuauacuugcugcagugacgcugugcuucgccagcucccagaauaucaccgaagaguuuuaccaaucuacauguucagcggucaguaaaggcuauuugggggcuuuaagaacuggaugguacaccagcguuauuacaaucgaacuguccaacauuaaggagaauaaaugcaacgguaccgacgccaaggugaaacuaaucaagcaggaacucgauaaguauaaaaaugcaguaacugagcugcagcuucugaugcagucuacuccugccgcuggcucggggucagcaauauguagcggaaucgccgugugcaaggucuugcaccucgagggcgaagugaacaaaauuaagaaugcucugcugaguaccaacaaagccguugugucccucucuaauggugucagcguguuaacguucaagguacuggaccuuaagaacuacaucgauaaacaauugcugccaauucuaaauaagcaguccuguucaaucccgaacauagagacuguuauugaauuucagcagaaaaauaacaggcuccuggagaucacccgggaguucagugugaaugcgggggucacaacucccgugagcaccuauaugcuuacaaacucugaacuguugucccucauuaacgacaugccuaucaccaaugaucaaaagaaacugaugucaaacaaugugcagaucguccgccagcagagcuacaguauuaugugcauaaucaaggaggaaguuuuagcauaugugguacaacugccacucuacggagugauugacacgcccuguuggaaacuucauacuucuccucugugcacaaccaacacuaaggagggcuccaauaucuguuugacacgaaccgaucguggcugguacugcgacaacgccgggagcgucucguuuuucccacaggcugaaacguguaaggugcagucuaauagaguguuuugcgauaccaugaacucccuaacacugcccucagagguuaaucucugcaacauagacauuuucaauccuaaauaugauuguaagaucaugacaaguaaaaccgacgucagcuccucugugaucacaagccugggagccauuguaucaugcuacgguaagacuaaauguaccgcaaguaacaagaauaggggcaucauuaagacauuuuccaacgggugcgauuauguuagcaauaaaggaguggacaccgucucugugggcaacacucuuuacugugucaacaagcaagagggucagucacuguaugugaaaggggaaccaauaaucaauuucuacgacccguugguuuuucccagugaugaguucgacgcuagcauuucccaggugaacgaaaagaucaaucagucucucgccuuuauccggaaaucggaugagcuguuacacaacguaaaugucggaaagagcacgacaaacauuaugauaaccacuaucauuaucgugauuaucguuauacugcuacuccugaucgcggugggccuuuucuuguauugcaaggcccgcugaggacuaguggaagcauuuuccuggcugauuaaaagaaauuacucagcuauggucaucuguuccuguuagaaggcuaugcagcauauuauauacuaugcgcauguuaugaaaugcauaauaaaaaauuuuaaaaaaucuaaaagaucuaaaaaaaaaaaaaaaaaaaaaaaaaaaaaaaaaaaaaaaaaaaaaaaaaaaaaaaaaaaaaaaaugcaucccccccccccccccccccccccccccccccaaaggcucuuuucagagccaccagaauu

SEQ ID NO: 14626 - RNA, 1919 nt, Artificial Sequence
  mRNA product Design h-3 comprising derived and/or modified sequence from HRSV(Memphis-37)__AIY60640.1__F-del_DSCav1_mut1 (opt4)
gggagacccgugacccggaaguuguacggcuacgcgacuuucccucccacaaacccucgcgcccuuccuuuccuacuugggcccggcagaaagcuuaccauggagcugcccauccugaagaccaacgccaucaccaccauccuggccgccgugacccugugcuucgccagcagccagaacaucaccgaggaguucuaccagagcaccugcagcgccgugagcaagggcuaccugggcgcccugagaaccggcugguacaccagcgugaucaccaucgagcugagcaacaucaaggagaacaagugcaacggcaccgacgccaaggugaagcugaucaagcaggagcuggacaaguacaagaacgccgugaccgagcugcagcugcugaugcagagcacccccgccgccggcagcggcagcgccaucugcagcggcaucgccgugugcaaggugcugcaccuggagggcgaggugaacaagaucaagaacgcccugcugagcaccaacaaggccguggugagccugagcaacggcgugagcgugcugaccuucaaggugcuggaccugaagaacuacaucgacaagcagcugcugcccauccugaacaagcagagcugcagcauccccaacaucgagaccgugaucgaguuccagcagaagaacaacagacugcuggagaucaccagagaguucagcgugaacgccggcgugaccacccccgugagcaccuacaugcugaccaacagcgagcugcugagccugaucaacgacaugcccaucaccaacgaccagaagaagcugaugagcaacaacgugcagaucgugagacagcagagcuacagcaucaugugcaucaucaaggaggaggugcuggccuacguggugcagcugccccuguacggcgugaucgacacccccugcuggaagcugcacaccagcccccugugcaccaccaacaccaaggagggcagcaacaucugccugaccagaaccgacagaggcugguacugcgacaacgccggcagcgugagcuucuucccccaggccgagaccugcaaggugcagagcaacagaguguucugcgacaccaugaacagccugacccugcccagcgaggugaaccugugcaacaucgacaucuucaaccccaaguacgacugcaagaucaugaccagcaagaccgacgugagcagcagcgugaucaccagccugggcgccaucgugagcugcuacggcaagaccaagugcaccgccagcaacaagaacagaggcaucaucaagaccuucagcaacggcugcgacuacgugagcaacaagggcguggacaccgugagcgugggcaacacccuguacugcgugaacaagcaggagggccagagccuguacgugaagggcgagcccaucaucaacuucuacgacccccugguguuccccagcgacgaguucgacgccagcaucagccaggugaacgagaagaucaaccagagccuggccuucaucagaaagagcgacgagcugcugcacaacgugaacgugggcaagagcaccaccaacaucaugaucaccaccaucaucaucgugaucaucgugauccugcugcugcugaucgccgugggccuguuccuguacugcaaggccagaugaggacuaguggaagcauuuuccuggcugauuaaaagaaauuacucagcuauggucaucuguuccuguuagaaggcuaugcagcauauuauauacuaugcgcauguuaugaaaugcauaauaaaaaauuuuaaaaaaucuaaaagaucuaaaaaaaaaaaaaaaaaaaaaaaaaaaaaaaaaaaaaaaaaaaaaaaaaaaaaaaaaaaaaaaaugcaucccccccccccccccccccccccccccccccaaaggcucuuuucagagccaccagaauu

SEQ ID NO: 14627 - RNA, 1919 nt, Artificial Sequence
  mRNA product Design h-3 comprising derived and/or modified sequence from HRSV(Memphis-37)__AIY60640.1__F-del_DSCav1_mut1 (opt5)
gggagacccgugacccggaaguuguacggcuacgcgacuuucccucccacaaacccucgcgcccuuccuuuccuacuugggcccggcagaaagcuuaccauggagcugcccauccucaagaccaacgccauuacaacgauccuggcugccgugacccuuugcuucgcgagcucccagaauauuacagaagaguuuuaccaaucuaccuguagcgcugucuccaaaggcuaucugggggcccucagaacaggaugguacaccucuguuaucacaauugaacugagcaacaucaaggagaauaaaugcaacggcaccgacgccaaggugaaacuuaucaagcaggaacuggauaaguauaaaaaugcugugacggagcuccagcugcugaugcaguccaccccugccgcugggucuggaagcgccauuuguuccggcaucgcggucugcaaggugcuccaccuggagggggaaguuaacaaaauuaagaaugcccuucugagcacaaacaaagcuguggucucucucuccaauggagugagcguucugaccuucaaggugcuugaccugaagaacuacaucgauaaacaacuccugccgauucugaauaagcagucuuguuccauccccaacauugagacagucaucgaauuucagcagaaaaauaaccggcuccuggagaucacccgcgaguucagcgugaaugccggcgugacgacaccugucucuaccuauaugcuuacaaacuccgaacugcucagccugauuaacgacaugcccaucaccaaugaucaaaagaaacuuauguccaacaauguucagauugugagacagcagucuuacagcaucaugugcauuaucaaggaggaagugcuggcuuaugucgugcaacucccucuguacggcguuaucgacacccccuguuggaaacugcauacauccccucucugcacgaccaacacaaaggaggggagcaauauuugucugacccggacagaucgcggaugguacugcgacaacgccggcucuguguccuuuuucccgcaggcggaaaccuguaagguccagagcaauagaguguuuugcgauacgaugaacucucuuacacugcccagcgagguuaaucucugcaacaucgacauuuucaauccuaaauaugauuguaagaucaugaccuccaaaaccgacgugucuagcuccgucauuacaagccugggggccaucgugucuugcuacggaaagaccaaauguacagcuuccaacaagaaucggggcaucauuaagacguuuagcaacgggugcgauuaugucucuaauaaaggaguggacaccguuuccgugggcaacacacuuuacugugucaacaagcaagagggccagagccuguaugugaaaggggaacccaucauuaauuucuacgacccucucguuuuucccuccgaugaguucgacgccucuaucagccaggugaacgaaaagauuaaucagucccuggcuuuuauccgcaaaucugaugagcugcuccacaacgucaaugugggaaagagcaccacaaacauuaugaucaccacgaucauuaucgugauuaucguuauucugcuucugcucaucgccgucggccuguuccuguauugcaaggccagaugaggacuaguggaagcauuuuccuggcugauuaaaagaaauuacucagcuauggucaucuguuccuguuagaaggcuaugcagcauauuauauacuaugcgcauguuaugaaaugcauaauaaaaaauuuuaaaaaaucuaaaagaucuaaaaaaaaaaaaaaaaaaaaaaaaaaaaaaaaaaaaaaaaaaaaaaaaaaaaaaaaaaaaaaaaugcaucccccccccccccccccccccccccccccccaaaggcucuuuucagagccaccagaauu

SEQ ID NO: 14628 - RNA, 1919 nt, Artificial Sequence
  mRNA product Design h-3 comprising derived and/or modified sequence from HRSV(Memphis-37)__AIY60640.1__F-del_DSCav1_mut1 (opt6)
gggagacccgugacccggaaguuguacggcuacgcgacuuucccucccacaaacccucgcgcccuuccuuuccuacuugggcccggcagaaagcuuaccauggaauuaccaauacuaaaaacaaacgcaauaacaacaauucuagcagcaguaacauuaugcuuugcaucaucccaaaacaucacagaagaauuuuaucaaucaaccugcucagcaguuuccaaaggauacuuaggagcauuaagaacugguugguacacuucaguaaucaccaucgaacucucaaacaucaaggaaaacaaaugcaacggaacagacgcaaaaguuaaacucauaaaacaagaacuugacaaauacaaaaacgccguaacagaacuacaacuucucaugcaaucaacacccgcagcaggauccggaucagccauaugcucaggcauagcaguauguaaaguauuacaucuugaaggugaaguaaacaaaauaaaaaacgcacuucuaucaaccaacaaagcaguaguaucacuaucaaacggaguauccgucuuaacauuuaaaguucuagaccucaaaaacuauauagacaaacaauuacugccaauccucaauaaacaaucaugcucaauaccaaacaucgaaacaguaauagaauuucaacaaaaaaacaacagacuacuagaaauaacaagagaauuuuccgucaacgccggcguaacuacuccaguaucaacauauaugcuaaccaacucagaacuccuaucccucauaaacgacaugccaauaacuaaugaucaaaaaaaacuaaugucaaacaauguacaaauaguuagacaacaaucauacucaaucaugugcauaauaaaagaagaaguacuagcauacgucguccaacuaccccuauacggaguaauagacacaccuugcuggaaacuacacacaucaccccuaugcacaacaaauacaaaagaagguuccaacaucugccuaacaagaacugauagaggaugguacugcgacaacgccggaucaguaucauucuucccucaagcugaaaccugcaaaguacaaucaaacagaguauuuugcgauacaaugaacucccuaacacuucccucagaaguuaaucuuuguaauauagauauauucaacccaaaauacgacugcaaaauaaugacaaguaaaacagacguauccucaucuguaauuacaucacuaggagccauaguaucuugcuacggcaaaaccaaaugcacagcaucaaacaaaaacagagguauuaucaaaaccuucucaaacggaugugacuacguuucaaacaaaggaguagacacaguaucagucggaaacacccuauacuguguuaacaaacaagaaggacaaucacuguacguaaaaggagaacccauaauaaauuucuacgacccacuuguauuuccaucagacgaauuugaugcaucaaucucacaaguaaaugaaaaaauaaaccaaucauuagcauucauaagaaaaucugacgaguuacuacacaacguaaauguuggcaaaucaacaaccaauauaaugauaacaacaauaauaauaguaauaauagucauauuacuccuccucauagccgucggauuauucuuauacugcaaagcaagauaaggacuaguggaagcauuuuccuggcugauuaaaagaaauuacucagcuauggucaucuguuccuguuagaaggcuaugcagcauauuauauacuaugcgcauguuaugaaaugcauaauaaaaaauuuuaaaaaaucuaaaagaucuaaaaaaaaaaaaaaaaaaaaaaaaaaaaaaaaaaaaaaaaaaaaaaaaaaaaaaaaaaaaaaaaugcaucccccccccccccccccccccccccccccccaaaggcucuuuucagagccaccagaauu

SEQ ID NO: 14629 - RNA, 1919 nt, Artificial Sequence
  mRNA product Design h-3 comprising derived and/or modified sequence from HRSV(Memphis-37)__AIY60640.1__F-del_DSCav1_mut1 (opt11)
gggagacccgugacccggaaguuguacggcuacgcgacuuucccucccacaaacccucgcgcccuuccuuuccuacuugggcccggcagaaagcuuaccauggaacuccccauacuaaaaaccaacgccaucacaacaauccucgccgccgucacacucugcuucgccagcucccaaaacaucaccgaagaguucuaucaaucaaccugcuccgcagucucaaagggauaccucggagcccuccgcaccggaugguacacuuccgucaucacaauagaacucuccaacaucaaagaaaacaaaugcaacggcaccgacgcaaaagucaagcucaucaaacaagaacucgacaaauauaaaaacgccgucaccgaacuccaacuacucaugcaauccacacccgcggccggcucaggcagcgccaucugcucaggcaucgccgucugcaaaguccuccaccucgaaggcgaagucaacaaaaucaaaaacgcccuucuuucaaccaacaaggcaguaguaucccucucaaacggcgucagcguccugaccuucaaaguccuagaccucaaaaacuacauagauaaacaacuccuccccauacugaacaaacaaucgugcuccauccccaauaucgaaaccgucauagaguuccagcagaaaaacaacagacuucucgaaauaacccgagaguucucaguaaacgccggagucaccacacccguaagcaccuacaugcucacaaacucagaacuccuaucccucaucaacgacaugcccaucaccaacgaccagaaaaagcuaauguccaacaacguccaaauaguacgccaacaaagcuacucgauaaugugcaucaucaaggaagaaguacucgccuacgucguccaacucccccucuacggcguaaucgacacacccugcuggaaacuccacacguccccacucugcacaacaaacacaaaagaaggauccaacauaugccuaacccgcaccgacaggggcugguacugcgacaacgcaggcucagucagcuucuuuccccaagccgaaacaugcaaaguccaauccaaccgugucuucugcgacaccaugaacucgcucacccuacccucggaagucaaucucugcaacaucgacaucuucaacccaaaauacgacuguaaaaucaugaccagcaaaacagacguuucuuccagcgucaucacaucacucggcgcgaucguaucaugcuauggcaaaacaaagugcaccgcuagcaauaaaaaccgaggaaucauaaaaaccuucagcaacggcugcgacuacguauccaacaaaggcgucgacaccguauccgucggaaacacccucuacugcgucaacaagcaagaaggacaaucacucuacgucaaaggcgaaccaaucauaaacuucuacgacccacucguauuccccucagacgaguucgacgcauccaucucccaagucaacgaaaagaucaaccaaucucucgccuuuauacgcaaaagcgacgaacuccuucacaacguaaacgucggcaaaagcaccacuaacauaaugaucaccacaaucauaauaguaaucaucguaauacuccuccuacucaucgccgugggccuauuccucuauugcaaagcccgauaaggacuaguggaagcauuuuccuggcugauuaaaagaaauuacucagcuauggucaucuguuccuguuagaaggcuaugcagcauauuauauacuaugcgcauguuaugaaaugcauaauaaaaaauuuuaaaaaaucuaaaagaucuaaaaaaaaaaaaaaaaaaaaaaaaaaaaaaaaaaaaaaaaaaaaaaaaaaaaaaaaaaaaaaaaugcaucccccccccccccccccccccccccccccccaaaggcucuuuucagagccaccagaauu

SEQ ID NO: 14630 - RNA, 1982 nt, Artificial Sequence
  mRNA product Design h-4 comprising derived and/or modified sequence from HRSV(Memphis-37)__AIY60640.1__F-del_DSCav1_mut1 (opt1)
gggagagggcgcuuggcuugcaaggacccugagcugcggcauugaagcacacccaacccaacucgacugaagucagccucacugaaccggaucugagaaucuucucucucugggcuugccagggcucuccgaaccuagcuagcauccucuucaauuccaacuagaaagcuuaccauggagcugcccauccucaagaccaacgccaucaccacgauccuggccgcggugacccugugcuucgccagcucccagaacaucaccgaggaguucuaccagagcacgugcuccgccgucagcaagggcuaccucggcgcccugcgcaccgggugguacaccagcgugaucaccaucgagcuguccaacaucaaggagaacaagugcaacggcaccgacgccaaggugaagcucaucaagcaggagcuggacaaguacaagaacgcggucacggagcugcagcuccugaugcagagcaccccggccgccggcuccgggagcgcgaucugcuccggcaucgccgucugcaaggugcugcaccucgagggcgaggugaacaagaucaagaacgcccugcuguccaccaacaaggccgucgugagccucuccaacggggugagcguccugaccuucaaggugcuggaccucaagaacuacaucgacaagcagcugcugcccauccugaacaagcagagcugcuccauccccaacaucgagaccgucaucgaguuccagcagaagaacaaccgccuccuggagaucacgcgggaguucagcgugaacgcgggcgugaccacccccgucuccaccuacaugcugacgaacagcgagcuccugucccugaucaacgacaugccgaucaccaacgaccagaagaagcucaugagcaacaacgugcagaucgugcgccagcaguccuacagcaucaugugcaucaucaaggaggagguccuggccuacguggugcagcugccccucuacggggucaucgacacccccugcuggaagcugcacaccagcccccugugcacgaccaacaccaaggagggcuccaacaucugccucacccggacggaccgcgggugguacugcgacaacgccggcagcguguccuucuucccgcaggccgagaccugcaagguccagagcaaccggguguucugcgacaccaugaacucccugacccugcccagcgaggugaaccucugcaacaucgacaucuucaaccccaaguacgacugcaagaucaugacguccaagaccgacgucagcuccagcgugaucaccucccugggcgccaucgugagcugcuacgggaagaccaagugcacggcgagcaacaagaaccgcggcaucaucaagaccuucuccaacgggugcgacuacgucagcaacaagggcguggacaccguguccgucggcaacacccuguacugcgugaacaagcaggagggccagagccucuacgugaagggggagcccaucaucaacuucuacgacccgcuggucuuccccuccgacgaguucgacgccagcaucucccaggugaacgagaagaucaaccagagccuggccuucauccggaaguccgacgagcuccugcacaacgugaacgucggcaagagcaccacgaacaucaugaucaccaccaucaucaucgugaucaucgugauccugcugcuccugaucgccgucgggcuguuccucuacugcaaggcccgcugaggacuaguaauaaggaaacuguaugaaugucugugggcaggaagugaagagauccuucuguaaagguuuuuggaauuaugucugcugaauaauaaacuuuuuugaaauaauaaaucugguagaaaaaugagaucuaaaaaaaaaaaaaaaaaaaaaaaaaaaaaaaaaaaaaaaaaaaaaaaaaaaaaaaaaaaaaaaaugcaucccccccccccccccccccccccccccccccaaaggcucuuuucagagccaccagaauu

SEQ ID NO: 14631 - RNA, 1982 nt, Artificial Sequence
  mRNA product Design h-4 comprising derived and/or modified sequence from HRSV(Memphis-37)__AIY60640.1__F-del_DSCav1_mut1 (opt1)
gggagagggcgcuuggcuugcaaggacccugagcugcggcauugaagcacacccaacccaacucgacugaagucagccucacugaaccggaucugagaaucuucucucucugggcuugccagggcucuccgaaccuagcuagcauccucuucaauuccaacuagaaagcuuaccauggagcugcccauccucaagaccaacgccaucaccacgauccuggccgcggugacccugugcuucgccagcucccagaacaucaccgaggaguucuaccagagcacgugcuccgccgucagcaagggcuaccucggggcccugcgcaccggcugguacaccuccgugaucaccaucgagcugagcaacaucaaggagaacaagugcaacgggaccgacgccaaggugaagcucaucaagcaggagcuggacaaguacaagaacgcggucacggagcugcagcuccugaugcaguccaccccggccgccggcagcggguccgccaucugcagcggcaucgcggugugcaaggugcugcaccucgagggcgaggucaacaagaucaagaacgcccugcuguccaccaacaaggccguggugagccucuccaacggggucagcgugcugaccuucaaggugcuggaccucaagaacuacaucgacaagcagcugcugcccauccucaacaagcaguccugcagcauccccaacaucgagacggucaucgaguuccagcagaagaacaaccggcugcuggagaucacccgcgaguucuccgugaacgccggcgugaccacccccgucagcacguacaugcucaccaacuccgagcugcugagccucaucaacgacaugccgaucaccaacgaccagaagaagcugaugagcaacaacgugcagaucgugcggcagcaguccuacagcaucaugugcaucaucaaggaggagguccuggccuacguggugcagcucccccuguacggggucaucgacacccccugcuggaagcugcacacgagcccccucugcaccaccaacaccaaggagggcuccaacaucugccugacgcgcaccgaccgggggugguacugcgacaacgcgggcuccgugagcuucuucccgcaggccgagaccugcaaggugcaguccaaccgcgucuucugcgacaccaugaacagccugacgcuccccuccgaggugaaccugugcaacaucgacaucuucaaccccaaguacgacugcaagaucaugaccagcaagaccgacgucuccagcuccgugaucaccagccugggcgccaucguguccugcuacgggaagacgaagugcaccgccagcaacaagaaccggggcaucaucaagaccuucuccaacgggugcgacuacgucagcaacaagggcguggacaccguguccgucggcaacacgcucuacugcgugaacaagcaggaggggcagagccuguacgugaagggcgagcccaucaucaacuucuacgacccgcuggucuuccccagcgacgaguucgacgccuccaucagccaggugaacgagaagaucaaccagucccucgcguucauccgcaagagcgacgagcugcugcacaacgugaacgucgggaaguccaccaccaacaucaugaucaccaccaucaucaucgugaucaucgugauccuccugcugcucaucgccgucggccuguuccuguacugcaaggcccggugaggacuaguaauaaggaaacuguaugaaugucugugggcaggaagugaagagauccuucuguaaagguuuuuggaauuaugucugcugaauaauaaacuuuuuugaaauaauaaaucugguagaaaaaugagaucuaaaaaaaaaaaaaaaaaaaaaaaaaaaaaaaaaaaaaaaaaaaaaaaaaaaaaaaaaaaaaaaaugcaucccccccccccccccccccccccccccccccaaaggcucuuuucagagccaccagaauu

SEQ ID NO: 14632 - RNA, 1982 nt, Artificial Sequence
  mRNA product Design h-4 comprising derived and/or modified sequence from HRSV(Memphis-37)__AIY60640.1__F-del_DSCav1_mut1 (opt2)
gggagagggcgcuuggcuugcaaggacccugagcugcggcauugaagcacacccaacccaacucgacugaagucagccucacugaaccggaucugagaaucuucucucucugggcuugccagggcucuccgaaccuagcuagcauccucuucaauuccaacuagaaagcuuaccauggagcuccccauccucaagaccaacgccaucaccaccauccucgccgccgucacccucugcuucgccuccucccagaacaucaccgaggaguucuaccaguccaccugcuccgccgucuccaagggcuaccucggcgcccuccgcaccggcugguacaccuccgucaucaccaucgagcucuccaacaucaaggagaacaagugcaacggcaccgacgccaaggucaagcucaucaagcaggagcucgacaaguacaagaacgccgucaccgagcuccagcuccucaugcaguccacccccgccgccggcuccggcuccgccaucugcuccggcaucgccgucugcaagguccuccaccucgagggcgaggucaacaagaucaagaacgcccuccucuccaccaacaaggccgucgucucccucuccaacggcgucuccguccucaccuucaagguccucgaccucaagaacuacaucgacaagcagcuccuccccauccucaacaagcaguccugcuccauccccaacaucgagaccgucaucgaguuccagcagaagaacaaccgccuccucgagaucacccgcgaguucuccgucaacgccggcgucaccacccccgucuccaccuacaugcucaccaacuccgagcuccucucccucaucaacgacaugcccaucaccaacgaccagaagaagcucauguccaacaacguccagaucguccgccagcaguccuacuccaucaugugcaucaucaaggaggagguccucgccuacgucguccagcucccccucuacggcgucaucgacacccccugcuggaagcuccacaccuccccccucugcaccaccaacaccaaggagggcuccaacaucugccucacccgcaccgaccgcggcugguacugcgacaacgccggcuccgucuccuucuucccccaggccgagaccugcaagguccaguccaaccgcgucuucugcgacaccaugaacucccucacccuccccuccgaggucaaccucugcaacaucgacaucuucaaccccaaguacgacugcaagaucaugaccuccaagaccgacgucuccuccuccgucaucaccucccucggcgccaucgucuccugcuacggcaagaccaagugcaccgccuccaacaagaaccgcggcaucaucaagaccuucuccaacggcugcgacuacgucuccaacaagggcgucgacaccgucuccgucggcaacacccucuacugcgucaacaagcaggagggccagucccucuacgucaagggcgagcccaucaucaacuucuacgacccccucgucuuccccuccgacgaguucgacgccuccaucucccaggucaacgagaagaucaaccagucccucgccuucauccgcaaguccgacgagcuccuccacaacgucaacgucggcaaguccaccaccaacaucaugaucaccaccaucaucaucgucaucaucgucauccuccuccuccucaucgccgucggccucuuccucuacugcaaggcccgcugaggacuaguaauaaggaaacuguaugaaugucugugggcaggaagugaagagauccuucuguaaagguuuuuggaauuaugucugcugaauaauaaacuuuuuugaaauaauaaaucugguagaaaaaugagaucuaaaaaaaaaaaaaaaaaaaaaaaaaaaaaaaaaaaaaaaaaaaaaaaaaaaaaaaaaaaaaaaaugcaucccccccccccccccccccccccccccccccaaaggcucuuuucagagccaccagaauu

SEQ ID NO: 14633 - RNA, 1982 nt, Artificial Sequence
  mRNA product Design h-4 comprising derived and/or modified sequence from HRSV(Memphis-37)__AIY60640.1__F-del_DSCav1_mut1 (opt3)
gggagagggcgcuuggcuugcaaggacccugagcugcggcauugaagcacacccaacccaacucgacugaagucagccucacugaaccggaucugagaaucuucucucucugggcuugccagggcucuccgaaccuagcuagcauccucuucaauuccaacuagaaagcuuaccauggagcugcccauccucaagaccaacgccauuacaacuauacuugcugcagugacgcugugcuucgccagcucccagaauaucaccgaagaguuuuaccaaucuacauguucagcggucaguaaaggcuauuugggggcuuuaagaacuggaugguacaccagcguuauuacaaucgaacuguccaacauuaaggagaauaaaugcaacgguaccgacgccaaggugaaacuaaucaagcaggaacucgauaaguauaaaaaugcaguaacugagcugcagcuucugaugcagucuacuccugccgcuggcucggggucagcaauauguagcggaaucgccgugugcaaggucuugcaccucgagggcgaagugaacaaaauuaagaaugcucugcugaguaccaacaaagccguugugucccucucuaauggugucagcguguuaacguucaagguacuggaccuuaagaacuacaucgauaaacaauugcugccaauucuaaauaagcaguccuguucaaucccgaacauagagacuguuauugaauuucagcagaaaaauaacaggcuccuggagaucacccgggaguucagugugaaugcgggggucacaacucccgugagcaccuauaugcuuacaaacucugaacuguugucccucauuaacgacaugccuaucaccaaugaucaaaagaaacugaugucaaacaaugugcagaucguccgccagcagagcuacaguauuaugugcauaaucaaggaggaaguuuuagcauaugugguacaacugccacucuacggagugauugacacgcccuguuggaaacuucauacuucuccucugugcacaaccaacacuaaggagggcuccaauaucuguuugacacgaaccgaucguggcugguacugcgacaacgccgggagcgucucguuuuucccacaggcugaaacguguaaggugcagucuaauagaguguuuugcgauaccaugaacucccuaacacugcccucagagguuaaucucugcaacauagacauuuucaauccuaaauaugauuguaagaucaugacaaguaaaaccgacgucagcuccucugugaucacaagccugggagccauuguaucaugcuacgguaagacuaaauguaccgcaaguaacaagaauaggggcaucauuaagacauuuuccaacgggugcgauuauguuagcaauaaaggaguggacaccgucucugugggcaacacucuuuacugugucaacaagcaagagggucagucacuguaugugaaaggggaaccaauaaucaauuucuacgacccguugguuuuucccagugaugaguucgacgcuagcauuucccaggugaacgaaaagaucaaucagucucucgccuuuauccggaaaucggaugagcuguuacacaacguaaaugucggaaagagcacgacaaacauuaugauaaccacuaucauuaucgugauuaucguuauacugcuacuccugaucgcggugggccuuuucuuguauugcaaggcccgcugaggacuaguaauaaggaaacuguaugaaugucugugggcaggaagugaagagauccuucuguaaagguuuuuggaauuaugucugcugaauaauaaacuuuuuugaaauaauaaaucugguagaaaaaugagaucuaaaaaaaaaaaaaaaaaaaaaaaaaaaaaaaaaaaaaaaaaaaaaaaaaaaaaaaaaaaaaaaaugcaucccccccccccccccccccccccccccccccaaaggcucuuuucagagccaccagaauu

SEQ ID NO: 14634 - RNA, 1982 nt, Artificial Sequence
  mRNA product Design h-4 comprising derived and/or modified sequence from HRSV(Memphis-37)__AIY60640.1__F-del_DSCav1_mut1 (opt4)
gggagagggcgcuuggcuugcaaggacccugagcugcggcauugaagcacacccaacccaacucgacugaagucagccucacugaaccggaucugagaaucuucucucucugggcuugccagggcucuccgaaccuagcuagcauccucuucaauuccaacuagaaagcuuaccauggagcugcccauccugaagaccaacgccaucaccaccauccuggccgccgugacccugugcuucgccagcagccagaacaucaccgaggaguucuaccagagcaccugcagcgccgugagcaagggcuaccugggcgcccugagaaccggcugguacaccagcgugaucaccaucgagcugagcaacaucaaggagaacaagugcaacggcaccgacgccaaggugaagcugaucaagcaggagcuggacaaguacaagaacgccgugaccgagcugcagcugcugaugcagagcacccccgccgccggcagcggcagcgccaucugcagcggcaucgccgugugcaaggugcugcaccuggagggcgaggugaacaagaucaagaacgcccugcugagcaccaacaaggccguggugagccugagcaacggcgugagcgugcugaccuucaaggugcuggaccugaagaacuacaucgacaagcagcugcugcccauccugaacaagcagagcugcagcauccccaacaucgagaccgugaucgaguuccagcagaagaacaacagacugcuggagaucaccagagaguucagcgugaacgccggcgugaccacccccgugagcaccuacaugcugaccaacagcgagcugcugagccugaucaacgacaugcccaucaccaacgaccagaagaagcugaugagcaacaacgugcagaucgugagacagcagagcuacagcaucaugugcaucaucaaggaggaggugcuggccuacguggugcagcugccccuguacggcgugaucgacacccccugcuggaagcugcacaccagcccccugugcaccaccaacaccaaggagggcagcaacaucugccugaccagaaccgacagaggcugguacugcgacaacgccggcagcgugagcuucuucccccaggccgagaccugcaaggugcagagcaacagaguguucugcgacaccaugaacagccugacccugcccagcgaggugaaccugugcaacaucgacaucuucaaccccaaguacgacugcaagaucaugaccagcaagaccgacgugagcagcagcgugaucaccagccugggcgccaucgugagcugcuacggcaagaccaagugcaccgccagcaacaagaacagaggcaucaucaagaccuucagcaacggcugcgacuacgugagcaacaagggcguggacaccgugagcgugggcaacacccuguacugcgugaacaagcaggagggccagagccuguacgugaagggcgagcccaucaucaacuucuacgacccccugguguuccccagcgacgaguucgacgccagcaucagccaggugaacgagaagaucaaccagagccuggccuucaucagaaagagcgacgagcugcugcacaacgugaacgugggcaagagcaccaccaacaucaugaucaccaccaucaucaucgugaucaucgugauccugcugcugcugaucgccgugggccuguuccuguacugcaaggccagaugaggacuaguaauaaggaaacuguaugaaugucugugggcaggaagugaagagauccuucuguaaagguuuuuggaauuaugucugcugaauaauaaacuuuuuugaaauaauaaaucugguagaaaaaugagaucuaaaaaaaaaaaaaaaaaaaaaaaaaaaaaaaaaaaaaaaaaaaaaaaaaaaaaaaaaaaaaaaaugcaucccccccccccccccccccccccccccccccaaaggcucuuuucagagccaccagaauu

SEQ ID NO: 14635 - RNA, 1982 nt, Artificial Sequence
  mRNA product Design h-4 comprising derived and/or modified sequence from HRSV(Memphis-37)__AIY60640.1__F-del_DSCav1_mut1 (opt5)
gggagagggcgcuuggcuugcaaggacccugagcugcggcauugaagcacacccaacccaacucgacugaagucagccucacugaaccggaucugagaaucuucucucucugggcuugccagggcucuccgaaccuagcuagcauccucuucaauuccaacuagaaagcuuaccauggagcugcccauccucaagaccaacgccauuacaacgauccuggcugccgugacccuuugcuucgcgagcucccagaauauuacagaagaguuuuaccaaucuaccuguagcgcugucuccaaaggcuaucugggggcccucagaacaggaugguacaccucuguuaucacaauugaacugagcaacaucaaggagaauaaaugcaacggcaccgacgccaaggugaaacuuaucaagcaggaacuggauaaguauaaaaaugcugugacggagcuccagcugcugaugcaguccaccccugccgcugggucuggaagcgccauuuguuccggcaucgcggucugcaaggugcuccaccuggagggggaaguuaacaaaauuaagaaugcccuucugagcacaaacaaagcuguggucucucucuccaauggagugagcguucugaccuucaaggugcuugaccugaagaacuacaucgauaaacaacuccugccgauucugaauaagcagucuuguuccauccccaacauugagacagucaucgaauuucagcagaaaaauaaccggcuccuggagaucacccgcgaguucagcgugaaugccggcgugacgacaccugucucuaccuauaugcuuacaaacuccgaacugcucagccugauuaacgacaugcccaucaccaaugaucaaaagaaacuuauguccaacaauguucagauugugagacagcagucuuacagcaucaugugcauuaucaaggaggaagugcuggcuuaugucgugcaacucccucuguacggcguuaucgacacccccuguuggaaacugcauacauccccucucugcacgaccaacacaaaggaggggagcaauauuugucugacccggacagaucgcggaugguacugcgacaacgccggcucuguguccuuuuucccgcaggcggaaaccuguaagguccagagcaauagaguguuuugcgauacgaugaacucucuuacacugcccagcgagguuaaucucugcaacaucgacauuuucaauccuaaauaugauuguaagaucaugaccuccaaaaccgacgugucuagcuccgucauuacaagccugggggccaucgugucuugcuacggaaagaccaaauguacagcuuccaacaagaaucggggcaucauuaagacguuuagcaacgggugcgauuaugucucuaauaaaggaguggacaccguuuccgugggcaacacacuuuacugugucaacaagcaagagggccagagccuguaugugaaaggggaacccaucauuaauuucuacgacccucucguuuuucccuccgaugaguucgacgccucuaucagccaggugaacgaaaagauuaaucagucccuggcuuuuauccgcaaaucugaugagcugcuccacaacgucaaugugggaaagagcaccacaaacauuaugaucaccacgaucauuaucgugauuaucguuauucugcuucugcucaucgccgucggccuguuccuguauugcaaggccagaugaggacuaguaauaaggaaacuguaugaaugucugugggcaggaagugaagagauccuucuguaaagguuuuuggaauuaugucugcugaauaauaaacuuuuuugaaauaauaaaucugguagaaaaaugagaucuaaaaaaaaaaaaaaaaaaaaaaaaaaaaaaaaaaaaaaaaaaaaaaaaaaaaaaaaaaaaaaaaugcaucccccccccccccccccccccccccccccccaaaggcucuuuucagagccaccagaauu

SEQ ID NO: 14636 - RNA, 1982 nt, Artificial Sequence
  mRNA product Design h-4 comprising derived and/or modified sequence from HRSV(Memphis-37)__AIY60640.1__F-del_DSCav1_mut1 (opt6)
gggagagggcgcuuggcuugcaaggacccugagcugcggcauugaagcacacccaacccaacucgacugaagucagccucacugaaccggaucugagaaucuucucucucugggcuugccagggcucuccgaaccuagcuagcauccucuucaauuccaacuagaaagcuuaccauggaauuaccaauacuaaaaacaaacgcaauaacaacaauucuagcagcaguaacauuaugcuuugcaucaucccaaaacaucacagaagaauuuuaucaaucaaccugcucagcaguuuccaaaggauacuuaggagcauuaagaacugguugguacacuucaguaaucaccaucgaacucucaaacaucaaggaaaacaaaugcaacggaacagacgcaaaaguuaaacucauaaaacaagaacuugacaaauacaaaaacgccguaacagaacuacaacuucucaugcaaucaacacccgcagcaggauccggaucagccauaugcucaggcauagcaguauguaaaguauuacaucuugaaggugaaguaaacaaaauaaaaaacgcacuucuaucaaccaacaaagcaguaguaucacuaucaaacggaguauccgucuuaacauuuaaaguucuagaccucaaaaacuauauagacaaacaauuacugccaauccucaauaaacaaucaugcucaauaccaaacaucgaaacaguaauagaauuucaacaaaaaaacaacagacuacuagaaauaacaagagaauuuuccgucaacgccggcguaacuacuccaguaucaacauauaugcuaaccaacucagaacuccuaucccucauaaacgacaugccaauaacuaaugaucaaaaaaaacuaaugucaaacaauguacaaauaguuagacaacaaucauacucaaucaugugcauaauaaaagaagaaguacuagcauacgucguccaacuaccccuauacggaguaauagacacaccuugcuggaaacuacacacaucaccccuaugcacaacaaauacaaaagaagguuccaacaucugccuaacaagaacugauagaggaugguacugcgacaacgccggaucaguaucauucuucccucaagcugaaaccugcaaaguacaaucaaacagaguauuuugcgauacaaugaacucccuaacacuucccucagaaguuaaucuuuguaauauagauauauucaacccaaaauacgacugcaaaauaaugacaaguaaaacagacguauccucaucuguaauuacaucacuaggagccauaguaucuugcuacggcaaaaccaaaugcacagcaucaaacaaaaacagagguauuaucaaaaccuucucaaacggaugugacuacguuucaaacaaaggaguagacacaguaucagucggaaacacccuauacuguguuaacaaacaagaaggacaaucacuguacguaaaaggagaacccauaauaaauuucuacgacccacuuguauuuccaucagacgaauuugaugcaucaaucucacaaguaaaugaaaaaauaaaccaaucauuagcauucauaagaaaaucugacgaguuacuacacaacguaaauguuggcaaaucaacaaccaauauaaugauaacaacaauaauaauaguaauaauagucauauuacuccuccucauagccgucggauuauucuuauacugcaaagcaagauaaggacuaguaauaaggaaacuguaugaaugucugugggcaggaagugaagagauccuucuguaaagguuuuuggaauuaugucugcugaauaauaaacuuuuuugaaauaauaaaucugguagaaaaaugagaucuaaaaaaaaaaaaaaaaaaaaaaaaaaaaaaaaaaaaaaaaaaaaaaaaaaaaaaaaaaaaaaaaugcaucccccccccccccccccccccccccccccccaaaggcucuuuucagagccaccagaauu

SEQ ID NO: 14637 - RNA, 1982 nt, Artificial Sequence
  mRNA product Design h-4 comprising derived and/or modified sequence from HRSV(Memphis-37)__AIY60640.1__F-del_DSCav1_mut1 (opt11)
gggagagggcgcuuggcuugcaaggacccugagcugcggcauugaagcacacccaacccaacucgacugaagucagccucacugaaccggaucugagaaucuucucucucugggcuugccagggcucuccgaaccuagcuagcauccucuucaauuccaacuagaaagcuuaccauggaacuccccauacuaaaaaccaacgccaucacaacaauccucgccgccgucacacucugcuucgccagcucccaaaacaucaccgaagaguucuaucaaucaaccugcuccgcagucucaaagggauaccucggagcccuccgcaccggaugguacacuuccgucaucacaauagaacucuccaacaucaaagaaaacaaaugcaacggcaccgacgcaaaagucaagcucaucaaacaagaacucgacaaauauaaaaacgccgucaccgaacuccaacuacucaugcaauccacacccgcggccggcucaggcagcgccaucugcucaggcaucgccgucugcaaaguccuccaccucgaaggcgaagucaacaaaaucaaaaacgcccuucuuucaaccaacaaggcaguaguaucccucucaaacggcgucagcguccugaccuucaaaguccuagaccucaaaaacuacauagauaaacaacuccuccccauacugaacaaacaaucgugcuccauccccaauaucgaaaccgucauagaguuccagcagaaaaacaacagacuucucgaaauaacccgagaguucucaguaaacgccggagucaccacacccguaagcaccuacaugcucacaaacucagaacuccuaucccucaucaacgacaugcccaucaccaacgaccagaaaaagcuaauguccaacaacguccaaauaguacgccaacaaagcuacucgauaaugugcaucaucaaggaagaaguacucgccuacgucguccaacucccccucuacggcguaaucgacacacccugcuggaaacuccacacguccccacucugcacaacaaacacaaaagaaggauccaacauaugccuaacccgcaccgacaggggcugguacugcgacaacgcaggcucagucagcuucuuuccccaagccgaaacaugcaaaguccaauccaaccgugucuucugcgacaccaugaacucgcucacccuacccucggaagucaaucucugcaacaucgacaucuucaacccaaaauacgacuguaaaaucaugaccagcaaaacagacguuucuuccagcgucaucacaucacucggcgcgaucguaucaugcuauggcaaaacaaagugcaccgcuagcaauaaaaaccgaggaaucauaaaaaccuucagcaacggcugcgacuacguauccaacaaaggcgucgacaccguauccgucggaaacacccucuacugcgucaacaagcaagaaggacaaucacucuacgucaaaggcgaaccaaucauaaacuucuacgacccacucguauuccccucagacgaguucgacgcauccaucucccaagucaacgaaaagaucaaccaaucucucgccuuuauacgcaaaagcgacgaacuccuucacaacguaaacgucggcaaaagcaccacuaacauaaugaucaccacaaucauaauaguaaucaucguaauacuccuccuacucaucgccgugggccuauuccucuauugcaaagcccgauaaggacuaguaauaaggaaacuguaugaaugucugugggcaggaagugaagagauccuucuguaaagguuuuuggaauuaugucugcugaauaauaaacuuuuuugaaauaauaaaucugguagaaaaaugagaucuaaaaaaaaaaaaaaaaaaaaaaaaaaaaaaaaaaaaaaaaaaaaaaaaaaaaaaaaaaaaaaaaugcaucccccccccccccccccccccccccccccccaaaggcucuuuucagagccaccagaauu

SEQ ID NO: 14638 - RNA, 1998 nt, Artificial Sequence
  mRNA product Design h-5 comprising derived and/or modified sequence from HRSV(Memphis-37)__AIY60640.1__F-del_DSCav1_mut1 (opt1)
gggagagggcgcuuggcuugcaaggacccugagcugcggcauugaagcacacccaacccaacucgacugaagucagccucacugaaccggaucugagaaucuucucucucugggcuugccagggcucuccgaaccuagcuagcauccucuucaauuccaacuagaaagcuuaccauggagcugcccauccucaagaccaacgccaucaccacgauccuggccgcggugacccugugcuucgccagcucccagaacaucaccgaggaguucuaccagagcacgugcuccgccgucagcaagggcuaccucggcgcccugcgcaccgggugguacaccagcgugaucaccaucgagcuguccaacaucaaggagaacaagugcaacggcaccgacgccaaggugaagcucaucaagcaggagcuggacaaguacaagaacgcggucacggagcugcagcuccugaugcagagcaccccggccgccggcuccgggagcgcgaucugcuccggcaucgccgucugcaaggugcugcaccucgagggcgaggugaacaagaucaagaacgcccugcuguccaccaacaaggccgucgugagccucuccaacggggugagcguccugaccuucaaggugcuggaccucaagaacuacaucgacaagcagcugcugcccauccugaacaagcagagcugcuccauccccaacaucgagaccgucaucgaguuccagcagaagaacaaccgccuccuggagaucacgcgggaguucagcgugaacgcgggcgugaccacccccgucuccaccuacaugcugacgaacagcgagcuccugucccugaucaacgacaugccgaucaccaacgaccagaagaagcucaugagcaacaacgugcagaucgugcgccagcaguccuacagcaucaugugcaucaucaaggaggagguccuggccuacguggugcagcugccccucuacggggucaucgacacccccugcuggaagcugcacaccagcccccugugcacgaccaacaccaaggagggcuccaacaucugccucacccggacggaccgcgggugguacugcgacaacgccggcagcguguccuucuucccgcaggccgagaccugcaagguccagagcaaccggguguucugcgacaccaugaacucccugacccugcccagcgaggugaaccucugcaacaucgacaucuucaaccccaaguacgacugcaagaucaugacguccaagaccgacgucagcuccagcgugaucaccucccugggcgccaucgugagcugcuacgggaagaccaagugcacggcgagcaacaagaaccgcggcaucaucaagaccuucuccaacgggugcgacuacgucagcaacaagggcguggacaccguguccgucggcaacacccuguacugcgugaacaagcaggagggccagagccucuacgugaagggggagcccaucaucaacuucuacgacccgcuggucuuccccuccgacgaguucgacgccagcaucucccaggugaacgagaagaucaaccagagccuggccuucauccggaaguccgacgagcuccugcacaacgugaacgucggcaagagcaccacgaacaucaugaucaccaccaucaucaucgugaucaucgugauccugcugcuccugaucgccgucgggcuguuccucuacugcaaggcccgcugaggacuaguacuggcugcaucucccuuuccucuguccuccauccuucucccaggauggugaagggggaccugguacccagugauccccaccccaggauccuaaaucaugacuuaccugcuaauaaaaacucauuggaaaagugagaagaucuaaaaaaaaaaaaaaaaaaaaaaaaaaaaaaaaaaaaaaaaaaaaaaaaaaaaaaaaaaaaaaaaugcaucccccccccccccccccccccccccccccccaaaggcucuuuucagagccaccagaauu

SEQ ID NO: 14639 - RNA, 1998 nt, Artificial Sequence
  mRNA product Design h-5 comprising derived and/or modified sequence from HRSV(Memphis-37)__AIY60640.1__F-del_DSCav1_mut1 (opt1)
gggagagggcgcuuggcuugcaaggacccugagcugcggcauugaagcacacccaacccaacucgacugaagucagccucacugaaccggaucugagaaucuucucucucugggcuugccagggcucuccgaaccuagcuagcauccucuucaauuccaacuagaaagcuuaccauggagcugcccauccucaagaccaacgccaucaccacgauccuggccgcggugacccugugcuucgccagcucccagaacaucaccgaggaguucuaccagagcacgugcuccgccgucagcaagggcuaccucggggcccugcgcaccggcugguacaccuccgugaucaccaucgagcugagcaacaucaaggagaacaagugcaacgggaccgacgccaaggugaagcucaucaagcaggagcuggacaaguacaagaacgcggucacggagcugcagcuccugaugcaguccaccccggccgccggcagcggguccgccaucugcagcggcaucgcggugugcaaggugcugcaccucgagggcgaggucaacaagaucaagaacgcccugcuguccaccaacaaggccguggugagccucuccaacggggucagcgugcugaccuucaaggugcuggaccucaagaacuacaucgacaagcagcugcugcccauccucaacaagcaguccugcagcauccccaacaucgagacggucaucgaguuccagcagaagaacaaccggcugcuggagaucacccgcgaguucuccgugaacgccggcgugaccacccccgucagcacguacaugcucaccaacuccgagcugcugagccucaucaacgacaugccgaucaccaacgaccagaagaagcugaugagcaacaacgugcagaucgugcggcagcaguccuacagcaucaugugcaucaucaaggaggagguccuggccuacguggugcagcucccccuguacggggucaucgacacccccugcuggaagcugcacacgagcccccucugcaccaccaacaccaaggagggcuccaacaucugccugacgcgcaccgaccgggggugguacugcgacaacgcgggcuccgugagcuucuucccgcaggccgagaccugcaaggugcaguccaaccgcgucuucugcgacaccaugaacagccugacgcuccccuccgaggugaaccugugcaacaucgacaucuucaaccccaaguacgacugcaagaucaugaccagcaagaccgacgucuccagcuccgugaucaccagccugggcgccaucguguccugcuacgggaagacgaagugcaccgccagcaacaagaaccggggcaucaucaagaccuucuccaacgggugcgacuacgucagcaacaagggcguggacaccguguccgucggcaacacgcucuacugcgugaacaagcaggaggggcagagccuguacgugaagggcgagcccaucaucaacuucuacgacccgcuggucuuccccagcgacgaguucgacgccuccaucagccaggugaacgagaagaucaaccagucccucgcguucauccgcaagagcgacgagcugcugcacaacgugaacgucgggaaguccaccaccaacaucaugaucaccaccaucaucaucgugaucaucgugauccuccugcugcucaucgccgucggccuguuccuguacugcaaggcccggugaggacuaguacuggcugcaucucccuuuccucuguccuccauccuucucccaggauggugaagggggaccugguacccagugauccccaccccaggauccuaaaucaugacuuaccugcuaauaaaaacucauuggaaaagugagaagaucuaaaaaaaaaaaaaaaaaaaaaaaaaaaaaaaaaaaaaaaaaaaaaaaaaaaaaaaaaaaaaaaaugcaucccccccccccccccccccccccccccccccaaaggcucuuuucagagccaccagaauu

SEQ ID NO: 14640 - RNA, 1998 nt, Artificial Sequence
  mRNA product Design h-5 comprising derived and/or modified sequence from HRSV(Memphis-37)__AIY60640.1__F-del_DSCav1_mut1 (opt2)
gggagagggcgcuuggcuugcaaggacccugagcugcggcauugaagcacacccaacccaacucgacugaagucagccucacugaaccggaucugagaaucuucucucucugggcuugccagggcucuccgaaccuagcuagcauccucuucaauuccaacuagaaagcuuaccauggagcuccccauccucaagaccaacgccaucaccaccauccucgccgccgucacccucugcuucgccuccucccagaacaucaccgaggaguucuaccaguccaccugcuccgccgucuccaagggcuaccucggcgcccuccgcaccggcugguacaccuccgucaucaccaucgagcucuccaacaucaaggagaacaagugcaacggcaccgacgccaaggucaagcucaucaagcaggagcucgacaaguacaagaacgccgucaccgagcuccagcuccucaugcaguccacccccgccgccggcuccggcuccgccaucugcuccggcaucgccgucugcaagguccuccaccucgagggcgaggucaacaagaucaagaacgcccuccucuccaccaacaaggccgucgucucccucuccaacggcgucuccguccucaccuucaagguccucgaccucaagaacuacaucgacaagcagcuccuccccauccucaacaagcaguccugcuccauccccaacaucgagaccgucaucgaguuccagcagaagaacaaccgccuccucgagaucacccgcgaguucuccgucaacgccggcgucaccacccccgucuccaccuacaugcucaccaacuccgagcuccucucccucaucaacgacaugcccaucaccaacgaccagaagaagcucauguccaacaacguccagaucguccgccagcaguccuacuccaucaugugcaucaucaaggaggagguccucgccuacgucguccagcucccccucuacggcgucaucgacacccccugcuggaagcuccacaccuccccccucugcaccaccaacaccaaggagggcuccaacaucugccucacccgcaccgaccgcggcugguacugcgacaacgccggcuccgucuccuucuucccccaggccgagaccugcaagguccaguccaaccgcgucuucugcgacaccaugaacucccucacccuccccuccgaggucaaccucugcaacaucgacaucuucaaccccaaguacgacugcaagaucaugaccuccaagaccgacgucuccuccuccgucaucaccucccucggcgccaucgucuccugcuacggcaagaccaagugcaccgccuccaacaagaaccgcggcaucaucaagaccuucuccaacggcugcgacuacgucuccaacaagggcgucgacaccgucuccgucggcaacacccucuacugcgucaacaagcaggagggccagucccucuacgucaagggcgagcccaucaucaacuucuacgacccccucgucuuccccuccgacgaguucgacgccuccaucucccaggucaacgagaagaucaaccagucccucgccuucauccgcaaguccgacgagcuccuccacaacgucaacgucggcaaguccaccaccaacaucaugaucaccaccaucaucaucgucaucaucgucauccuccuccuccucaucgccgucggccucuuccucuacugcaaggcccgcugaggacuaguacuggcugcaucucccuuuccucuguccuccauccuucucccaggauggugaagggggaccugguacccagugauccccaccccaggauccuaaaucaugacuuaccugcuaauaaaaacucauuggaaaagugagaagaucuaaaaaaaaaaaaaaaaaaaaaaaaaaaaaaaaaaaaaaaaaaaaaaaaaaaaaaaaaaaaaaaaugcaucccccccccccccccccccccccccccccccaaaggcucuuuucagagccaccagaauu

SEQ ID NO: 14641 - RNA, 1998 nt, Artificial Sequence
  mRNA product Design h-5 comprising derived and/or modified sequence from HRSV(Memphis-37)__AIY60640.1__F-del_DSCav1_mut1 (opt3)
gggagagggcgcuuggcuugcaaggacccugagcugcggcauugaagcacacccaacccaacucgacugaagucagccucacugaaccggaucugagaaucuucucucucugggcuugccagggcucuccgaaccuagcuagcauccucuucaauuccaacuagaaagcuuaccauggagcugcccauccucaagaccaacgccauuacaacuauacuugcugcagugacgcugugcuucgccagcucccagaauaucaccgaagaguuuuaccaaucuacauguucagcggucaguaaaggcuauuugggggcuuuaagaacuggaugguacaccagcguuauuacaaucgaacuguccaacauuaaggagaauaaaugcaacgguaccgacgccaaggugaaacuaaucaagcaggaacucgauaaguauaaaaaugcaguaacugagcugcagcuucugaugcagucuacuccugccgcuggcucggggucagcaauauguagcggaaucgccgugugcaaggucuugcaccucgagggcgaagugaacaaaauuaagaaugcucugcugaguaccaacaaagccguugugucccucucuaauggugucagcguguuaacguucaagguacuggaccuuaagaacuacaucgauaaacaauugcugccaauucuaaauaagcaguccuguucaaucccgaacauagagacuguuauugaauuucagcagaaaaauaacaggcuccuggagaucacccgggaguucagugugaaugcgggggucacaacucccgugagcaccuauaugcuuacaaacucugaacuguugucccucauuaacgacaugccuaucaccaaugaucaaaagaaacugaugucaaacaaugugcagaucguccgccagcagagcuacaguauuaugugcauaaucaaggaggaaguuuuagcauaugugguacaacugccacucuacggagugauugacacgcccuguuggaaacuucauacuucuccucugugcacaaccaacacuaaggagggcuccaauaucuguuugacacgaaccgaucguggcugguacugcgacaacgccgggagcgucucguuuuucccacaggcugaaacguguaaggugcagucuaauagaguguuuugcgauaccaugaacucccuaacacugcccucagagguuaaucucugcaacauagacauuuucaauccuaaauaugauuguaagaucaugacaaguaaaaccgacgucagcuccucugugaucacaagccugggagccauuguaucaugcuacgguaagacuaaauguaccgcaaguaacaagaauaggggcaucauuaagacauuuuccaacgggugcgauuauguuagcaauaaaggaguggacaccgucucugugggcaacacucuuuacugugucaacaagcaagagggucagucacuguaugugaaaggggaaccaauaaucaauuucuacgacccguugguuuuucccagugaugaguucgacgcuagcauuucccaggugaacgaaaagaucaaucagucucucgccuuuauccggaaaucggaugagcuguuacacaacguaaaugucggaaagagcacgacaaacauuaugauaaccacuaucauuaucgugauuaucguuauacugcuacuccugaucgcggugggccuuuucuuguauugcaaggcccgcugaggacuaguacuggcugcaucucccuuuccucuguccuccauccuucucccaggauggugaagggggaccugguacccagugauccccaccccaggauccuaaaucaugacuuaccugcuaauaaaaacucauuggaaaagugagaagaucuaaaaaaaaaaaaaaaaaaaaaaaaaaaaaaaaaaaaaaaaaaaaaaaaaaaaaaaaaaaaaaaaugcaucccccccccccccccccccccccccccccccaaaggcucuuuucagagccaccagaauu

SEQ ID NO: 14642 - RNA, 1998 nt, Artificial Sequence
  mRNA product Design h-5 comprising derived and/or modified sequence from HRSV(Memphis-37)__AIY60640.1__F-del_DSCav1_mut1 (opt4)
gggagagggcgcuuggcuugcaaggacccugagcugcggcauugaagcacacccaacccaacucgacugaagucagccucacugaaccggaucugagaaucuucucucucugggcuugccagggcucuccgaaccuagcuagcauccucuucaauuccaacuagaaagcuuaccauggagcugcccauccugaagaccaacgccaucaccaccauccuggccgccgugacccugugcuucgccagcagccagaacaucaccgaggaguucuaccagagcaccugcagcgccgugagcaagggcuaccugggcgcccugagaaccggcugguacaccagcgugaucaccaucgagcugagcaacaucaaggagaacaagugcaacggcaccgacgccaaggugaagcugaucaagcaggagcuggacaaguacaagaacgccgugaccgagcugcagcugcugaugcagagcacccccgccgccggcagcggcagcgccaucugcagcggcaucgccgugugcaaggugcugcaccuggagggcgaggugaacaagaucaagaacgcccugcugagcaccaacaaggccguggugagccugagcaacggcgugagcgugcugaccuucaaggugcuggaccugaagaacuacaucgacaagcagcugcugcccauccugaacaagcagagcugcagcauccccaacaucgagaccgugaucgaguuccagcagaagaacaacagacugcuggagaucaccagagaguucagcgugaacgccggcgugaccacccccgugagcaccuacaugcugaccaacagcgagcugcugagccugaucaacgacaugcccaucaccaacgaccagaagaagcugaugagcaacaacgugcagaucgugagacagcagagcuacagcaucaugugcaucaucaaggaggaggugcuggccuacguggugcagcugccccuguacggcgugaucgacacccccugcuggaagcugcacaccagcccccugugcaccaccaacaccaaggagggcagcaacaucugccugaccagaaccgacagaggcugguacugcgacaacgccggcagcgugagcuucuucccccaggccgagaccugcaaggugcagagcaacagaguguucugcgacaccaugaacagccugacccugcccagcgaggugaaccugugcaacaucgacaucuucaaccccaaguacgacugcaagaucaugaccagcaagaccgacgugagcagcagcgugaucaccagccugggcgccaucgugagcugcuacggcaagaccaagugcaccgccagcaacaagaacagaggcaucaucaagaccuucagcaacggcugcgacuacgugagcaacaagggcguggacaccgugagcgugggcaacacccuguacugcgugaacaagcaggagggccagagccuguacgugaagggcgagcccaucaucaacuucuacgacccccugguguuccccagcgacgaguucgacgccagcaucagccaggugaacgagaagaucaaccagagccuggccuucaucagaaagagcgacgagcugcugcacaacgugaacgugggcaagagcaccaccaacaucaugaucaccaccaucaucaucgugaucaucgugauccugcugcugcugaucgccgugggccuguuccuguacugcaaggccagaugaggacuaguacuggcugcaucucccuuuccucuguccuccauccuucucccaggauggugaagggggaccugguacccagugauccccaccccaggauccuaaaucaugacuuaccugcuaauaaaaacucauuggaaaagugagaagaucuaaaaaaaaaaaaaaaaaaaaaaaaaaaaaaaaaaaaaaaaaaaaaaaaaaaaaaaaaaaaaaaaugcaucccccccccccccccccccccccccccccccaaaggcucuuuucagagccaccagaauu

SEQ ID NO: 14643 - RNA, 1998 nt, Artificial Sequence
  mRNA product Design h-5 comprising derived and/or modified sequence from HRSV(Memphis-37)__AIY60640.1__F-del_DSCav1_mut1 (opt5)
gggagagggcgcuuggcuugcaaggacccugagcugcggcauugaagcacacccaacccaacucgacugaagucagccucacugaaccggaucugagaaucuucucucucugggcuugccagggcucuccgaaccuagcuagcauccucuucaauuccaacuagaaagcuuaccauggagcugcccauccucaagaccaacgccauuacaacgauccuggcugccgugacccuuugcuucgcgagcucccagaauauuacagaagaguuuuaccaaucuaccuguagcgcugucuccaaaggcuaucugggggcccucagaacaggaugguacaccucuguuaucacaauugaacugagcaacaucaaggagaauaaaugcaacggcaccgacgccaaggugaaacuuaucaagcaggaacuggauaaguauaaaaaugcugugacggagcuccagcugcugaugcaguccaccccugccgcugggucuggaagcgccauuuguuccggcaucgcggucugcaaggugcuccaccuggagggggaaguuaacaaaauuaagaaugcccuucugagcacaaacaaagcuguggucucucucuccaauggagugagcguucugaccuucaaggugcuugaccugaagaacuacaucgauaaacaacuccugccgauucugaauaagcagucuuguuccauccccaacauugagacagucaucgaauuucagcagaaaaauaaccggcuccuggagaucacccgcgaguucagcgugaaugccggcgugacgacaccugucucuaccuauaugcuuacaaacuccgaacugcucagccugauuaacgacaugcccaucaccaaugaucaaaagaaacuuauguccaacaauguucagauugugagacagcagucuuacagcaucaugugcauuaucaaggaggaagugcuggcuuaugucgugcaacucccucuguacggcguuaucgacacccccuguuggaaacugcauacauccccucucugcacgaccaacacaaaggaggggagcaauauuugucugacccggacagaucgcggaugguacugcgacaacgccggcucuguguccuuuuucccgcaggcggaaaccuguaagguccagagcaauagaguguuuugcgauacgaugaacucucuuacacugcccagcgagguuaaucucugcaacaucgacauuuucaauccuaaauaugauuguaagaucaugaccuccaaaaccgacgugucuagcuccgucauuacaagccugggggccaucgugucuugcuacggaaagaccaaauguacagcuuccaacaagaaucggggcaucauuaagacguuuagcaacgggugcgauuaugucucuaauaaaggaguggacaccguuuccgugggcaacacacuuuacugugucaacaagcaagagggccagagccuguaugugaaaggggaacccaucauuaauuucuacgacccucucguuuuucccuccgaugaguucgacgccucuaucagccaggugaacgaaaagauuaaucagucccuggcuuuuauccgcaaaucugaugagcugcuccacaacgucaaugugggaaagagcaccacaaacauuaugaucaccacgaucauuaucgugauuaucguuauucugcuucugcucaucgccgucggccuguuccuguauugcaaggccagaugaggacuaguacuggcugcaucucccuuuccucuguccuccauccuucucccaggauggugaagggggaccugguacccagugauccccaccccaggauccuaaaucaugacuuaccugcuaauaaaaacucauuggaaaagugagaagaucuaaaaaaaaaaaaaaaaaaaaaaaaaaaaaaaaaaaaaaaaaaaaaaaaaaaaaaaaaaaaaaaaugcaucccccccccccccccccccccccccccccccaaaggcucuuuucagagccaccagaauu

SEQ ID NO: 14644 - RNA, 1998 nt, Artificial Sequence
  mRNA product Design h-5 comprising derived and/or modified sequence from HRSV(Memphis-37)__AIY60640.1__F-del_DSCav1_mut1 (opt6)
gggagagggcgcuuggcuugcaaggacccugagcugcggcauugaagcacacccaacccaacucgacugaagucagccucacugaaccggaucugagaaucuucucucucugggcuugccagggcucuccgaaccuagcuagcauccucuucaauuccaacuagaaagcuuaccauggaauuaccaauacuaaaaacaaacgcaauaacaacaauucuagcagcaguaacauuaugcuuugcaucaucccaaaacaucacagaagaauuuuaucaaucaaccugcucagcaguuuccaaaggauacuuaggagcauuaagaacugguugguacacuucaguaaucaccaucgaacucucaaacaucaaggaaaacaaaugcaacggaacagacgcaaaaguuaaacucauaaaacaagaacuugacaaauacaaaaacgccguaacagaacuacaacuucucaugcaaucaacacccgcagcaggauccggaucagccauaugcucaggcauagcaguauguaaaguauuacaucuugaaggugaaguaaacaaaauaaaaaacgcacuucuaucaaccaacaaagcaguaguaucacuaucaaacggaguauccgucuuaacauuuaaaguucuagaccucaaaaacuauauagacaaacaauuacugccaauccucaauaaacaaucaugcucaauaccaaacaucgaaacaguaauagaauuucaacaaaaaaacaacagacuacuagaaauaacaagagaauuuuccgucaacgccggcguaacuacuccaguaucaacauauaugcuaaccaacucagaacuccuaucccucauaaacgacaugccaauaacuaaugaucaaaaaaaacuaaugucaaacaauguacaaauaguuagacaacaaucauacucaaucaugugcauaauaaaagaagaaguacuagcauacgucguccaacuaccccuauacggaguaauagacacaccuugcuggaaacuacacacaucaccccuaugcacaacaaauacaaaagaagguuccaacaucugccuaacaagaacugauagaggaugguacugcgacaacgccggaucaguaucauucuucccucaagcugaaaccugcaaaguacaaucaaacagaguauuuugcgauacaaugaacucccuaacacuucccucagaaguuaaucuuuguaauauagauauauucaacccaaaauacgacugcaaaauaaugacaaguaaaacagacguauccucaucuguaauuacaucacuaggagccauaguaucuugcuacggcaaaaccaaaugcacagcaucaaacaaaaacagagguauuaucaaaaccuucucaaacggaugugacuacguuucaaacaaaggaguagacacaguaucagucggaaacacccuauacuguguuaacaaacaagaaggacaaucacuguacguaaaaggagaacccauaauaaauuucuacgacccacuuguauuuccaucagacgaauuugaugcaucaaucucacaaguaaaugaaaaaauaaaccaaucauuagcauucauaagaaaaucugacgaguuacuacacaacguaaauguuggcaaaucaacaaccaauauaaugauaacaacaauaauaauaguaauaauagucauauuacuccuccucauagccgucggauuauucuuauacugcaaagcaagauaaggacuaguacuggcugcaucucccuuuccucuguccuccauccuucucccaggauggugaagggggaccugguacccagugauccccaccccaggauccuaaaucaugacuuaccugcuaauaaaaacucauuggaaaagugagaagaucuaaaaaaaaaaaaaaaaaaaaaaaaaaaaaaaaaaaaaaaaaaaaaaaaaaaaaaaaaaaaaaaaugcaucccccccccccccccccccccccccccccccaaaggcucuuuucagagccaccagaauu

SEQ ID NO: 14645 - RNA, 1998 nt, Artificial Sequence
  mRNA product Design h-5 comprising derived and/or modified sequence from HRSV(Memphis-37)__AIY60640.1__F-del_DSCav1_mut1 (opt11)
gggagagggcgcuuggcuugcaaggacccugagcugcggcauugaagcacacccaacccaacucgacugaagucagccucacugaaccggaucugagaaucuucucucucugggcuugccagggcucuccgaaccuagcuagcauccucuucaauuccaacuagaaagcuuaccauggaacuccccauacuaaaaaccaacgccaucacaacaauccucgccgccgucacacucugcuucgccagcucccaaaacaucaccgaagaguucuaucaaucaaccugcuccgcagucucaaagggauaccucggagcccuccgcaccggaugguacacuuccgucaucacaauagaacucuccaacaucaaagaaaacaaaugcaacggcaccgacgcaaaagucaagcucaucaaacaagaacucgacaaauauaaaaacgccgucaccgaacuccaacuacucaugcaauccacacccgcggccggcucaggcagcgccaucugcucaggcaucgccgucugcaaaguccuccaccucgaaggcgaagucaacaaaaucaaaaacgcccuucuuucaaccaacaaggcaguaguaucccucucaaacggcgucagcguccugaccuucaaaguccuagaccucaaaaacuacauagauaaacaacuccuccccauacugaacaaacaaucgugcuccauccccaauaucgaaaccgucauagaguuccagcagaaaaacaacagacuucucgaaauaacccgagaguucucaguaaacgccggagucaccacacccguaagcaccuacaugcucacaaacucagaacuccuaucccucaucaacgacaugcccaucaccaacgaccagaaaaagcuaauguccaacaacguccaaauaguacgccaacaaagcuacucgauaaugugcaucaucaaggaagaaguacucgccuacgucguccaacucccccucuacggcguaaucgacacacccugcuggaaacuccacacguccccacucugcacaacaaacacaaaagaaggauccaacauaugccuaacccgcaccgacaggggcugguacugcgacaacgcaggcucagucagcuucuuuccccaagccgaaacaugcaaaguccaauccaaccgugucuucugcgacaccaugaacucgcucacccuacccucggaagucaaucucugcaacaucgacaucuucaacccaaaauacgacuguaaaaucaugaccagcaaaacagacguuucuuccagcgucaucacaucacucggcgcgaucguaucaugcuauggcaaaacaaagugcaccgcuagcaauaaaaaccgaggaaucauaaaaaccuucagcaacggcugcgacuacguauccaacaaaggcgucgacaccguauccgucggaaacacccucuacugcgucaacaagcaagaaggacaaucacucuacgucaaaggcgaaccaaucauaaacuucuacgacccacucguauuccccucagacgaguucgacgcauccaucucccaagucaacgaaaagaucaaccaaucucucgccuuuauacgcaaaagcgacgaacuccuucacaacguaaacgucggcaaaagcaccacuaacauaaugaucaccacaaucauaauaguaaucaucguaauacuccuccuacucaucgccgugggccuauuccucuauugcaaagcccgauaaggacuaguacuggcugcaucucccuuuccucuguccuccauccuucucccaggauggugaagggggaccugguacccagugauccccaccccaggauccuaaaucaugacuuaccugcuaauaaaaacucauuggaaaagugagaagaucuaaaaaaaaaaaaaaaaaaaaaaaaaaaaaaaaaaaaaaaaaaaaaaaaaaaaaaaaaaaaaaaaugcaucccccccccccccccccccccccccccccccaaaggcucuuuucagagccaccagaauu

SEQ ID NO: 14646 - RNA, 1931 nt, Artificial Sequence
  mRNA product Design i-1 comprising derived and/or modified sequence from HRSV(Memphis-37)__AIY60640.1__F-del_DSCav1_mut1 (opt1)
gggagagggcgcuuggcuugcaaggacccugagcugcggcauugaagcacacccaacccaacucgacugaagucagccucacugaaccggaucugagaaucuucucucucugggcuugccagggcucuccgaaccuagcuagcauccucuucaauuccaacuagaaagcuuaccauggagcugcccauccucaagaccaacgccaucaccacgauccuggccgcggugacccugugcuucgccagcucccagaacaucaccgaggaguucuaccagagcacgugcuccgccgucagcaagggcuaccucggcgcccugcgcaccgggugguacaccagcgugaucaccaucgagcuguccaacaucaaggagaacaagugcaacggcaccgacgccaaggugaagcucaucaagcaggagcuggacaaguacaagaacgcggucacggagcugcagcuccugaugcagagcaccccggccgccggcuccgggagcgcgaucugcuccggcaucgccgucugcaaggugcugcaccucgagggcgaggugaacaagaucaagaacgcccugcuguccaccaacaaggccgucgugagccucuccaacggggugagcguccugaccuucaaggugcuggaccucaagaacuacaucgacaagcagcugcugcccauccugaacaagcagagcugcuccauccccaacaucgagaccgucaucgaguuccagcagaagaacaaccgccuccuggagaucacgcgggaguucagcgugaacgcgggcgugaccacccccgucuccaccuacaugcugacgaacagcgagcuccugucccugaucaacgacaugccgaucaccaacgaccagaagaagcucaugagcaacaacgugcagaucgugcgccagcaguccuacagcaucaugugcaucaucaaggaggagguccuggccuacguggugcagcugccccucuacggggucaucgacacccccugcuggaagcugcacaccagcccccugugcacgaccaacaccaaggagggcuccaacaucugccucacccggacggaccgcgggugguacugcgacaacgccggcagcguguccuucuucccgcaggccgagaccugcaagguccagagcaaccggguguucugcgacaccaugaacucccugacccugcccagcgaggugaaccucugcaacaucgacaucuucaaccccaaguacgacugcaagaucaugacguccaagaccgacgucagcuccagcgugaucaccucccugggcgccaucgugagcugcuacgggaagaccaagugcacggcgagcaacaagaaccgcggcaucaucaagaccuucuccaacgggugcgacuacgucagcaacaagggcguggacaccguguccgucggcaacacccuguacugcgugaacaagcaggagggccagagccucuacgugaagggggagcccaucaucaacuucuacgacccgcuggucuuccccuccgacgaguucgacgccagcaucucccaggugaacgagaagaucaaccagagccuggccuucauccggaaguccgacgagcuccugcacaacgugaacgucggcaagagcaccacgaacaucaugaucaccaccaucaucaucgugaucaucgugauccugcugcuccugaucgccgucgggcuguuccucuacugcaaggcccgcugaggacuaguguccaccugucccuccugggcugcuggauugucucguuuuccugccaaauaaacaggaucagcgcuuuacagaucuaaaaaaaaaaaaaaaaaaaaaaaaaaaaaaaaaaaaaaaaaaaaaaaaaaaaaaaaaaaaaaaaugcaucccccccccccccccccccccccccccccccaaaggcucuuuucagagccaccagaauu

SEQ ID NO: 14647 - RNA, 1931 nt, Artificial Sequence
  mRNA product Design i-1 comprising derived and/or modified sequence from HRSV(Memphis-37)__AIY60640.1__F-del_DSCav1_mut1 (opt1)
gggagagggcgcuuggcuugcaaggacccugagcugcggcauugaagcacacccaacccaacucgacugaagucagccucacugaaccggaucugagaaucuucucucucugggcuugccagggcucuccgaaccuagcuagcauccucuucaauuccaacuagaaagcuuaccauggagcugcccauccucaagaccaacgccaucaccacgauccuggccgcggugacccugugcuucgccagcucccagaacaucaccgaggaguucuaccagagcacgugcuccgccgucagcaagggcuaccucggggcccugcgcaccggcugguacaccuccgugaucaccaucgagcugagcaacaucaaggagaacaagugcaacgggaccgacgccaaggugaagcucaucaagcaggagcuggacaaguacaagaacgcggucacggagcugcagcuccugaugcaguccaccccggccgccggcagcggguccgccaucugcagcggcaucgcggugugcaaggugcugcaccucgagggcgaggucaacaagaucaagaacgcccugcuguccaccaacaaggccguggugagccucuccaacggggucagcgugcugaccuucaaggugcuggaccucaagaacuacaucgacaagcagcugcugcccauccucaacaagcaguccugcagcauccccaacaucgagacggucaucgaguuccagcagaagaacaaccggcugcuggagaucacccgcgaguucuccgugaacgccggcgugaccacccccgucagcacguacaugcucaccaacuccgagcugcugagccucaucaacgacaugccgaucaccaacgaccagaagaagcugaugagcaacaacgugcagaucgugcggcagcaguccuacagcaucaugugcaucaucaaggaggagguccuggccuacguggugcagcucccccuguacggggucaucgacacccccugcuggaagcugcacacgagcccccucugcaccaccaacaccaaggagggcuccaacaucugccugacgcgcaccgaccgggggugguacugcgacaacgcgggcuccgugagcuucuucccgcaggccgagaccugcaaggugcaguccaaccgcgucuucugcgacaccaugaacagccugacgcuccccuccgaggugaaccugugcaacaucgacaucuucaaccccaaguacgacugcaagaucaugaccagcaagaccgacgucuccagcuccgugaucaccagccugggcgccaucguguccugcuacgggaagacgaagugcaccgccagcaacaagaaccggggcaucaucaagaccuucuccaacgggugcgacuacgucagcaacaagggcguggacaccguguccgucggcaacacgcucuacugcgugaacaagcaggaggggcagagccuguacgugaagggcgagcccaucaucaacuucuacgacccgcuggucuuccccagcgacgaguucgacgccuccaucagccaggugaacgagaagaucaaccagucccucgcguucauccgcaagagcgacgagcugcugcacaacgugaacgucgggaaguccaccaccaacaucaugaucaccaccaucaucaucgugaucaucgugauccuccugcugcucaucgccgucggccuguuccuguacugcaaggcccggugaggacuaguguccaccugucccuccugggcugcuggauugucucguuuuccugccaaauaaacaggaucagcgcuuuacagaucuaaaaaaaaaaaaaaaaaaaaaaaaaaaaaaaaaaaaaaaaaaaaaaaaaaaaaaaaaaaaaaaaugcaucccccccccccccccccccccccccccccccaaaggcucuuuucagagccaccagaauu

SEQ ID NO: 14648 - RNA, 1931 nt, Artificial Sequence
  mRNA product Design i-1 comprising derived and/or modified sequence from HRSV(Memphis-37)__AIY60640.1__F-del_DSCav1_mut1 (opt2)
gggagagggcgcuuggcuugcaaggacccugagcugcggcauugaagcacacccaacccaacucgacugaagucagccucacugaaccggaucugagaaucuucucucucugggcuugccagggcucuccgaaccuagcuagcauccucuucaauuccaacuagaaagcuuaccauggagcuccccauccucaagaccaacgccaucaccaccauccucgccgccgucacccucugcuucgccuccucccagaacaucaccgaggaguucuaccaguccaccugcuccgccgucuccaagggcuaccucggcgcccuccgcaccggcugguacaccuccgucaucaccaucgagcucuccaacaucaaggagaacaagugcaacggcaccgacgccaaggucaagcucaucaagcaggagcucgacaaguacaagaacgccgucaccgagcuccagcuccucaugcaguccacccccgccgccggcuccggcuccgccaucugcuccggcaucgccgucugcaagguccuccaccucgagggcgaggucaacaagaucaagaacgcccuccucuccaccaacaaggccgucgucucccucuccaacggcgucuccguccucaccuucaagguccucgaccucaagaacuacaucgacaagcagcuccuccccauccucaacaagcaguccugcuccauccccaacaucgagaccgucaucgaguuccagcagaagaacaaccgccuccucgagaucacccgcgaguucuccgucaacgccggcgucaccacccccgucuccaccuacaugcucaccaacuccgagcuccucucccucaucaacgacaugcccaucaccaacgaccagaagaagcucauguccaacaacguccagaucguccgccagcaguccuacuccaucaugugcaucaucaaggaggagguccucgccuacgucguccagcucccccucuacggcgucaucgacacccccugcuggaagcuccacaccuccccccucugcaccaccaacaccaaggagggcuccaacaucugccucacccgcaccgaccgcggcugguacugcgacaacgccggcuccgucuccuucuucccccaggccgagaccugcaagguccaguccaaccgcgucuucugcgacaccaugaacucccucacccuccccuccgaggucaaccucugcaacaucgacaucuucaaccccaaguacgacugcaagaucaugaccuccaagaccgacgucuccuccuccgucaucaccucccucggcgccaucgucuccugcuacggcaagaccaagugcaccgccuccaacaagaaccgcggcaucaucaagaccuucuccaacggcugcgacuacgucuccaacaagggcgucgacaccgucuccgucggcaacacccucuacugcgucaacaagcaggagggccagucccucuacgucaagggcgagcccaucaucaacuucuacgacccccucgucuuccccuccgacgaguucgacgccuccaucucccaggucaacgagaagaucaaccagucccucgccuucauccgcaaguccgacgagcuccuccacaacgucaacgucggcaaguccaccaccaacaucaugaucaccaccaucaucaucgucaucaucgucauccuccuccuccucaucgccgucggccucuuccucuacugcaaggcccgcugaggacuaguguccaccugucccuccugggcugcuggauugucucguuuuccugccaaauaaacaggaucagcgcuuuacagaucuaaaaaaaaaaaaaaaaaaaaaaaaaaaaaaaaaaaaaaaaaaaaaaaaaaaaaaaaaaaaaaaaugcaucccccccccccccccccccccccccccccccaaaggcucuuuucagagccaccagaauu

SEQ ID NO: 14649 - RNA, 1931 nt, Artificial Sequence
  mRNA product Design i-1 comprising derived and/or modified sequence from HRSV(Memphis-37)__AIY60640.1__F-del_DSCav1_mut1 (opt3)
gggagagggcgcuuggcuugcaaggacccugagcugcggcauugaagcacacccaacccaacucgacugaagucagccucacugaaccggaucugagaaucuucucucucugggcuugccagggcucuccgaaccuagcuagcauccucuucaauuccaacuagaaagcuuaccauggagcugcccauccucaagaccaacgccauuacaacuauacuugcugcagugacgcugugcuucgccagcucccagaauaucaccgaagaguuuuaccaaucuacauguucagcggucaguaaaggcuauuugggggcuuuaagaacuggaugguacaccagcguuauuacaaucgaacuguccaacauuaaggagaauaaaugcaacgguaccgacgccaaggugaaacuaaucaagcaggaacucgauaaguauaaaaaugcaguaacugagcugcagcuucugaugcagucuacuccugccgcuggcucggggucagcaauauguagcggaaucgccgugugcaaggucuugcaccucgagggcgaagugaacaaaauuaagaaugcucugcugaguaccaacaaagccguugugucccucucuaauggugucagcguguuaacguucaagguacuggaccuuaagaacuacaucgauaaacaauugcugccaauucuaaauaagcaguccuguucaaucccgaacauagagacuguuauugaauuucagcagaaaaauaacaggcuccuggagaucacccgggaguucagugugaaugcgggggucacaacucccgugagcaccuauaugcuuacaaacucugaacuguugucccucauuaacgacaugccuaucaccaaugaucaaaagaaacugaugucaaacaaugugcagaucguccgccagcagagcuacaguauuaugugcauaaucaaggaggaaguuuuagcauaugugguacaacugccacucuacggagugauugacacgcccuguuggaaacuucauacuucuccucugugcacaaccaacacuaaggagggcuccaauaucuguuugacacgaaccgaucguggcugguacugcgacaacgccgggagcgucucguuuuucccacaggcugaaacguguaaggugcagucuaauagaguguuuugcgauaccaugaacucccuaacacugcccucagagguuaaucucugcaacauagacauuuucaauccuaaauaugauuguaagaucaugacaaguaaaaccgacgucagcuccucugugaucacaagccugggagccauuguaucaugcuacgguaagacuaaauguaccgcaaguaacaagaauaggggcaucauuaagacauuuuccaacgggugcgauuauguuagcaauaaaggaguggacaccgucucugugggcaacacucuuuacugugucaacaagcaagagggucagucacuguaugugaaaggggaaccaauaaucaauuucuacgacccguugguuuuucccagugaugaguucgacgcuagcauuucccaggugaacgaaaagaucaaucagucucucgccuuuauccggaaaucggaugagcuguuacacaacguaaaugucggaaagagcacgacaaacauuaugauaaccacuaucauuaucgugauuaucguuauacugcuacuccugaucgcggugggccuuuucuuguauugcaaggcccgcugaggacuaguguccaccugucccuccugggcugcuggauugucucguuuuccugccaaauaaacaggaucagcgcuuuacagaucuaaaaaaaaaaaaaaaaaaaaaaaaaaaaaaaaaaaaaaaaaaaaaaaaaaaaaaaaaaaaaaaaugcaucccccccccccccccccccccccccccccccaaaggcucuuuucagagccaccagaauu

SEQ ID NO: 14650 - RNA, 1931 nt, Artificial Sequence
  mRNA product Design i-1 comprising derived and/or modified sequence from HRSV(Memphis-37)__AIY60640.1__F-del_DSCav1_mut1 (opt4)
gggagagggcgcuuggcuugcaaggacccugagcugcggcauugaagcacacccaacccaacucgacugaagucagccucacugaaccggaucugagaaucuucucucucugggcuugccagggcucuccgaaccuagcuagcauccucuucaauuccaacuagaaagcuuaccauggagcugcccauccugaagaccaacgccaucaccaccauccuggccgccgugacccugugcuucgccagcagccagaacaucaccgaggaguucuaccagagcaccugcagcgccgugagcaagggcuaccugggcgcccugagaaccggcugguacaccagcgugaucaccaucgagcugagcaacaucaaggagaacaagugcaacggcaccgacgccaaggugaagcugaucaagcaggagcuggacaaguacaagaacgccgugaccgagcugcagcugcugaugcagagcacccccgccgccggcagcggcagcgccaucugcagcggcaucgccgugugcaaggugcugcaccuggagggcgaggugaacaagaucaagaacgcccugcugagcaccaacaaggccguggugagccugagcaacggcgugagcgugcugaccuucaaggugcuggaccugaagaacuacaucgacaagcagcugcugcccauccugaacaagcagagcugcagcauccccaacaucgagaccgugaucgaguuccagcagaagaacaacagacugcuggagaucaccagagaguucagcgugaacgccggcgugaccacccccgugagcaccuacaugcugaccaacagcgagcugcugagccugaucaacgacaugcccaucaccaacgaccagaagaagcugaugagcaacaacgugcagaucgugagacagcagagcuacagcaucaugugcaucaucaaggaggaggugcuggccuacguggugcagcugccccuguacggcgugaucgacacccccugcuggaagcugcacaccagcccccugugcaccaccaacaccaaggagggcagcaacaucugccugaccagaaccgacagaggcugguacugcgacaacgccggcagcgugagcuucuucccccaggccgagaccugcaaggugcagagcaacagaguguucugcgacaccaugaacagccugacccugcccagcgaggugaaccugugcaacaucgacaucuucaaccccaaguacgacugcaagaucaugaccagcaagaccgacgugagcagcagcgugaucaccagccugggcgccaucgugagcugcuacggcaagaccaagugcaccgccagcaacaagaacagaggcaucaucaagaccuucagcaacggcugcgacuacgugagcaacaagggcguggacaccgugagcgugggcaacacccuguacugcgugaacaagcaggagggccagagccuguacgugaagggcgagcccaucaucaacuucuacgacccccugguguuccccagcgacgaguucgacgccagcaucagccaggugaacgagaagaucaaccagagccuggccuucaucagaaagagcgacgagcugcugcacaacgugaacgugggcaagagcaccaccaacaucaugaucaccaccaucaucaucgugaucaucgugauccugcugcugcugaucgccgugggccuguuccuguacugcaaggccagaugaggacuaguguccaccugucccuccugggcugcuggauugucucguuuuccugccaaauaaacaggaucagcgcuuuacagaucuaaaaaaaaaaaaaaaaaaaaaaaaaaaaaaaaaaaaaaaaaaaaaaaaaaaaaaaaaaaaaaaaugcaucccccccccccccccccccccccccccccccaaaggcucuuuucagagccaccagaauu

SEQ ID NO: 14651 - RNA, 1931 nt, Artificial Sequence
  mRNA product Design i-1 comprising derived and/or modified sequence from HRSV(Memphis-37)__AIY60640.1__F-del_DSCav1_mut1 (opt5)
gggagagggcgcuuggcuugcaaggacccugagcugcggcauugaagcacacccaacccaacucgacugaagucagccucacugaaccggaucugagaaucuucucucucugggcuugccagggcucuccgaaccuagcuagcauccucuucaauuccaacuagaaagcuuaccauggagcugcccauccucaagaccaacgccauuacaacgauccuggcugccgugacccuuugcuucgcgagcucccagaauauuacagaagaguuuuaccaaucuaccuguagcgcugucuccaaaggcuaucugggggcccucagaacaggaugguacaccucuguuaucacaauugaacugagcaacaucaaggagaauaaaugcaacggcaccgacgccaaggugaaacuuaucaagcaggaacuggauaaguauaaaaaugcugugacggagcuccagcugcugaugcaguccaccccugccgcugggucuggaagcgccauuuguuccggcaucgcggucugcaaggugcuccaccuggagggggaaguuaacaaaauuaagaaugcccuucugagcacaaacaaagcuguggucucucucuccaauggagugagcguucugaccuucaaggugcuugaccugaagaacuacaucgauaaacaacuccugccgauucugaauaagcagucuuguuccauccccaacauugagacagucaucgaauuucagcagaaaaauaaccggcuccuggagaucacccgcgaguucagcgugaaugccggcgugacgacaccugucucuaccuauaugcuuacaaacuccgaacugcucagccugauuaacgacaugcccaucaccaaugaucaaaagaaacuuauguccaacaauguucagauugugagacagcagucuuacagcaucaugugcauuaucaaggaggaagugcuggcuuaugucgugcaacucccucuguacggcguuaucgacacccccuguuggaaacugcauacauccccucucugcacgaccaacacaaaggaggggagcaauauuugucugacccggacagaucgcggaugguacugcgacaacgccggcucuguguccuuuuucccgcaggcggaaaccuguaagguccagagcaauagaguguuuugcgauacgaugaacucucuuacacugcccagcgagguuaaucucugcaacaucgacauuuucaauccuaaauaugauuguaagaucaugaccuccaaaaccgacgugucuagcuccgucauuacaagccugggggccaucgugucuugcuacggaaagaccaaauguacagcuuccaacaagaaucggggcaucauuaagacguuuagcaacgggugcgauuaugucucuaauaaaggaguggacaccguuuccgugggcaacacacuuuacugugucaacaagcaagagggccagagccuguaugugaaaggggaacccaucauuaauuucuacgacccucucguuuuucccuccgaugaguucgacgccucuaucagccaggugaacgaaaagauuaaucagucccuggcuuuuauccgcaaaucugaugagcugcuccacaacgucaaugugggaaagagcaccacaaacauuaugaucaccacgaucauuaucgugauuaucguuauucugcuucugcucaucgccgucggccuguuccuguauugcaaggccagaugaggacuaguguccaccugucccuccugggcugcuggauugucucguuuuccugccaaauaaacaggaucagcgcuuuacagaucuaaaaaaaaaaaaaaaaaaaaaaaaaaaaaaaaaaaaaaaaaaaaaaaaaaaaaaaaaaaaaaaaugcaucccccccccccccccccccccccccccccccaaaggcucuuuucagagccaccagaauu

SEQ ID NO: 14652 - RNA, 1931 nt, Artificial Sequence
  mRNA product Design i-1 comprising derived and/or modified sequence from HRSV(Memphis-37)__AIY60640.1__F-del_DSCav1_mut1 (opt6)
gggagagggcgcuuggcuugcaaggacccugagcugcggcauugaagcacacccaacccaacucgacugaagucagccucacugaaccggaucugagaaucuucucucucugggcuugccagggcucuccgaaccuagcuagcauccucuucaauuccaacuagaaagcuuaccauggaauuaccaauacuaaaaacaaacgcaauaacaacaauucuagcagcaguaacauuaugcuuugcaucaucccaaaacaucacagaagaauuuuaucaaucaaccugcucagcaguuuccaaaggauacuuaggagcauuaagaacugguugguacacuucaguaaucaccaucgaacucucaaacaucaaggaaaacaaaugcaacggaacagacgcaaaaguuaaacucauaaaacaagaacuugacaaauacaaaaacgccguaacagaacuacaacuucucaugcaaucaacacccgcagcaggauccggaucagccauaugcucaggcauagcaguauguaaaguauuacaucuugaaggugaaguaaacaaaauaaaaaacgcacuucuaucaaccaacaaagcaguaguaucacuaucaaacggaguauccgucuuaacauuuaaaguucuagaccucaaaaacuauauagacaaacaauuacugccaauccucaauaaacaaucaugcucaauaccaaacaucgaaacaguaauagaauuucaacaaaaaaacaacagacuacuagaaauaacaagagaauuuuccgucaacgccggcguaacuacuccaguaucaacauauaugcuaaccaacucagaacuccuaucccucauaaacgacaugccaauaacuaaugaucaaaaaaaacuaaugucaaacaauguacaaauaguuagacaacaaucauacucaaucaugugcauaauaaaagaagaaguacuagcauacgucguccaacuaccccuauacggaguaauagacacaccuugcuggaaacuacacacaucaccccuaugcacaacaaauacaaaagaagguuccaacaucugccuaacaagaacugauagaggaugguacugcgacaacgccggaucaguaucauucuucccucaagcugaaaccugcaaaguacaaucaaacagaguauuuugcgauacaaugaacucccuaacacuucccucagaaguuaaucuuuguaauauagauauauucaacccaaaauacgacugcaaaauaaugacaaguaaaacagacguauccucaucuguaauuacaucacuaggagccauaguaucuugcuacggcaaaaccaaaugcacagcaucaaacaaaaacagagguauuaucaaaaccuucucaaacggaugugacuacguuucaaacaaaggaguagacacaguaucagucggaaacacccuauacuguguuaacaaacaagaaggacaaucacuguacguaaaaggagaacccauaauaaauuucuacgacccacuuguauuuccaucagacgaauuugaugcaucaaucucacaaguaaaugaaaaaauaaaccaaucauuagcauucauaagaaaaucugacgaguuacuacacaacguaaauguuggcaaaucaacaaccaauauaaugauaacaacaauaauaauaguaauaauagucauauuacuccuccucauagccgucggauuauucuuauacugcaaagcaagauaaggacuaguguccaccugucccuccugggcugcuggauugucucguuuuccugccaaauaaacaggaucagcgcuuuacagaucuaaaaaaaaaaaaaaaaaaaaaaaaaaaaaaaaaaaaaaaaaaaaaaaaaaaaaaaaaaaaaaaaugcaucccccccccccccccccccccccccccccccaaaggcucuuuucagagccaccagaauu

SEQ ID NO: 14653 - RNA, 1931 nt, Artificial Sequence
  mRNA product Design i-1 comprising derived and/or modified sequence from HRSV(Memphis-37)__AIY60640.1__F-del_DSCav1_mut1 (opt11)
gggagagggcgcuuggcuugcaaggacccugagcugcggcauugaagcacacccaacccaacucgacugaagucagccucacugaaccggaucugagaaucuucucucucugggcuugccagggcucuccgaaccuagcuagcauccucuucaauuccaacuagaaagcuuaccauggaacuccccauacuaaaaaccaacgccaucacaacaauccucgccgccgucacacucugcuucgccagcucccaaaacaucaccgaagaguucuaucaaucaaccugcuccgcagucucaaagggauaccucggagcccuccgcaccggaugguacacuuccgucaucacaauagaacucuccaacaucaaagaaaacaaaugcaacggcaccgacgcaaaagucaagcucaucaaacaagaacucgacaaauauaaaaacgccgucaccgaacuccaacuacucaugcaauccacacccgcggccggcucaggcagcgccaucugcucaggcaucgccgucugcaaaguccuccaccucgaaggcgaagucaacaaaaucaaaaacgcccuucuuucaaccaacaaggcaguaguaucccucucaaacggcgucagcguccugaccuucaaaguccuagaccucaaaaacuacauagauaaacaacuccuccccauacugaacaaacaaucgugcuccauccccaauaucgaaaccgucauagaguuccagcagaaaaacaacagacuucucgaaauaacccgagaguucucaguaaacgccggagucaccacacccguaagcaccuacaugcucacaaacucagaacuccuaucccucaucaacgacaugcccaucaccaacgaccagaaaaagcuaauguccaacaacguccaaauaguacgccaacaaagcuacucgauaaugugcaucaucaaggaagaaguacucgccuacgucguccaacucccccucuacggcguaaucgacacacccugcuggaaacuccacacguccccacucugcacaacaaacacaaaagaaggauccaacauaugccuaacccgcaccgacaggggcugguacugcgacaacgcaggcucagucagcuucuuuccccaagccgaaacaugcaaaguccaauccaaccgugucuucugcgacaccaugaacucgcucacccuacccucggaagucaaucucugcaacaucgacaucuucaacccaaaauacgacuguaaaaucaugaccagcaaaacagacguuucuuccagcgucaucacaucacucggcgcgaucguaucaugcuauggcaaaacaaagugcaccgcuagcaauaaaaaccgaggaaucauaaaaaccuucagcaacggcugcgacuacguauccaacaaaggcgucgacaccguauccgucggaaacacccucuacugcgucaacaagcaagaaggacaaucacucuacgucaaaggcgaaccaaucauaaacuucuacgacccacucguauuccccucagacgaguucgacgcauccaucucccaagucaacgaaaagaucaaccaaucucucgccuuuauacgcaaaagcgacgaacuccuucacaacguaaacgucggcaaaagcaccacuaacauaaugaucaccacaaucauaauaguaaucaucguaauacuccuccuacucaucgccgugggccuauuccucuauugcaaagcccgauaaggacuaguguccaccugucccuccugggcugcuggauugucucguuuuccugccaaauaaacaggaucagcgcuuuacagaucuaaaaaaaaaaaaaaaaaaaaaaaaaaaaaaaaaaaaaaaaaaaaaaaaaaaaaaaaaaaaaaaaugcaucccccccccccccccccccccccccccccccaaaggcucuuuucagagccaccagaauu

SEQ ID NO: 14654 - RNA, 1931 nt, Artificial Sequence
  mRNA product Design i-2 comprising derived and/or modified sequence from HRSV(Memphis-37)__AIY60640.1__F-del_DSCav1_mut1 (opt1)
gggagaggcgcugccuacggagguggcagccaucuccuucucggcaucaagcuuaccauggagcugcccauccucaagaccaacgccaucaccacgauccuggccgcggugacccugugcuucgccagcucccagaacaucaccgaggaguucuaccagagcacgugcuccgccgucagcaagggcuaccucggcgcccugcgcaccgggugguacaccagcgugaucaccaucgagcuguccaacaucaaggagaacaagugcaacggcaccgacgccaaggugaagcucaucaagcaggagcuggacaaguacaagaacgcggucacggagcugcagcuccugaugcagagcaccccggccgccggcuccgggagcgcgaucugcuccggcaucgccgucugcaaggugcugcaccucgagggcgaggugaacaagaucaagaacgcccugcuguccaccaacaaggccgucgugagccucuccaacggggugagcguccugaccuucaaggugcuggaccucaagaacuacaucgacaagcagcugcugcccauccugaacaagcagagcugcuccauccccaacaucgagaccgucaucgaguuccagcagaagaacaaccgccuccuggagaucacgcgggaguucagcgugaacgcgggcgugaccacccccgucuccaccuacaugcugacgaacagcgagcuccugucccugaucaacgacaugccgaucaccaacgaccagaagaagcucaugagcaacaacgugcagaucgugcgccagcaguccuacagcaucaugugcaucaucaaggaggagguccuggccuacguggugcagcugccccucuacggggucaucgacacccccugcuggaagcugcacaccagcccccugugcacgaccaacaccaaggagggcuccaacaucugccucacccggacggaccgcgggugguacugcgacaacgccggcagcguguccuucuucccgcaggccgagaccugcaagguccagagcaaccggguguucugcgacaccaugaacucccugacccugcccagcgaggugaaccucugcaacaucgacaucuucaaccccaaguacgacugcaagaucaugacguccaagaccgacgucagcuccagcgugaucaccucccugggcgccaucgugagcugcuacgggaagaccaagugcacggcgagcaacaagaaccgcggcaucaucaagaccuucuccaacgggugcgacuacgucagcaacaagggcguggacaccguguccgucggcaacacccuguacugcgugaacaagcaggagggccagagccucuacgugaagggggagcccaucaucaacuucuacgacccgcuggucuuccccuccgacgaguucgacgccagcaucucccaggugaacgagaagaucaaccagagccuggccuucauccggaaguccgacgagcuccugcacaacgugaacgucggcaagagcaccacgaacaucaugaucaccaccaucaucaucgugaucaucgugauccugcugcuccugaucgccgucgggcuguuccucuacugcaaggcccgcugaggacuagugcaucacauuuaaaagcaucucagccuaccaugagaauaagagaaagaaaaugaagaucaauagcuuauucaucucuuuuucuuuuucguugguguaaagccaacacccugucuaaaaaacauaaauuucuuuaaucauuuugccucuuuucucugugcuucaauuaauaaaaaauggaaagaaccuagaucuaaaaaaaaaaaaaaaaaaaaaaaaaaaaaaaaaaaaaaaaaaaaaaaaaaaaaaaaaaaaaaaaugcaucccccccccccccccccccccccccccccccaaaggcucuuuucagagccaccagaauu

SEQ ID NO: 14655 - RNA, 1931 nt, Artificial Sequence
  mRNA product Design i-2 comprising derived and/or modified sequence from HRSV(Memphis-37)__AIY60640.1__F-del_DSCav1_mut1 (opt1)
gggagaggcgcugccuacggagguggcagccaucuccuucucggcaucaagcuuaccauggagcugcccauccucaagaccaacgccaucaccacgauccuggccgcggugacccugugcuucgccagcucccagaacaucaccgaggaguucuaccagagcacgugcuccgccgucagcaagggcuaccucggggcccugcgcaccggcugguacaccuccgugaucaccaucgagcugagcaacaucaaggagaacaagugcaacgggaccgacgccaaggugaagcucaucaagcaggagcuggacaaguacaagaacgcggucacggagcugcagcuccugaugcaguccaccccggccgccggcagcggguccgccaucugcagcggcaucgcggugugcaaggugcugcaccucgagggcgaggucaacaagaucaagaacgcccugcuguccaccaacaaggccguggugagccucuccaacggggucagcgugcugaccuucaaggugcuggaccucaagaacuacaucgacaagcagcugcugcccauccucaacaagcaguccugcagcauccccaacaucgagacggucaucgaguuccagcagaagaacaaccggcugcuggagaucacccgcgaguucuccgugaacgccggcgugaccacccccgucagcacguacaugcucaccaacuccgagcugcugagccucaucaacgacaugccgaucaccaacgaccagaagaagcugaugagcaacaacgugcagaucgugcggcagcaguccuacagcaucaugugcaucaucaaggaggagguccuggccuacguggugcagcucccccuguacggggucaucgacacccccugcuggaagcugcacacgagcccccucugcaccaccaacaccaaggagggcuccaacaucugccugacgcgcaccgaccgggggugguacugcgacaacgcgggcuccgugagcuucuucccgcaggccgagaccugcaaggugcaguccaaccgcgucuucugcgacaccaugaacagccugacgcuccccuccgaggugaaccugugcaacaucgacaucuucaaccccaaguacgacugcaagaucaugaccagcaagaccgacgucuccagcuccgugaucaccagccugggcgccaucguguccugcuacgggaagacgaagugcaccgccagcaacaagaaccggggcaucaucaagaccuucuccaacgggugcgacuacgucagcaacaagggcguggacaccguguccgucggcaacacgcucuacugcgugaacaagcaggaggggcagagccuguacgugaagggcgagcccaucaucaacuucuacgacccgcuggucuuccccagcgacgaguucgacgccuccaucagccaggugaacgagaagaucaaccagucccucgcguucauccgcaagagcgacgagcugcugcacaacgugaacgucgggaaguccaccaccaacaucaugaucaccaccaucaucaucgugaucaucgugauccuccugcugcucaucgccgucggccuguuccuguacugcaaggcccggugaggacuagugcaucacauuuaaaagcaucucagccuaccaugagaauaagagaaagaaaaugaagaucaauagcuuauucaucucuuuuucuuuuucguugguguaaagccaacacccugucuaaaaaacauaaauuucuuuaaucauuuugccucuuuucucugugcuucaauuaauaaaaaauggaaagaaccuagaucuaaaaaaaaaaaaaaaaaaaaaaaaaaaaaaaaaaaaaaaaaaaaaaaaaaaaaaaaaaaaaaaaugcaucccccccccccccccccccccccccccccccaaaggcucuuuucagagccaccagaauu

SEQ ID NO: 14656 - RNA, 1931 nt, Artificial Sequence
  mRNA product Design i-2 comprising derived and/or modified sequence from HRSV(Memphis-37)__AIY60640.1__F-del_DSCav1_mut1 (opt2)
gggagaggcgcugccuacggagguggcagccaucuccuucucggcaucaagcuuaccauggagcuccccauccucaagaccaacgccaucaccaccauccucgccgccgucacccucugcuucgccuccucccagaacaucaccgaggaguucuaccaguccaccugcuccgccgucuccaagggcuaccucggcgcccuccgcaccggcugguacaccuccgucaucaccaucgagcucuccaacaucaaggagaacaagugcaacggcaccgacgccaaggucaagcucaucaagcaggagcucgacaaguacaagaacgccgucaccgagcuccagcuccucaugcaguccacccccgccgccggcuccggcuccgccaucugcuccggcaucgccgucugcaagguccuccaccucgagggcgaggucaacaagaucaagaacgcccuccucuccaccaacaaggccgucgucucccucuccaacggcgucuccguccucaccuucaagguccucgaccucaagaacuacaucgacaagcagcuccuccccauccucaacaagcaguccugcuccauccccaacaucgagaccgucaucgaguuccagcagaagaacaaccgccuccucgagaucacccgcgaguucuccgucaacgccggcgucaccacccccgucuccaccuacaugcucaccaacuccgagcuccucucccucaucaacgacaugcccaucaccaacgaccagaagaagcucauguccaacaacguccagaucguccgccagcaguccuacuccaucaugugcaucaucaaggaggagguccucgccuacgucguccagcucccccucuacggcgucaucgacacccccugcuggaagcuccacaccuccccccucugcaccaccaacaccaaggagggcuccaacaucugccucacccgcaccgaccgcggcugguacugcgacaacgccggcuccgucuccuucuucccccaggccgagaccugcaagguccaguccaaccgcgucuucugcgacaccaugaacucccucacccuccccuccgaggucaaccucugcaacaucgacaucuucaaccccaaguacgacugcaagaucaugaccuccaagaccgacgucuccuccuccgucaucaccucccucggcgccaucgucuccugcuacggcaagaccaagugcaccgccuccaacaagaaccgcggcaucaucaagaccuucuccaacggcugcgacuacgucuccaacaagggcgucgacaccgucuccgucggcaacacccucuacugcgucaacaagcaggagggccagucccucuacgucaagggcgagcccaucaucaacuucuacgacccccucgucuuccccuccgacgaguucgacgccuccaucucccaggucaacgagaagaucaaccagucccucgccuucauccgcaaguccgacgagcuccuccacaacgucaacgucggcaaguccaccaccaacaucaugaucaccaccaucaucaucgucaucaucgucauccuccuccuccucaucgccgucggccucuuccucuacugcaaggcccgcugaggacuagugcaucacauuuaaaagcaucucagccuaccaugagaauaagagaaagaaaaugaagaucaauagcuuauucaucucuuuuucuuuuucguugguguaaagccaacacccugucuaaaaaacauaaauuucuuuaaucauuuugccucuuuucucugugcuucaauuaauaaaaaauggaaagaaccuagaucuaaaaaaaaaaaaaaaaaaaaaaaaaaaaaaaaaaaaaaaaaaaaaaaaaaaaaaaaaaaaaaaaugcaucccccccccccccccccccccccccccccccaaaggcucuuuucagagccaccagaauu

SEQ ID NO: 14657 - RNA, 1931 nt, Artificial Sequence
  mRNA product Design i-2 comprising derived and/or modified sequence from HRSV(Memphis-37)__AIY60640.1__F-del_DSCav1_mut1 (opt3)
gggagaggcgcugccuacggagguggcagccaucuccuucucggcaucaagcuuaccauggagcugcccauccucaagaccaacgccauuacaacuauacuugcugcagugacgcugugcuucgccagcucccagaauaucaccgaagaguuuuaccaaucuacauguucagcggucaguaaaggcuauuugggggcuuuaagaacuggaugguacaccagcguuauuacaaucgaacuguccaacauuaaggagaauaaaugcaacgguaccgacgccaaggugaaacuaaucaagcaggaacucgauaaguauaaaaaugcaguaacugagcugcagcuucugaugcagucuacuccugccgcuggcucggggucagcaauauguagcggaaucgccgugugcaaggucuugcaccucgagggcgaagugaacaaaauuaagaaugcucugcugaguaccaacaaagccguugugucccucucuaauggugucagcguguuaacguucaagguacuggaccuuaagaacuacaucgauaaacaauugcugccaauucuaaauaagcaguccuguucaaucccgaacauagagacuguuauugaauuucagcagaaaaauaacaggcuccuggagaucacccgggaguucagugugaaugcgggggucacaacucccgugagcaccuauaugcuuacaaacucugaacuguugucccucauuaacgacaugccuaucaccaaugaucaaaagaaacugaugucaaacaaugugcagaucguccgccagcagagcuacaguauuaugugcauaaucaaggaggaaguuuuagcauaugugguacaacugccacucuacggagugauugacacgcccuguuggaaacuucauacuucuccucugugcacaaccaacacuaaggagggcuccaauaucuguuugacacgaaccgaucguggcugguacugcgacaacgccgggagcgucucguuuuucccacaggcugaaacguguaaggugcagucuaauagaguguuuugcgauaccaugaacucccuaacacugcccucagagguuaaucucugcaacauagacauuuucaauccuaaauaugauuguaagaucaugacaaguaaaaccgacgucagcuccucugugaucacaagccugggagccauuguaucaugcuacgguaagacuaaauguaccgcaaguaacaagaauaggggcaucauuaagacauuuuccaacgggugcgauuauguuagcaauaaaggaguggacaccgucucugugggcaacacucuuuacugugucaacaagcaagagggucagucacuguaugugaaaggggaaccaauaaucaauuucuacgacccguugguuuuucccagugaugaguucgacgcuagcauuucccaggugaacgaaaagaucaaucagucucucgccuuuauccggaaaucggaugagcuguuacacaacguaaaugucggaaagagcacgacaaacauuaugauaaccacuaucauuaucgugauuaucguuauacugcuacuccugaucgcggugggccuuuucuuguauugcaaggcccgcugaggacuagugcaucacauuuaaaagcaucucagccuaccaugagaauaagagaaagaaaaugaagaucaauagcuuauucaucucuuuuucuuuuucguugguguaaagccaacacccugucuaaaaaacauaaauuucuuuaaucauuuugccucuuuucucugugcuucaauuaauaaaaaauggaaagaaccuagaucuaaaaaaaaaaaaaaaaaaaaaaaaaaaaaaaaaaaaaaaaaaaaaaaaaaaaaaaaaaaaaaaaugcaucccccccccccccccccccccccccccccccaaaggcucuuuucagagccaccagaauu

SEQ ID NO: 14658 - RNA, 1931 nt, Artificial Sequence
  mRNA product Design i-2 comprising derived and/or modified sequence from HRSV(Memphis-37)__AIY60640.1__F-del_DSCav1_mut1 (opt4)
gggagaggcgcugccuacggagguggcagccaucuccuucucggcaucaagcuuaccauggagcugcccauccugaagaccaacgccaucaccaccauccuggccgccgugacccugugcuucgccagcagccagaacaucaccgaggaguucuaccagagcaccugcagcgccgugagcaagggcuaccugggcgcccugagaaccggcugguacaccagcgugaucaccaucgagcugagcaacaucaaggagaacaagugcaacggcaccgacgccaaggugaagcugaucaagcaggagcuggacaaguacaagaacgccgugaccgagcugcagcugcugaugcagagcacccccgccgccggcagcggcagcgccaucugcagcggcaucgccgugugcaaggugcugcaccuggagggcgaggugaacaagaucaagaacgcccugcugagcaccaacaaggccguggugagccugagcaacggcgugagcgugcugaccuucaaggugcuggaccugaagaacuacaucgacaagcagcugcugcccauccugaacaagcagagcugcagcauccccaacaucgagaccgugaucgaguuccagcagaagaacaacagacugcuggagaucaccagagaguucagcgugaacgccggcgugaccacccccgugagcaccuacaugcugaccaacagcgagcugcugagccugaucaacgacaugcccaucaccaacgaccagaagaagcugaugagcaacaacgugcagaucgugagacagcagagcuacagcaucaugugcaucaucaaggaggaggugcuggccuacguggugcagcugccccuguacggcgugaucgacacccccugcuggaagcugcacaccagcccccugugcaccaccaacaccaaggagggcagcaacaucugccugaccagaaccgacagaggcugguacugcgacaacgccggcagcgugagcuucuucccccaggccgagaccugcaaggugcagagcaacagaguguucugcgacaccaugaacagccugacccugcccagcgaggugaaccugugcaacaucgacaucuucaaccccaaguacgacugcaagaucaugaccagcaagaccgacgugagcagcagcgugaucaccagccugggcgccaucgugagcugcuacggcaagaccaagugcaccgccagcaacaagaacagaggcaucaucaagaccuucagcaacggcugcgacuacgugagcaacaagggcguggacaccgugagcgugggcaacacccuguacugcgugaacaagcaggagggccagagccuguacgugaagggcgagcccaucaucaacuucuacgacccccugguguuccccagcgacgaguucgacgccagcaucagccaggugaacgagaagaucaaccagagccuggccuucaucagaaagagcgacgagcugcugcacaacgugaacgugggcaagagcaccaccaacaucaugaucaccaccaucaucaucgugaucaucgugauccugcugcugcugaucgccgugggccuguuccuguacugcaaggccagaugaggacuagugcaucacauuuaaaagcaucucagccuaccaugagaauaagagaaagaaaaugaagaucaauagcuuauucaucucuuuuucuuuuucguugguguaaagccaacacccugucuaaaaaacauaaauuucuuuaaucauuuugccucuuuucucugugcuucaauuaauaaaaaauggaaagaaccuagaucuaaaaaaaaaaaaaaaaaaaaaaaaaaaaaaaaaaaaaaaaaaaaaaaaaaaaaaaaaaaaaaaaugcaucccccccccccccccccccccccccccccccaaaggcucuuuucagagccaccagaauu

SEQ ID NO: 14659 - RNA, 1931 nt, Artificial Sequence
  mRNA product Design i-2 comprising derived and/or modified sequence from HRSV(Memphis-37)__AIY60640.1__F-del_DSCav1_mut1 (opt5)
gggagaggcgcugccuacggagguggcagccaucuccuucucggcaucaagcuuaccauggagcugcccauccucaagaccaacgccauuacaacgauccuggcugccgugacccuuugcuucgcgagcucccagaauauuacagaagaguuuuaccaaucuaccuguagcgcugucuccaaaggcuaucugggggcccucagaacaggaugguacaccucuguuaucacaauugaacugagcaacaucaaggagaauaaaugcaacggcaccgacgccaaggugaaacuuaucaagcaggaacuggauaaguauaaaaaugcugugacggagcuccagcugcugaugcaguccaccccugccgcugggucuggaagcgccauuuguuccggcaucgcggucugcaaggugcuccaccuggagggggaaguuaacaaaauuaagaaugcccuucugagcacaaacaaagcuguggucucucucuccaauggagugagcguucugaccuucaaggugcuugaccugaagaacuacaucgauaaacaacuccugccgauucugaauaagcagucuuguuccauccccaacauugagacagucaucgaauuucagcagaaaaauaaccggcuccuggagaucacccgcgaguucagcgugaaugccggcgugacgacaccugucucuaccuauaugcuuacaaacuccgaacugcucagccugauuaacgacaugcccaucaccaaugaucaaaagaaacuuauguccaacaauguucagauugugagacagcagucuuacagcaucaugugcauuaucaaggaggaagugcuggcuuaugucgugcaacucccucuguacggcguuaucgacacccccuguuggaaacugcauacauccccucucugcacgaccaacacaaaggaggggagcaauauuugucugacccggacagaucgcggaugguacugcgacaacgccggcucuguguccuuuuucccgcaggcggaaaccuguaagguccagagcaauagaguguuuugcgauacgaugaacucucuuacacugcccagcgagguuaaucucugcaacaucgacauuuucaauccuaaauaugauuguaagaucaugaccuccaaaaccgacgugucuagcuccgucauuacaagccugggggccaucgugucuugcuacggaaagaccaaauguacagcuuccaacaagaaucggggcaucauuaagacguuuagcaacgggugcgauuaugucucuaauaaaggaguggacaccguuuccgugggcaacacacuuuacugugucaacaagcaagagggccagagccuguaugugaaaggggaacccaucauuaauuucuacgacccucucguuuuucccuccgaugaguucgacgccucuaucagccaggugaacgaaaagauuaaucagucccuggcuuuuauccgcaaaucugaugagcugcuccacaacgucaaugugggaaagagcaccacaaacauuaugaucaccacgaucauuaucgugauuaucguuauucugcuucugcucaucgccgucggccuguuccuguauugcaaggccagaugaggacuagugcaucacauuuaaaagcaucucagccuaccaugagaauaagagaaagaaaaugaagaucaauagcuuauucaucucuuuuucuuuuucguugguguaaagccaacacccugucuaaaaaacauaaauuucuuuaaucauuuugccucuuuucucugugcuucaauuaauaaaaaauggaaagaaccuagaucuaaaaaaaaaaaaaaaaaaaaaaaaaaaaaaaaaaaaaaaaaaaaaaaaaaaaaaaaaaaaaaaaugcaucccccccccccccccccccccccccccccccaaaggcucuuuucagagccaccagaauu

SEQ ID NO: 14660 - RNA, 1931 nt, Artificial Sequence
  mRNA product Design i-2 comprising derived and/or modified sequence from HRSV(Memphis-37)__AIY60640.1__F-del_DSCav1_mut1 (opt6)
gggagaggcgcugccuacggagguggcagccaucuccuucucggcaucaagcuuaccauggaauuaccaauacuaaaaacaaacgcaauaacaacaauucuagcagcaguaacauuaugcuuugcaucaucccaaaacaucacagaagaauuuuaucaaucaaccugcucagcaguuuccaaaggauacuuaggagcauuaagaacugguugguacacuucaguaaucaccaucgaacucucaaacaucaaggaaaacaaaugcaacggaacagacgcaaaaguuaaacucauaaaacaagaacuugacaaauacaaaaacgccguaacagaacuacaacuucucaugcaaucaacacccgcagcaggauccggaucagccauaugcucaggcauagcaguauguaaaguauuacaucuugaaggugaaguaaacaaaauaaaaaacgcacuucuaucaaccaacaaagcaguaguaucacuaucaaacggaguauccgucuuaacauuuaaaguucuagaccucaaaaacuauauagacaaacaauuacugccaauccucaauaaacaaucaugcucaauaccaaacaucgaaacaguaauagaauuucaacaaaaaaacaacagacuacuagaaauaacaagagaauuuuccgucaacgccggcguaacuacuccaguaucaacauauaugcuaaccaacucagaacuccuaucccucauaaacgacaugccaauaacuaaugaucaaaaaaaacuaaugucaaacaauguacaaauaguuagacaacaaucauacucaaucaugugcauaauaaaagaagaaguacuagcauacgucguccaacuaccccuauacggaguaauagacacaccuugcuggaaacuacacacaucaccccuaugcacaacaaauacaaaagaagguuccaacaucugccuaacaagaacugauagaggaugguacugcgacaacgccggaucaguaucauucuucccucaagcugaaaccugcaaaguacaaucaaacagaguauuuugcgauacaaugaacucccuaacacuucccucagaaguuaaucuuuguaauauagauauauucaacccaaaauacgacugcaaaauaaugacaaguaaaacagacguauccucaucuguaauuacaucacuaggagccauaguaucuugcuacggcaaaaccaaaugcacagcaucaaacaaaaacagagguauuaucaaaaccuucucaaacggaugugacuacguuucaaacaaaggaguagacacaguaucagucggaaacacccuauacuguguuaacaaacaagaaggacaaucacuguacguaaaaggagaacccauaauaaauuucuacgacccacuuguauuuccaucagacgaauuugaugcaucaaucucacaaguaaaugaaaaaauaaaccaaucauuagcauucauaagaaaaucugacgaguuacuacacaacguaaauguuggcaaaucaacaaccaauauaaugauaacaacaauaauaauaguaauaauagucauauuacuccuccucauagccgucggauuauucuuauacugcaaagcaagauaaggacuagugcaucacauuuaaaagcaucucagccuaccaugagaauaagagaaagaaaaugaagaucaauagcuuauucaucucuuuuucuuuuucguugguguaaagccaacacccugucuaaaaaacauaaauuucuuuaaucauuuugccucuuuucucugugcuucaauuaauaaaaaauggaaagaaccuagaucuaaaaaaaaaaaaaaaaaaaaaaaaaaaaaaaaaaaaaaaaaaaaaaaaaaaaaaaaaaaaaaaaugcaucccccccccccccccccccccccccccccccaaaggcucuuuucagagccaccagaauu

SEQ ID NO: 14661 - RNA, 1931 nt, Artificial Sequence
  mRNA product Design i-2 comprising derived and/or modified sequence from HRSV(Memphis-37)__AIY60640.1__F-del_DSCav1_mut1 (opt11)
gggagaggcgcugccuacggagguggcagccaucuccuucucggcaucaagcuuaccauggaacuccccauacuaaaaaccaacgccaucacaacaauccucgccgccgucacacucugcuucgccagcucccaaaacaucaccgaagaguucuaucaaucaaccugcuccgcagucucaaagggauaccucggagcccuccgcaccggaugguacacuuccgucaucacaauagaacucuccaacaucaaagaaaacaaaugcaacggcaccgacgcaaaagucaagcucaucaaacaagaacucgacaaauauaaaaacgccgucaccgaacuccaacuacucaugcaauccacacccgcggccggcucaggcagcgccaucugcucaggcaucgccgucugcaaaguccuccaccucgaaggcgaagucaacaaaaucaaaaacgcccuucuuucaaccaacaaggcaguaguaucccucucaaacggcgucagcguccugaccuucaaaguccuagaccucaaaaacuacauagauaaacaacuccuccccauacugaacaaacaaucgugcuccauccccaauaucgaaaccgucauagaguuccagcagaaaaacaacagacuucucgaaauaacccgagaguucucaguaaacgccggagucaccacacccguaagcaccuacaugcucacaaacucagaacuccuaucccucaucaacgacaugcccaucaccaacgaccagaaaaagcuaauguccaacaacguccaaauaguacgccaacaaagcuacucgauaaugugcaucaucaaggaagaaguacucgccuacgucguccaacucccccucuacggcguaaucgacacacccugcuggaaacuccacacguccccacucugcacaacaaacacaaaagaaggauccaacauaugccuaacccgcaccgacaggggcugguacugcgacaacgcaggcucagucagcuucuuuccccaagccgaaacaugcaaaguccaauccaaccgugucuucugcgacaccaugaacucgcucacccuacccucggaagucaaucucugcaacaucgacaucuucaacccaaaauacgacuguaaaaucaugaccagcaaaacagacguuucuuccagcgucaucacaucacucggcgcgaucguaucaugcuauggcaaaacaaagugcaccgcuagcaauaaaaaccgaggaaucauaaaaaccuucagcaacggcugcgacuacguauccaacaaaggcgucgacaccguauccgucggaaacacccucuacugcgucaacaagcaagaaggacaaucacucuacgucaaaggcgaaccaaucauaaacuucuacgacccacucguauuccccucagacgaguucgacgcauccaucucccaagucaacgaaaagaucaaccaaucucucgccuuuauacgcaaaagcgacgaacuccuucacaacguaaacgucggcaaaagcaccacuaacauaaugaucaccacaaucauaauaguaaucaucguaauacuccuccuacucaucgccgugggccuauuccucuauugcaaagcccgauaaggacuagugcaucacauuuaaaagcaucucagccuaccaugagaauaagagaaagaaaaugaagaucaauagcuuauucaucucuuuuucuuuuucguugguguaaagccaacacccugucuaaaaaacauaaauuucuuuaaucauuuugccucuuuucucugugcuucaauuaauaaaaaauggaaagaaccuagaucuaaaaaaaaaaaaaaaaaaaaaaaaaaaaaaaaaaaaaaaaaaaaaaaaaaaaaaaaaaaaaaaaugcaucccccccccccccccccccccccccccccccaaaggcucuuuucagagccaccagaauu

SEQ ID NO: 14662 - RNA, 1927 nt, Artificial Sequence
  mRNA product Design i-2 comprising derived and/or modified sequence from HRSV(Memphis-37)__AIY60640.1__F-del_DSCav1_mut1 (opt1)
ggggcgcugccuacggagguggcagccaucuccuucucggcaucaagcuuaccauggagcugcccauccucaagaccaacgccaucaccacgauccuggccgcggugacccugugcuucgccagcucccagaacaucaccgaggaguucuaccagagcacgugcuccgccgucagcaagggcuaccucggcgcccugcgcaccgggugguacaccagcgugaucaccaucgagcuguccaacaucaaggagaacaagugcaacggcaccgacgccaaggugaagcucaucaagcaggagcuggacaaguacaagaacgcggucacggagcugcagcuccugaugcagagcaccccggccgccggcuccgggagcgcgaucugcuccggcaucgccgucugcaaggugcugcaccucgagggcgaggugaacaagaucaagaacgcccugcuguccaccaacaaggccgucgugagccucuccaacggggugagcguccugaccuucaaggugcuggaccucaagaacuacaucgacaagcagcugcugcccauccugaacaagcagagcugcuccauccccaacaucgagaccgucaucgaguuccagcagaagaacaaccgccuccuggagaucacgcgggaguucagcgugaacgcgggcgugaccacccccgucuccaccuacaugcugacgaacagcgagcuccugucccugaucaacgacaugccgaucaccaacgaccagaagaagcucaugagcaacaacgugcagaucgugcgccagcaguccuacagcaucaugugcaucaucaaggaggagguccuggccuacguggugcagcugccccucuacggggucaucgacacccccugcuggaagcugcacaccagcccccugugcacgaccaacaccaaggagggcuccaacaucugccucacccggacggaccgcgggugguacugcgacaacgccggcagcguguccuucuucccgcaggccgagaccugcaagguccagagcaaccggguguucugcgacaccaugaacucccugacccugcccagcgaggugaaccucugcaacaucgacaucuucaaccccaaguacgacugcaagaucaugacguccaagaccgacgucagcuccagcgugaucaccucccugggcgccaucgugagcugcuacgggaagaccaagugcacggcgagcaacaagaaccgcggcaucaucaagaccuucuccaacgggugcgacuacgucagcaacaagggcguggacaccguguccgucggcaacacccuguacugcgugaacaagcaggagggccagagccucuacgugaagggggagcccaucaucaacuucuacgacccgcuggucuuccccuccgacgaguucgacgccagcaucucccaggugaacgagaagaucaaccagagccuggccuucauccggaaguccgacgagcuccugcacaacgugaacgucggcaagagcaccacgaacaucaugaucaccaccaucaucaucgugaucaucgugauccugcugcuccugaucgccgucgggcuguuccucuacugcaaggcccgcugaggacuagugcaucacauuuaaaagcaucucagccuaccaugagaauaagagaaagaaaaugaagaucaauagcuuauucaucucuuuuucuuuuucguugguguaaagccaacacccugucuaaaaaacauaaauuucuuuaaucauuuugccucuuuucucugugcuucaauuaauaaaaaauggaaagaaccuagaucuaaaaaaaaaaaaaaaaaaaaaaaaaaaaaaaaaaaaaaaaaaaaaaaaaaaaaaaaaaaaaaaaugcaucccccccccccccccccccccccccccccccaaaggcucuuuucagagccaccagaauu

SEQ ID NO: 14663 - RNA, 1927 nt, Artificial Sequence
  mRNA product Design i-2 comprising derived and/or modified sequence from HRSV(Memphis-37)__AIY60640.1__F-del_DSCav1_mut1 (opt1)
ggggcgcugccuacggagguggcagccaucuccuucucggcaucaagcuuaccauggagcugcccauccucaagaccaacgccaucaccacgauccuggccgcggugacccugugcuucgccagcucccagaacaucaccgaggaguucuaccagagcacgugcuccgccgucagcaagggcuaccucggggcccugcgcaccggcugguacaccuccgugaucaccaucgagcugagcaacaucaaggagaacaagugcaacgggaccgacgccaaggugaagcucaucaagcaggagcuggacaaguacaagaacgcggucacggagcugcagcuccugaugcaguccaccccggccgccggcagcggguccgccaucugcagcggcaucgcggugugcaaggugcugcaccucgagggcgaggucaacaagaucaagaacgcccugcuguccaccaacaaggccguggugagccucuccaacggggucagcgugcugaccuucaaggugcuggaccucaagaacuacaucgacaagcagcugcugcccauccucaacaagcaguccugcagcauccccaacaucgagacggucaucgaguuccagcagaagaacaaccggcugcuggagaucacccgcgaguucuccgugaacgccggcgugaccacccccgucagcacguacaugcucaccaacuccgagcugcugagccucaucaacgacaugccgaucaccaacgaccagaagaagcugaugagcaacaacgugcagaucgugcggcagcaguccuacagcaucaugugcaucaucaaggaggagguccuggccuacguggugcagcucccccuguacggggucaucgacacccccugcuggaagcugcacacgagcccccucugcaccaccaacaccaaggagggcuccaacaucugccugacgcgcaccgaccgggggugguacugcgacaacgcgggcuccgugagcuucuucccgcaggccgagaccugcaaggugcaguccaaccgcgucuucugcgacaccaugaacagccugacgcuccccuccgaggugaaccugugcaacaucgacaucuucaaccccaaguacgacugcaagaucaugaccagcaagaccgacgucuccagcuccgugaucaccagccugggcgccaucguguccugcuacgggaagacgaagugcaccgccagcaacaagaaccggggcaucaucaagaccuucuccaacgggugcgacuacgucagcaacaagggcguggacaccguguccgucggcaacacgcucuacugcgugaacaagcaggaggggcagagccuguacgugaagggcgagcccaucaucaacuucuacgacccgcuggucuuccccagcgacgaguucgacgccuccaucagccaggugaacgagaagaucaaccagucccucgcguucauccgcaagagcgacgagcugcugcacaacgugaacgucgggaaguccaccaccaacaucaugaucaccaccaucaucaucgugaucaucgugauccuccugcugcucaucgccgucggccuguuccuguacugcaaggcccggugaggacuagugcaucacauuuaaaagcaucucagccuaccaugagaauaagagaaagaaaaugaagaucaauagcuuauucaucucuuuuucuuuuucguugguguaaagccaacacccugucuaaaaaacauaaauuucuuuaaucauuuugccucuuuucucugugcuucaauuaauaaaaaauggaaagaaccuagaucuaaaaaaaaaaaaaaaaaaaaaaaaaaaaaaaaaaaaaaaaaaaaaaaaaaaaaaaaaaaaaaaaugcaucccccccccccccccccccccccccccccccaaaggcucuuuucagagccaccagaauu

SEQ ID NO: 14664 - RNA, 1927 nt, Artificial Sequence
  mRNA product Design i-2 comprising derived and/or modified sequence from HRSV(Memphis-37)__AIY60640.1__F-del_DSCav1_mut1 (opt2)
ggggcgcugccuacggagguggcagccaucuccuucucggcaucaagcuuaccauggagcuccccauccucaagaccaacgccaucaccaccauccucgccgccgucacccucugcuucgccuccucccagaacaucaccgaggaguucuaccaguccaccugcuccgccgucuccaagggcuaccucggcgcccuccgcaccggcugguacaccuccgucaucaccaucgagcucuccaacaucaaggagaacaagugcaacggcaccgacgccaaggucaagcucaucaagcaggagcucgacaaguacaagaacgccgucaccgagcuccagcuccucaugcaguccacccccgccgccggcuccggcuccgccaucugcuccggcaucgccgucugcaagguccuccaccucgagggcgaggucaacaagaucaagaacgcccuccucuccaccaacaaggccgucgucucccucuccaacggcgucuccguccucaccuucaagguccucgaccucaagaacuacaucgacaagcagcuccuccccauccucaacaagcaguccugcuccauccccaacaucgagaccgucaucgaguuccagcagaagaacaaccgccuccucgagaucacccgcgaguucuccgucaacgccggcgucaccacccccgucuccaccuacaugcucaccaacuccgagcuccucucccucaucaacgacaugcccaucaccaacgaccagaagaagcucauguccaacaacguccagaucguccgccagcaguccuacuccaucaugugcaucaucaaggaggagguccucgccuacgucguccagcucccccucuacggcgucaucgacacccccugcuggaagcuccacaccuccccccucugcaccaccaacaccaaggagggcuccaacaucugccucacccgcaccgaccgcggcugguacugcgacaacgccggcuccgucuccuucuucccccaggccgagaccugcaagguccaguccaaccgcgucuucugcgacaccaugaacucccucacccuccccuccgaggucaaccucugcaacaucgacaucuucaaccccaaguacgacugcaagaucaugaccuccaagaccgacgucuccuccuccgucaucaccucccucggcgccaucgucuccugcuacggcaagaccaagugcaccgccuccaacaagaaccgcggcaucaucaagaccuucuccaacggcugcgacuacgucuccaacaagggcgucgacaccgucuccgucggcaacacccucuacugcgucaacaagcaggagggccagucccucuacgucaagggcgagcccaucaucaacuucuacgacccccucgucuuccccuccgacgaguucgacgccuccaucucccaggucaacgagaagaucaaccagucccucgccuucauccgcaaguccgacgagcuccuccacaacgucaacgucggcaaguccaccaccaacaucaugaucaccaccaucaucaucgucaucaucgucauccuccuccuccucaucgccgucggccucuuccucuacugcaaggcccgcugaggacuagugcaucacauuuaaaagcaucucagccuaccaugagaauaagagaaagaaaaugaagaucaauagcuuauucaucucuuuuucuuuuucguugguguaaagccaacacccugucuaaaaaacauaaauuucuuuaaucauuuugccucuuuucucugugcuucaauuaauaaaaaauggaaagaaccuagaucuaaaaaaaaaaaaaaaaaaaaaaaaaaaaaaaaaaaaaaaaaaaaaaaaaaaaaaaaaaaaaaaaugcaucccccccccccccccccccccccccccccccaaaggcucuuuucagagccaccagaauu

SEQ ID NO: 14665 - RNA, 1927 nt, Artificial Sequence
  mRNA product Design i-2 comprising derived and/or modified sequence from HRSV(Memphis-37)__AIY60640.1__F-del_DSCav1_mut1 (opt3)
ggggcgcugccuacggagguggcagccaucuccuucucggcaucaagcuuaccauggagcugcccauccucaagaccaacgccauuacaacuauacuugcugcagugacgcugugcuucgccagcucccagaauaucaccgaagaguuuuaccaaucuacauguucagcggucaguaaaggcuauuugggggcuuuaagaacuggaugguacaccagcguuauuacaaucgaacuguccaacauuaaggagaauaaaugcaacgguaccgacgccaaggugaaacuaaucaagcaggaacucgauaaguauaaaaaugcaguaacugagcugcagcuucugaugcagucuacuccugccgcuggcucggggucagcaauauguagcggaaucgccgugugcaaggucuugcaccucgagggcgaagugaacaaaauuaagaaugcucugcugaguaccaacaaagccguugugucccucucuaauggugucagcguguuaacguucaagguacuggaccuuaagaacuacaucgauaaacaauugcugccaauucuaaauaagcaguccuguucaaucccgaacauagagacuguuauugaauuucagcagaaaaauaacaggcuccuggagaucacccgggaguucagugugaaugcgggggucacaacucccgugagcaccuauaugcuuacaaacucugaacuguugucccucauuaacgacaugccuaucaccaaugaucaaaagaaacugaugucaaacaaugugcagaucguccgccagcagagcuacaguauuaugugcauaaucaaggaggaaguuuuagcauaugugguacaacugccacucuacggagugauugacacgcccuguuggaaacuucauacuucuccucugugcacaaccaacacuaaggagggcuccaauaucuguuugacacgaaccgaucguggcugguacugcgacaacgccgggagcgucucguuuuucccacaggcugaaacguguaaggugcagucuaauagaguguuuugcgauaccaugaacucccuaacacugcccucagagguuaaucucugcaacauagacauuuucaauccuaaauaugauuguaagaucaugacaaguaaaaccgacgucagcuccucugugaucacaagccugggagccauuguaucaugcuacgguaagacuaaauguaccgcaaguaacaagaauaggggcaucauuaagacauuuuccaacgggugcgauuauguuagcaauaaaggaguggacaccgucucugugggcaacacucuuuacugugucaacaagcaagagggucagucacuguaugugaaaggggaaccaauaaucaauuucuacgacccguugguuuuucccagugaugaguucgacgcuagcauuucccaggugaacgaaaagaucaaucagucucucgccuuuauccggaaaucggaugagcuguuacacaacguaaaugucggaaagagcacgacaaacauuaugauaaccacuaucauuaucgugauuaucguuauacugcuacuccugaucgcggugggccuuuucuuguauugcaaggcccgcugaggacuagugcaucacauuuaaaagcaucucagccuaccaugagaauaagagaaagaaaaugaagaucaauagcuuauucaucucuuuuucuuuuucguugguguaaagccaacacccugucuaaaaaacauaaauuucuuuaaucauuuugccucuuuucucugugcuucaauuaauaaaaaauggaaagaaccuagaucuaaaaaaaaaaaaaaaaaaaaaaaaaaaaaaaaaaaaaaaaaaaaaaaaaaaaaaaaaaaaaaaaugcaucccccccccccccccccccccccccccccccaaaggcucuuuucagagccaccagaauu

SEQ ID NO: 14666 - RNA, 1927 nt, Artificial Sequence
  mRNA product Design i-2 comprising derived and/or modified sequence from HRSV(Memphis-37)__AIY60640.1__F-del_DSCav1_mut1 (opt4)
ggggcgcugccuacggagguggcagccaucuccuucucggcaucaagcuuaccauggagcugcccauccugaagaccaacgccaucaccaccauccuggccgccgugacccugugcuucgccagcagccagaacaucaccgaggaguucuaccagagcaccugcagcgccgugagcaagggcuaccugggcgcccugagaaccggcugguacaccagcgugaucaccaucgagcugagcaacaucaaggagaacaagugcaacggcaccgacgccaaggugaagcugaucaagcaggagcuggacaaguacaagaacgccgugaccgagcugcagcugcugaugcagagcacccccgccgccggcagcggcagcgccaucugcagcggcaucgccgugugcaaggugcugcaccuggagggcgaggugaacaagaucaagaacgcccugcugagcaccaacaaggccguggugagccugagcaacggcgugagcgugcugaccuucaaggugcuggaccugaagaacuacaucgacaagcagcugcugcccauccugaacaagcagagcugcagcauccccaacaucgagaccgugaucgaguuccagcagaagaacaacagacugcuggagaucaccagagaguucagcgugaacgccggcgugaccacccccgugagcaccuacaugcugaccaacagcgagcugcugagccugaucaacgacaugcccaucaccaacgaccagaagaagcugaugagcaacaacgugcagaucgugagacagcagagcuacagcaucaugugcaucaucaaggaggaggugcuggccuacguggugcagcugccccuguacggcgugaucgacacccccugcuggaagcugcacaccagcccccugugcaccaccaacaccaaggagggcagcaacaucugccugaccagaaccgacagaggcugguacugcgacaacgccggcagcgugagcuucuucccccaggccgagaccugcaaggugcagagcaacagaguguucugcgacaccaugaacagccugacccugcccagcgaggugaaccugugcaacaucgacaucuucaaccccaaguacgacugcaagaucaugaccagcaagaccgacgugagcagcagcgugaucaccagccugggcgccaucgugagcugcuacggcaagaccaagugcaccgccagcaacaagaacagaggcaucaucaagaccuucagcaacggcugcgacuacgugagcaacaagggcguggacaccgugagcgugggcaacacccuguacugcgugaacaagcaggagggccagagccuguacgugaagggcgagcccaucaucaacuucuacgacccccugguguuccccagcgacgaguucgacgccagcaucagccaggugaacgagaagaucaaccagagccuggccuucaucagaaagagcgacgagcugcugcacaacgugaacgugggcaagagcaccaccaacaucaugaucaccaccaucaucaucgugaucaucgugauccugcugcugcugaucgccgugggccuguuccuguacugcaaggccagaugaggacuagugcaucacauuuaaaagcaucucagccuaccaugagaauaagagaaagaaaaugaagaucaauagcuuauucaucucuuuuucuuuuucguugguguaaagccaacacccugucuaaaaaacauaaauuucuuuaaucauuuugccucuuuucucugugcuucaauuaauaaaaaauggaaagaaccuagaucuaaaaaaaaaaaaaaaaaaaaaaaaaaaaaaaaaaaaaaaaaaaaaaaaaaaaaaaaaaaaaaaaugcaucccccccccccccccccccccccccccccccaaaggcucuuuucagagccaccagaauu

SEQ ID NO: 14667 - RNA, 1927 nt, Artificial Sequence
  mRNA product Design i-2 comprising derived and/or modified sequence from HRSV(Memphis-37)__AIY60640.1__F-del_DSCav1_mut1 (opt5)
ggggcgcugccuacggagguggcagccaucuccuucucggcaucaagcuuaccauggagcugcccauccucaagaccaacgccauuacaacgauccuggcugccgugacccuuugcuucgcgagcucccagaauauuacagaagaguuuuaccaaucuaccuguagcgcugucuccaaaggcuaucugggggcccucagaacaggaugguacaccucuguuaucacaauugaacugagcaacaucaaggagaauaaaugcaacggcaccgacgccaaggugaaacuuaucaagcaggaacuggauaaguauaaaaaugcugugacggagcuccagcugcugaugcaguccaccccugccgcugggucuggaagcgccauuuguuccggcaucgcggucugcaaggugcuccaccuggagggggaaguuaacaaaauuaagaaugcccuucugagcacaaacaaagcuguggucucucucuccaauggagugagcguucugaccuucaaggugcuugaccugaagaacuacaucgauaaacaacuccugccgauucugaauaagcagucuuguuccauccccaacauugagacagucaucgaauuucagcagaaaaauaaccggcuccuggagaucacccgcgaguucagcgugaaugccggcgugacgacaccugucucuaccuauaugcuuacaaacuccgaacugcucagccugauuaacgacaugcccaucaccaaugaucaaaagaaacuuauguccaacaauguucagauugugagacagcagucuuacagcaucaugugcauuaucaaggaggaagugcuggcuuaugucgugcaacucccucuguacggcguuaucgacacccccuguuggaaacugcauacauccccucucugcacgaccaacacaaaggaggggagcaauauuugucugacccggacagaucgcggaugguacugcgacaacgccggcucuguguccuuuuucccgcaggcggaaaccuguaagguccagagcaauagaguguuuugcgauacgaugaacucucuuacacugcccagcgagguuaaucucugcaacaucgacauuuucaauccuaaauaugauuguaagaucaugaccuccaaaaccgacgugucuagcuccgucauuacaagccugggggccaucgugucuugcuacggaaagaccaaauguacagcuuccaacaagaaucggggcaucauuaagacguuuagcaacgggugcgauuaugucucuaauaaaggaguggacaccguuuccgugggcaacacacuuuacugugucaacaagcaagagggccagagccuguaugugaaaggggaacccaucauuaauuucuacgacccucucguuuuucccuccgaugaguucgacgccucuaucagccaggugaacgaaaagauuaaucagucccuggcuuuuauccgcaaaucugaugagcugcuccacaacgucaaugugggaaagagcaccacaaacauuaugaucaccacgaucauuaucgugauuaucguuauucugcuucugcucaucgccgucggccuguuccuguauugcaaggccagaugaggacuagugcaucacauuuaaaagcaucucagccuaccaugagaauaagagaaagaaaaugaagaucaauagcuuauucaucucuuuuucuuuuucguugguguaaagccaacacccugucuaaaaaacauaaauuucuuuaaucauuuugccucuuuucucugugcuucaauuaauaaaaaauggaaagaaccuagaucuaaaaaaaaaaaaaaaaaaaaaaaaaaaaaaaaaaaaaaaaaaaaaaaaaaaaaaaaaaaaaaaaugcaucccccccccccccccccccccccccccccccaaaggcucuuuucagagccaccagaauu

SEQ ID NO: 14668 - RNA, 1927 nt, Artificial Sequence
  mRNA product Design i-2 comprising derived and/or modified sequence from HRSV(Memphis-37)__AIY60640.1__F-del_DSCav1_mut1 (opt6)
ggggcgcugccuacggagguggcagccaucuccuucucggcaucaagcuuaccauggaauuaccaauacuaaaaacaaacgcaauaacaacaauucuagcagcaguaacauuaugcuuugcaucaucccaaaacaucacagaagaauuuuaucaaucaaccugcucagcaguuuccaaaggauacuuaggagcauuaagaacugguugguacacuucaguaaucaccaucgaacucucaaacaucaaggaaaacaaaugcaacggaacagacgcaaaaguuaaacucauaaaacaagaacuugacaaauacaaaaacgccguaacagaacuacaacuucucaugcaaucaacacccgcagcaggauccggaucagccauaugcucaggcauagcaguauguaaaguauuacaucuugaaggugaaguaaacaaaauaaaaaacgcacuucuaucaaccaacaaagcaguaguaucacuaucaaacggaguauccgucuuaacauuuaaaguucuagaccucaaaaacuauauagacaaacaauuacugccaauccucaauaaacaaucaugcucaauaccaaacaucgaaacaguaauagaauuucaacaaaaaaacaacagacuacuagaaauaacaagagaauuuuccgucaacgccggcguaacuacuccaguaucaacauauaugcuaaccaacucagaacuccuaucccucauaaacgacaugccaauaacuaaugaucaaaaaaaacuaaugucaaacaauguacaaauaguuagacaacaaucauacucaaucaugugcauaauaaaagaagaaguacuagcauacgucguccaacuaccccuauacggaguaauagacacaccuugcuggaaacuacacacaucaccccuaugcacaacaaauacaaaagaagguuccaacaucugccuaacaagaacugauagaggaugguacugcgacaacgccggaucaguaucauucuucccucaagcugaaaccugcaaaguacaaucaaacagaguauuuugcgauacaaugaacucccuaacacuucccucagaaguuaaucuuuguaauauagauauauucaacccaaaauacgacugcaaaauaaugacaaguaaaacagacguauccucaucuguaauuacaucacuaggagccauaguaucuugcuacggcaaaaccaaaugcacagcaucaaacaaaaacagagguauuaucaaaaccuucucaaacggaugugacuacguuucaaacaaaggaguagacacaguaucagucggaaacacccuauacuguguuaacaaacaagaaggacaaucacuguacguaaaaggagaacccauaauaaauuucuacgacccacuuguauuuccaucagacgaauuugaugcaucaaucucacaaguaaaugaaaaaauaaaccaaucauuagcauucauaagaaaaucugacgaguuacuacacaacguaaauguuggcaaaucaacaaccaauauaaugauaacaacaauaauaauaguaauaauagucauauuacuccuccucauagccgucggauuauucuuauacugcaaagcaagauaaggacuagugcaucacauuuaaaagcaucucagccuaccaugagaauaagagaaagaaaaugaagaucaauagcuuauucaucucuuuuucuuuuucguugguguaaagccaacacccugucuaaaaaacauaaauuucuuuaaucauuuugccucuuuucucugugcuucaauuaauaaaaaauggaaagaaccuagaucuaaaaaaaaaaaaaaaaaaaaaaaaaaaaaaaaaaaaaaaaaaaaaaaaaaaaaaaaaaaaaaaaugcaucccccccccccccccccccccccccccccccaaaggcucuuuucagagccaccagaauu

SEQ ID NO: 14669 - RNA, 1927 nt, Artificial Sequence
  mRNA product Design i-2 comprising derived and/or modified sequence from HRSV(Memphis-37)__AIY60640.1__F-del_DSCav1_mut1 (opt11)
ggggcgcugccuacggagguggcagccaucuccuucucggcaucaagcuuaccauggaacuccccauacuaaaaaccaacgccaucacaacaauccucgccgccgucacacucugcuucgccagcucccaaaacaucaccgaagaguucuaucaaucaaccugcuccgcagucucaaagggauaccucggagcccuccgcaccggaugguacacuuccgucaucacaauagaacucuccaacaucaaagaaaacaaaugcaacggcaccgacgcaaaagucaagcucaucaaacaagaacucgacaaauauaaaaacgccgucaccgaacuccaacuacucaugcaauccacacccgcggccggcucaggcagcgccaucugcucaggcaucgccgucugcaaaguccuccaccucgaaggcgaagucaacaaaaucaaaaacgcccuucuuucaaccaacaaggcaguaguaucccucucaaacggcgucagcguccugaccuucaaaguccuagaccucaaaaacuacauagauaaacaacuccuccccauacugaacaaacaaucgugcuccauccccaauaucgaaaccgucauagaguuccagcagaaaaacaacagacuucucgaaauaacccgagaguucucaguaaacgccggagucaccacacccguaagcaccuacaugcucacaaacucagaacuccuaucccucaucaacgacaugcccaucaccaacgaccagaaaaagcuaauguccaacaacguccaaauaguacgccaacaaagcuacucgauaaugugcaucaucaaggaagaaguacucgccuacgucguccaacucccccucuacggcguaaucgacacacccugcuggaaacuccacacguccccacucugcacaacaaacacaaaagaaggauccaacauaugccuaacccgcaccgacaggggcugguacugcgacaacgcaggcucagucagcuucuuuccccaagccgaaacaugcaaaguccaauccaaccgugucuucugcgacaccaugaacucgcucacccuacccucggaagucaaucucugcaacaucgacaucuucaacccaaaauacgacuguaaaaucaugaccagcaaaacagacguuucuuccagcgucaucacaucacucggcgcgaucguaucaugcuauggcaaaacaaagugcaccgcuagcaauaaaaaccgaggaaucauaaaaaccuucagcaacggcugcgacuacguauccaacaaaggcgucgacaccguauccgucggaaacacccucuacugcgucaacaagcaagaaggacaaucacucuacgucaaaggcgaaccaaucauaaacuucuacgacccacucguauuccccucagacgaguucgacgcauccaucucccaagucaacgaaaagaucaaccaaucucucgccuuuauacgcaaaagcgacgaacuccuucacaacguaaacgucggcaaaagcaccacuaacauaaugaucaccacaaucauaauaguaaucaucguaauacuccuccuacucaucgccgugggccuauuccucuauugcaaagcccgauaaggacuagugcaucacauuuaaaagcaucucagccuaccaugagaauaagagaaagaaaaugaagaucaauagcuuauucaucucuuuuucuuuuucguugguguaaagccaacacccugucuaaaaaacauaaauuucuuuaaucauuuugccucuuuucucugugcuucaauuaauaaaaaauggaaagaaccuagaucuaaaaaaaaaaaaaaaaaaaaaaaaaaaaaaaaaaaaaaaaaaaaaaaaaaaaaaaaaaaaaaaaugcaucccccccccccccccccccccccccccccccaaaggcucuuuucagagccaccagaauu

SEQ ID NO: 14670 - RNA, 1762 nt, Artificial Sequence
  mRNA product Design i-3 comprising derived and/or modified sequence from HRSV(Memphis-37)__AIY60640.1__F-del_DSCav1_mut1 (opt1)
gggagaaagcuuaccauggagcugcccauccucaagaccaacgccaucaccacgauccuggccgcggugacccugugcuucgccagcucccagaacaucaccgaggaguucuaccagagcacgugcuccgccgucagcaagggcuaccucggcgcccugcgcaccgggugguacaccagcgugaucaccaucgagcuguccaacaucaaggagaacaagugcaacggcaccgacgccaaggugaagcucaucaagcaggagcuggacaaguacaagaacgcggucacggagcugcagcuccugaugcagagcaccccggccgccggcuccgggagcgcgaucugcuccggcaucgccgucugcaaggugcugcaccucgagggcgaggugaacaagaucaagaacgcccugcuguccaccaacaaggccgucgugagccucuccaacggggugagcguccugaccuucaaggugcuggaccucaagaacuacaucgacaagcagcugcugcccauccugaacaagcagagcugcuccauccccaacaucgagaccgucaucgaguuccagcagaagaacaaccgccuccuggagaucacgcgggaguucagcgugaacgcgggcgugaccacccccgucuccaccuacaugcugacgaacagcgagcuccugucccugaucaacgacaugccgaucaccaacgaccagaagaagcucaugagcaacaacgugcagaucgugcgccagcaguccuacagcaucaugugcaucaucaaggaggagguccuggccuacguggugcagcugccccucuacggggucaucgacacccccugcuggaagcugcacaccagcccccugugcacgaccaacaccaaggagggcuccaacaucugccucacccggacggaccgcgggugguacugcgacaacgccggcagcguguccuucuucccgcaggccgagaccugcaagguccagagcaaccggguguucugcgacaccaugaacucccugacccugcccagcgaggugaaccucugcaacaucgacaucuucaaccccaaguacgacugcaagaucaugacguccaagaccgacgucagcuccagcgugaucaccucccugggcgccaucgugagcugcuacgggaagaccaagugcacggcgagcaacaagaaccgcggcaucaucaagaccuucuccaacgggugcgacuacgucagcaacaagggcguggacaccguguccgucggcaacacccuguacugcgugaacaagcaggagggccagagccucuacgugaagggggagcccaucaucaacuucuacgacccgcuggucuuccccuccgacgaguucgacgccagcaucucccaggugaacgagaagaucaaccagagccuggccuucauccggaaguccgacgagcuccugcacaacgugaacgucggcaagagcaccacgaacaucaugaucaccaccaucaucaucgugaucaucgugauccugcugcuccugaucgccgucgggcuguuccucuacugcaaggcccgcugaggacuaguuauaagacugacuagcccgaugggccucccaacgggcccuccuccccuccuugcaccgagauuaauaaaaaaaaaaaaaaaaaaaaaaaaaaaaaaaaaaaaaaaaaaaaaaaaaaaaaaaaaaaaaaaaugcaucccccccccccccccccccccccccccccccaaaggcucuuuucagagccaccagaauu

SEQ ID NO: 14671 - RNA, 1762 nt, Artificial Sequence
  mRNA product Design i-3 comprising derived and/or modified sequence from HRSV(Memphis-37)__AIY60640.1__F-del_DSCav1_mut1 (opt1)
gggagaaagcuuaccauggagcugcccauccucaagaccaacgccaucaccacgauccuggccgcggugacccugugcuucgccagcucccagaacaucaccgaggaguucuaccagagcacgugcuccgccgucagcaagggcuaccucggggcccugcgcaccggcugguacaccuccgugaucaccaucgagcugagcaacaucaaggagaacaagugcaacgggaccgacgccaaggugaagcucaucaagcaggagcuggacaaguacaagaacgcggucacggagcugcagcuccugaugcaguccaccccggccgccggcagcggguccgccaucugcagcggcaucgcggugugcaaggugcugcaccucgagggcgaggucaacaagaucaagaacgcccugcuguccaccaacaaggccguggugagccucuccaacggggucagcgugcugaccuucaaggugcuggaccucaagaacuacaucgacaagcagcugcugcccauccucaacaagcaguccugcagcauccccaacaucgagacggucaucgaguuccagcagaagaacaaccggcugcuggagaucacccgcgaguucuccgugaacgccggcgugaccacccccgucagcacguacaugcucaccaacuccgagcugcugagccucaucaacgacaugccgaucaccaacgaccagaagaagcugaugagcaacaacgugcagaucgugcggcagcaguccuacagcaucaugugcaucaucaaggaggagguccuggccuacguggugcagcucccccuguacggggucaucgacacccccugcuggaagcugcacacgagcccccucugcaccaccaacaccaaggagggcuccaacaucugccugacgcgcaccgaccgggggugguacugcgacaacgcgggcuccgugagcuucuucccgcaggccgagaccugcaaggugcaguccaaccgcgucuucugcgacaccaugaacagccugacgcuccccuccgaggugaaccugugcaacaucgacaucuucaaccccaaguacgacugcaagaucaugaccagcaagaccgacgucuccagcuccgugaucaccagccugggcgccaucguguccugcuacgggaagacgaagugcaccgccagcaacaagaaccggggcaucaucaagaccuucuccaacgggugcgacuacgucagcaacaagggcguggacaccguguccgucggcaacacgcucuacugcgugaacaagcaggaggggcagagccuguacgugaagggcgagcccaucaucaacuucuacgacccgcuggucuuccccagcgacgaguucgacgccuccaucagccaggugaacgagaagaucaaccagucccucgcguucauccgcaagagcgacgagcugcugcacaacgugaacgucgggaaguccaccaccaacaucaugaucaccaccaucaucaucgugaucaucgugauccuccugcugcucaucgccgucggccuguuccuguacugcaaggcccggugaggacuaguuauaagacugacuagcccgaugggccucccaacgggcccuccuccccuccuugcaccgagauuaauaaaaaaaaaaaaaaaaaaaaaaaaaaaaaaaaaaaaaaaaaaaaaaaaaaaaaaaaaaaaaaaaugcaucccccccccccccccccccccccccccccccaaaggcucuuuucagagccaccagaauu

SEQ ID NO: 14672 - RNA, 1762 nt, Artificial Sequence
  mRNA product Design i-3 comprising derived and/or modified sequence from HRSV(Memphis-37)__AIY60640.1__F-del_DSCav1_mut1 (opt2)
gggagaaagcuuaccauggagcuccccauccucaagaccaacgccaucaccaccauccucgccgccgucacccucugcuucgccuccucccagaacaucaccgaggaguucuaccaguccaccugcuccgccgucuccaagggcuaccucggcgcccuccgcaccggcugguacaccuccgucaucaccaucgagcucuccaacaucaaggagaacaagugcaacggcaccgacgccaaggucaagcucaucaagcaggagcucgacaaguacaagaacgccgucaccgagcuccagcuccucaugcaguccacccccgccgccggcuccggcuccgccaucugcuccggcaucgccgucugcaagguccuccaccucgagggcgaggucaacaagaucaagaacgcccuccucuccaccaacaaggccgucgucucccucuccaacggcgucuccguccucaccuucaagguccucgaccucaagaacuacaucgacaagcagcuccuccccauccucaacaagcaguccugcuccauccccaacaucgagaccgucaucgaguuccagcagaagaacaaccgccuccucgagaucacccgcgaguucuccgucaacgccggcgucaccacccccgucuccaccuacaugcucaccaacuccgagcuccucucccucaucaacgacaugcccaucaccaacgaccagaagaagcucauguccaacaacguccagaucguccgccagcaguccuacuccaucaugugcaucaucaaggaggagguccucgccuacgucguccagcucccccucuacggcgucaucgacacccccugcuggaagcuccacaccuccccccucugcaccaccaacaccaaggagggcuccaacaucugccucacccgcaccgaccgcggcugguacugcgacaacgccggcuccgucuccuucuucccccaggccgagaccugcaagguccaguccaaccgcgucuucugcgacaccaugaacucccucacccuccccuccgaggucaaccucugcaacaucgacaucuucaaccccaaguacgacugcaagaucaugaccuccaagaccgacgucuccuccuccgucaucaccucccucggcgccaucgucuccugcuacggcaagaccaagugcaccgccuccaacaagaaccgcggcaucaucaagaccuucuccaacggcugcgacuacgucuccaacaagggcgucgacaccgucuccgucggcaacacccucuacugcgucaacaagcaggagggccagucccucuacgucaagggcgagcccaucaucaacuucuacgacccccucgucuuccccuccgacgaguucgacgccuccaucucccaggucaacgagaagaucaaccagucccucgccuucauccgcaaguccgacgagcuccuccacaacgucaacgucggcaaguccaccaccaacaucaugaucaccaccaucaucaucgucaucaucgucauccuccuccuccucaucgccgucggccucuuccucuacugcaaggcccgcugaggacuaguuauaagacugacuagcccgaugggccucccaacgggcccuccuccccuccuugcaccgagauuaauaaaaaaaaaaaaaaaaaaaaaaaaaaaaaaaaaaaaaaaaaaaaaaaaaaaaaaaaaaaaaaaaugcaucccccccccccccccccccccccccccccccaaaggcucuuuucagagccaccagaauu

SEQ ID NO: 14673 - RNA, 1762 nt, Artificial Sequence
  mRNA product Design i-3 comprising derived and/or modified sequence from HRSV(Memphis-37)__AIY60640.1__F-del_DSCav1_mut1 (opt3)
gggagaaagcuuaccauggagcugcccauccucaagaccaacgccauuacaacuauacuugcugcagugacgcugugcuucgccagcucccagaauaucaccgaagaguuuuaccaaucuacauguucagcggucaguaaaggcuauuugggggcuuuaagaacuggaugguacaccagcguuauuacaaucgaacuguccaacauuaaggagaauaaaugcaacgguaccgacgccaaggugaaacuaaucaagcaggaacucgauaaguauaaaaaugcaguaacugagcugcagcuucugaugcagucuacuccugccgcuggcucggggucagcaauauguagcggaaucgccgugugcaaggucuugcaccucgagggcgaagugaacaaaauuaagaaugcucugcugaguaccaacaaagccguugugucccucucuaauggugucagcguguuaacguucaagguacuggaccuuaagaacuacaucgauaaacaauugcugccaauucuaaauaagcaguccuguucaaucccgaacauagagacuguuauugaauuucagcagaaaaauaacaggcuccuggagaucacccgggaguucagugugaaugcgggggucacaacucccgugagcaccuauaugcuuacaaacucugaacuguugucccucauuaacgacaugccuaucaccaaugaucaaaagaaacugaugucaaacaaugugcagaucguccgccagcagagcuacaguauuaugugcauaaucaaggaggaaguuuuagcauaugugguacaacugccacucuacggagugauugacacgcccuguuggaaacuucauacuucuccucugugcacaaccaacacuaaggagggcuccaauaucuguuugacacgaaccgaucguggcugguacugcgacaacgccgggagcgucucguuuuucccacaggcugaaacguguaaggugcagucuaauagaguguuuugcgauaccaugaacucccuaacacugcccucagagguuaaucucugcaacauagacauuuucaauccuaaauaugauuguaagaucaugacaaguaaaaccgacgucagcuccucugugaucacaagccugggagccauuguaucaugcuacgguaagacuaaauguaccgcaaguaacaagaauaggggcaucauuaagacauuuuccaacgggugcgauuauguuagcaauaaaggaguggacaccgucucugugggcaacacucuuuacugugucaacaagcaagagggucagucacuguaugugaaaggggaaccaauaaucaauuucuacgacccguugguuuuucccagugaugaguucgacgcuagcauuucccaggugaacgaaaagaucaaucagucucucgccuuuauccggaaaucggaugagcuguuacacaacguaaaugucggaaagagcacgacaaacauuaugauaaccacuaucauuaucgugauuaucguuauacugcuacuccugaucgcggugggccuuuucuuguauugcaaggcccgcugaggacuaguuauaagacugacuagcccgaugggccucccaacgggcccuccuccccuccuugcaccgagauuaauaaaaaaaaaaaaaaaaaaaaaaaaaaaaaaaaaaaaaaaaaaaaaaaaaaaaaaaaaaaaaaaaugcaucccccccccccccccccccccccccccccccaaaggcucuuuucagagccaccagaauu

SEQ ID NO: 14674 - RNA, 1762 nt, Artificial Sequence
  mRNA product Design i-3 comprising derived and/or modified sequence from HRSV(Memphis-37)__AIY60640.1__F-del_DSCav1_mut1 (opt4)
gggagaaagcuuaccauggagcugcccauccugaagaccaacgccaucaccaccauccuggccgccgugacccugugcuucgccagcagccagaacaucaccgaggaguucuaccagagcaccugcagcgccgugagcaagggcuaccugggcgcccugagaaccggcugguacaccagcgugaucaccaucgagcugagcaacaucaaggagaacaagugcaacggcaccgacgccaaggugaagcugaucaagcaggagcuggacaaguacaagaacgccgugaccgagcugcagcugcugaugcagagcacccccgccgccggcagcggcagcgccaucugcagcggcaucgccgugugcaaggugcugcaccuggagggcgaggugaacaagaucaagaacgcccugcugagcaccaacaaggccguggugagccugagcaacggcgugagcgugcugaccuucaaggugcuggaccugaagaacuacaucgacaagcagcugcugcccauccugaacaagcagagcugcagcauccccaacaucgagaccgugaucgaguuccagcagaagaacaacagacugcuggagaucaccagagaguucagcgugaacgccggcgugaccacccccgugagcaccuacaugcugaccaacagcgagcugcugagccugaucaacgacaugcccaucaccaacgaccagaagaagcugaugagcaacaacgugcagaucgugagacagcagagcuacagcaucaugugcaucaucaaggaggaggugcuggccuacguggugcagcugccccuguacggcgugaucgacacccccugcuggaagcugcacaccagcccccugugcaccaccaacaccaaggagggcagcaacaucugccugaccagaaccgacagaggcugguacugcgacaacgccggcagcgugagcuucuucccccaggccgagaccugcaaggugcagagcaacagaguguucugcgacaccaugaacagccugacccugcccagcgaggugaaccugugcaacaucgacaucuucaaccccaaguacgacugcaagaucaugaccagcaagaccgacgugagcagcagcgugaucaccagccugggcgccaucgugagcugcuacggcaagaccaagugcaccgccagcaacaagaacagaggcaucaucaagaccuucagcaacggcugcgacuacgugagcaacaagggcguggacaccgugagcgugggcaacacccuguacugcgugaacaagcaggagggccagagccuguacgugaagggcgagcccaucaucaacuucuacgacccccugguguuccccagcgacgaguucgacgccagcaucagccaggugaacgagaagaucaaccagagccuggccuucaucagaaagagcgacgagcugcugcacaacgugaacgugggcaagagcaccaccaacaucaugaucaccaccaucaucaucgugaucaucgugauccugcugcugcugaucgccgugggccuguuccuguacugcaaggccagaugaggacuaguuauaagacugacuagcccgaugggccucccaacgggcccuccuccccuccuugcaccgagauuaauaaaaaaaaaaaaaaaaaaaaaaaaaaaaaaaaaaaaaaaaaaaaaaaaaaaaaaaaaaaaaaaaugcaucccccccccccccccccccccccccccccccaaaggcucuuuucagagccaccagaauu

SEQ ID NO: 14675 - RNA, 1762 nt, Artificial Sequence
  mRNA product Design i-3 comprising derived and/or modified sequence from HRSV(Memphis-37)__AIY60640.1__F-del_DSCav1_mut1 (opt5)
gggagaaagcuuaccauggagcugcccauccucaagaccaacgccauuacaacgauccuggcugccgugacccuuugcuucgcgagcucccagaauauuacagaagaguuuuaccaaucuaccuguagcgcugucuccaaaggcuaucugggggcccucagaacaggaugguacaccucuguuaucacaauugaacugagcaacaucaaggagaauaaaugcaacggcaccgacgccaaggugaaacuuaucaagcaggaacuggauaaguauaaaaaugcugugacggagcuccagcugcugaugcaguccaccccugccgcugggucuggaagcgccauuuguuccggcaucgcggucugcaaggugcuccaccuggagggggaaguuaacaaaauuaagaaugcccuucugagcacaaacaaagcuguggucucucucuccaauggagugagcguucugaccuucaaggugcuugaccugaagaacuacaucgauaaacaacuccugccgauucugaauaagcagucuuguuccauccccaacauugagacagucaucgaauuucagcagaaaaauaaccggcuccuggagaucacccgcgaguucagcgugaaugccggcgugacgacaccugucucuaccuauaugcuuacaaacuccgaacugcucagccugauuaacgacaugcccaucaccaaugaucaaaagaaacuuauguccaacaauguucagauugugagacagcagucuuacagcaucaugugcauuaucaaggaggaagugcuggcuuaugucgugcaacucccucuguacggcguuaucgacacccccuguuggaaacugcauacauccccucucugcacgaccaacacaaaggaggggagcaauauuugucugacccggacagaucgcggaugguacugcgacaacgccggcucuguguccuuuuucccgcaggcggaaaccuguaagguccagagcaauagaguguuuugcgauacgaugaacucucuuacacugcccagcgagguuaaucucugcaacaucgacauuuucaauccuaaauaugauuguaagaucaugaccuccaaaaccgacgugucuagcuccgucauuacaagccugggggccaucgugucuugcuacggaaagaccaaauguacagcuuccaacaagaaucggggcaucauuaagacguuuagcaacgggugcgauuaugucucuaauaaaggaguggacaccguuuccgugggcaacacacuuuacugugucaacaagcaagagggccagagccuguaugugaaaggggaacccaucauuaauuucuacgacccucucguuuuucccuccgaugaguucgacgccucuaucagccaggugaacgaaaagauuaaucagucccuggcuuuuauccgcaaaucugaugagcugcuccacaacgucaaugugggaaagagcaccacaaacauuaugaucaccacgaucauuaucgugauuaucguuauucugcuucugcucaucgccgucggccuguuccuguauugcaaggccagaugaggacuaguuauaagacugacuagcccgaugggccucccaacgggcccuccuccccuccuugcaccgagauuaauaaaaaaaaaaaaaaaaaaaaaaaaaaaaaaaaaaaaaaaaaaaaaaaaaaaaaaaaaaaaaaaaugcaucccccccccccccccccccccccccccccccaaaggcucuuuucagagccaccagaauu

SEQ ID NO: 14676 - RNA, 1762 nt, Artificial Sequence
  mRNA product Design i-3 comprising derived and/or modified sequence from HRSV(Memphis-37)__AIY60640.1__F-del_DSCav1_mut1 (opt6)
gggagaaagcuuaccauggaauuaccaauacuaaaaacaaacgcaauaacaacaauucuagcagcaguaacauuaugcuuugcaucaucccaaaacaucacagaagaauuuuaucaaucaaccugcucagcaguuuccaaaggauacuuaggagcauuaagaacugguugguacacuucaguaaucaccaucgaacucucaaacaucaaggaaaacaaaugcaacggaacagacgcaaaaguuaaacucauaaaacaagaacuugacaaauacaaaaacgccguaacagaacuacaacuucucaugcaaucaacacccgcagcaggauccggaucagccauaugcucaggcauagcaguauguaaaguauuacaucuugaaggugaaguaaacaaaauaaaaaacgcacuucuaucaaccaacaaagcaguaguaucacuaucaaacggaguauccgucuuaacauuuaaaguucuagaccucaaaaacuauauagacaaacaauuacugccaauccucaauaaacaaucaugcucaauaccaaacaucgaaacaguaauagaauuucaacaaaaaaacaacagacuacuagaaauaacaagagaauuuuccgucaacgccggcguaacuacuccaguaucaacauauaugcuaaccaacucagaacuccuaucccucauaaacgacaugccaauaacuaaugaucaaaaaaaacuaaugucaaacaauguacaaauaguuagacaacaaucauacucaaucaugugcauaauaaaagaagaaguacuagcauacgucguccaacuaccccuauacggaguaauagacacaccuugcuggaaacuacacacaucaccccuaugcacaacaaauacaaaagaagguuccaacaucugccuaacaagaacugauagaggaugguacugcgacaacgccggaucaguaucauucuucccucaagcugaaaccugcaaaguacaaucaaacagaguauuuugcgauacaaugaacucccuaacacuucccucagaaguuaaucuuuguaauauagauauauucaacccaaaauacgacugcaaaauaaugacaaguaaaacagacguauccucaucuguaauuacaucacuaggagccauaguaucuugcuacggcaaaaccaaaugcacagcaucaaacaaaaacagagguauuaucaaaaccuucucaaacggaugugacuacguuucaaacaaaggaguagacacaguaucagucggaaacacccuauacuguguuaacaaacaagaaggacaaucacuguacguaaaaggagaacccauaauaaauuucuacgacccacuuguauuuccaucagacgaauuugaugcaucaaucucacaaguaaaugaaaaaauaaaccaaucauuagcauucauaagaaaaucugacgaguuacuacacaacguaaauguuggcaaaucaacaaccaauauaaugauaacaacaauaauaauaguaauaauagucauauuacuccuccucauagccgucggauuauucuuauacugcaaagcaagauaaggacuaguuauaagacugacuagcccgaugggccucccaacgggcccuccuccccuccuugcaccgagauuaauaaaaaaaaaaaaaaaaaaaaaaaaaaaaaaaaaaaaaaaaaaaaaaaaaaaaaaaaaaaaaaaaugcaucccccccccccccccccccccccccccccccaaaggcucuuuucagagccaccagaauu

SEQ ID NO: 14677 - RNA, 1762 nt, Artificial Sequence
  mRNA product Design i-3 comprising derived and/or modified sequence from HRSV(Memphis-37)__AIY60640.1__F-del_DSCav1_mut1 (opt11)
gggagaaagcuuaccauggaacuccccauacuaaaaaccaacgccaucacaacaauccucgccgccgucacacucugcuucgccagcucccaaaacaucaccgaagaguucuaucaaucaaccugcuccgcagucucaaagggauaccucggagcccuccgcaccggaugguacacuuccgucaucacaauagaacucuccaacaucaaagaaaacaaaugcaacggcaccgacgcaaaagucaagcucaucaaacaagaacucgacaaauauaaaaacgccgucaccgaacuccaacuacucaugcaauccacacccgcggccggcucaggcagcgccaucugcucaggcaucgccgucugcaaaguccuccaccucgaaggcgaagucaacaaaaucaaaaacgcccuucuuucaaccaacaaggcaguaguaucccucucaaacggcgucagcguccugaccuucaaaguccuagaccucaaaaacuacauagauaaacaacuccuccccauacugaacaaacaaucgugcuccauccccaauaucgaaaccgucauagaguuccagcagaaaaacaacagacuucucgaaauaacccgagaguucucaguaaacgccggagucaccacacccguaagcaccuacaugcucacaaacucagaacuccuaucccucaucaacgacaugcccaucaccaacgaccagaaaaagcuaauguccaacaacguccaaauaguacgccaacaaagcuacucgauaaugugcaucaucaaggaagaaguacucgccuacgucguccaacucccccucuacggcguaaucgacacacccugcuggaaacuccacacguccccacucugcacaacaaacacaaaagaaggauccaacauaugccuaacccgcaccgacaggggcugguacugcgacaacgcaggcucagucagcuucuuuccccaagccgaaacaugcaaaguccaauccaaccgugucuucugcgacaccaugaacucgcucacccuacccucggaagucaaucucugcaacaucgacaucuucaacccaaaauacgacuguaaaaucaugaccagcaaaacagacguuucuuccagcgucaucacaucacucggcgcgaucguaucaugcuauggcaaaacaaagugcaccgcuagcaauaaaaaccgaggaaucauaaaaaccuucagcaacggcugcgacuacguauccaacaaaggcgucgacaccguauccgucggaaacacccucuacugcgucaacaagcaagaaggacaaucacucuacgucaaaggcgaaccaaucauaaacuucuacgacccacucguauuccccucagacgaguucgacgcauccaucucccaagucaacgaaaagaucaaccaaucucucgccuuuauacgcaaaagcgacgaacuccuucacaacguaaacgucggcaaaagcaccacuaacauaaugaucaccacaaucauaauaguaaucaucguaauacuccuccuacucaucgccgugggccuauuccucuauugcaaagcccgauaaggacuaguuauaagacugacuagcccgaugggccucccaacgggcccuccuccccuccuugcaccgagauuaauaaaaaaaaaaaaaaaaaaaaaaaaaaaaaaaaaaaaaaaaaaaaaaaaaaaaaaaaaaaaaaaaugcaucccccccccccccccccccccccccccccccaaaggcucuuuucagagccaccagaauu

SEQ ID NO: 14678 - protein, 535 aa, Artificial Sequence
  derived and/or modified protein sequence (artificial) from HRSV(Memphis-37)__AIY60640.1__F_DSCav1_mut2
MELPILKTNAITTILAAVTLCFASSQNITEEFYQSTCSAVSKGYLGALRTGWYTSVITIELSNIKENKCNGTDAKVKLIKQELDKYKNAVTDLQLLMQSTPAAGSGSAICSGIAVCKVLHLEGEVNKIKNALLSTNKAVVSLSNGVSVLTFKVLDLKNYIDKQLLPILNKQSCSIPNIETVIEFQQKNNRLLEITREFSVNAGVTTPVSTYMLTNSELLSLINDMPITNDQKKLMSNNVQIVRQQSYSIMCIIKEEVLAYVVQLPLYGVIDTPCWKLHTSPLCTTNTKEGSNICLTRTDRGWYCDNAGSVSFFPQAETCKVQSNRVFCDTMNSLTLPSEVNLCNIDIFNPKYDCKIMTSKTDVSSSVITSLGAIVSCYGKTKCTASNKNRGIIKTFSNGCDYVSNKGVDTVSVGNTLYCVNKQEGQSLYVKGEPIINFYDPLVFPSDEFDASISQVNEKINQSLAFIRKSDELLHNVNVGKSTTNIMITTIIIVIIVILLLLIAVGLFLYCKARSTPVTLSKDQLSGINNIAFSN

SEQ ID NO: 14679 - RNA, 1608 nt, Artificial Sequence
  derived and/or modified CDS sequence (opt1) from HRSV(Memphis-37)__AIY60640.1__F_DSCav1_mut2
auggagcugcccauccucaagaccaacgccaucaccacgauccuggccgcggugacccugugcuucgccagcucccagaacaucaccgaggaguucuaccagagcacgugcuccgccgucagcaagggcuaccucggcgcccugcgcaccgggugguacaccagcgugaucaccaucgagcuguccaacaucaaggagaacaagugcaacggcaccgacgccaaggugaagcucaucaagcaggagcuggacaaguacaagaacgcggucacggaccugcagcuccugaugcagagcaccccggccgccggcuccgggagcgcgaucugcuccggcaucgccgucugcaaggugcugcaccucgagggcgaggugaacaagaucaagaacgcccugcuguccaccaacaaggccgucgugagccucuccaacggggugagcguccugaccuucaaggugcuggaccucaagaacuacaucgacaagcagcugcugcccauccugaacaagcagagcugcuccauccccaacaucgagaccgucaucgaguuccagcagaagaacaaccgccuccuggagaucacgcgggaguucagcgugaacgcgggcgugaccacccccgucuccaccuacaugcugacgaacagcgagcuccugucccugaucaacgacaugccgaucaccaacgaccagaagaagcucaugagcaacaacgugcagaucgugcgccagcaguccuacagcaucaugugcaucaucaaggaggagguccuggccuacguggugcagcugccccucuacggggucaucgacacccccugcuggaagcugcacaccagcccccugugcacgaccaacaccaaggagggcuccaacaucugccucacccggacggaccgcgggugguacugcgacaacgccggcagcguguccuucuucccgcaggccgagaccugcaagguccagagcaaccggguguucugcgacaccaugaacucccugacccugcccagcgaggugaaccucugcaacaucgacaucuucaaccccaaguacgacugcaagaucaugacguccaagaccgacgucagcuccagcgugaucaccucccugggcgccaucgugagcugcuacgggaagaccaagugcacggcgagcaacaagaaccgcggcaucaucaagaccuucuccaacgggugcgacuacgucagcaacaagggcguggacaccguguccgucggcaacacccuguacugcgugaacaagcaggagggccagagccucuacgugaagggggagcccaucaucaacuucuacgacccgcuggucuuccccuccgacgaguucgacgccagcaucucccaggugaacgagaagaucaaccagagccuggccuucauccggaaguccgacgagcuccugcacaacgugaacgucggcaagagcaccacgaacaucaugaucaccaccaucaucaucgugaucaucgugauccugcugcuccugaucgccgucgggcuguuccucuacugcaaggcccgcuccacccccgugacgcugagcaaggaccagcuguccgggaucaacaacaucgcguucagcaacuga

SEQ ID NO: 14680 - RNA, 1608 nt, Artificial Sequence
  derived and/or modified CDS sequence (opt1) from HRSV(Memphis-37)__AIY60640.1__F_DSCav1_mut2
auggagcugcccauccucaagaccaacgccaucaccacgauccuggccgcggugacccugugcuucgccagcucccagaacaucaccgaggaguucuaccagagcacgugcuccgccgucagcaagggcuaccucggggcccugcgcaccggcugguacaccuccgugaucaccaucgagcugagcaacaucaaggagaacaagugcaacgggaccgacgccaaggugaagcucaucaagcaggagcuggacaaguacaagaacgcggucacggaccugcagcuccugaugcaguccaccccggccgccggcagcggguccgccaucugcagcggcaucgcggugugcaaggugcugcaccucgagggcgaggucaacaagaucaagaacgcccugcuguccaccaacaaggccguggugagccucuccaacggggucagcgugcugaccuucaaggugcuggaccucaagaacuacaucgacaagcagcugcugcccauccucaacaagcaguccugcagcauccccaacaucgagacggucaucgaguuccagcagaagaacaaccggcugcuggagaucacccgcgaguucuccgugaacgccggcgugaccacccccgucagcacguacaugcucaccaacuccgagcugcugagccucaucaacgacaugccgaucaccaacgaccagaagaagcugaugagcaacaacgugcagaucgugcggcagcaguccuacagcaucaugugcaucaucaaggaggagguccuggccuacguggugcagcucccccuguacggggucaucgacacccccugcuggaagcugcacacgagcccccucugcaccaccaacaccaaggagggcuccaacaucugccugacgcgcaccgaccgggggugguacugcgacaacgcgggcuccgugagcuucuucccgcaggccgagaccugcaaggugcaguccaaccgcgucuucugcgacaccaugaacagccugacgcuccccuccgaggugaaccugugcaacaucgacaucuucaaccccaaguacgacugcaagaucaugaccagcaagaccgacgucuccagcuccgugaucaccagccugggcgccaucguguccugcuacgggaagacgaagugcaccgccagcaacaagaaccggggcaucaucaagaccuucuccaacgggugcgacuacgucagcaacaagggcguggacaccguguccgucggcaacacgcucuacugcgugaacaagcaggaggggcagagccuguacgugaagggcgagcccaucaucaacuucuacgacccgcuggucuuccccagcgacgaguucgacgccuccaucagccaggugaacgagaagaucaaccagucccucgcguucauccgcaagagcgacgagcugcugcacaacgugaacgucgggaaguccaccaccaacaucaugaucaccaccaucaucaucgugaucaucgugauccuccugcugcucaucgccgucggccuguuccuguacugcaaggcccggagcacgcccgugacccuguccaaggaccagcucagcgggaucaacaacaucgccuucuccaacuga

SEQ ID NO: 14681 - RNA, 1608 nt, Artificial Sequence
  derived and/or modified CDS sequence (opt2) from HRSV(Memphis-37)__AIY60640.1__F_DSCav1_mut2
auggagcuccccauccucaagaccaacgccaucaccaccauccucgccgccgucacccucugcuucgccuccucccagaacaucaccgaggaguucuaccaguccaccugcuccgccgucuccaagggcuaccucggcgcccuccgcaccggcugguacaccuccgucaucaccaucgagcucuccaacaucaaggagaacaagugcaacggcaccgacgccaaggucaagcucaucaagcaggagcucgacaaguacaagaacgccgucaccgaccuccagcuccucaugcaguccacccccgccgccggcuccggcuccgccaucugcuccggcaucgccgucugcaagguccuccaccucgagggcgaggucaacaagaucaagaacgcccuccucuccaccaacaaggccgucgucucccucuccaacggcgucuccguccucaccuucaagguccucgaccucaagaacuacaucgacaagcagcuccuccccauccucaacaagcaguccugcuccauccccaacaucgagaccgucaucgaguuccagcagaagaacaaccgccuccucgagaucacccgcgaguucuccgucaacgccggcgucaccacccccgucuccaccuacaugcucaccaacuccgagcuccucucccucaucaacgacaugcccaucaccaacgaccagaagaagcucauguccaacaacguccagaucguccgccagcaguccuacuccaucaugugcaucaucaaggaggagguccucgccuacgucguccagcucccccucuacggcgucaucgacacccccugcuggaagcuccacaccuccccccucugcaccaccaacaccaaggagggcuccaacaucugccucacccgcaccgaccgcggcugguacugcgacaacgccggcuccgucuccuucuucccccaggccgagaccugcaagguccaguccaaccgcgucuucugcgacaccaugaacucccucacccuccccuccgaggucaaccucugcaacaucgacaucuucaaccccaaguacgacugcaagaucaugaccuccaagaccgacgucuccuccuccgucaucaccucccucggcgccaucgucuccugcuacggcaagaccaagugcaccgccuccaacaagaaccgcggcaucaucaagaccuucuccaacggcugcgacuacgucuccaacaagggcgucgacaccgucuccgucggcaacacccucuacugcgucaacaagcaggagggccagucccucuacgucaagggcgagcccaucaucaacuucuacgacccccucgucuuccccuccgacgaguucgacgccuccaucucccaggucaacgagaagaucaaccagucccucgccuucauccgcaaguccgacgagcuccuccacaacgucaacgucggcaaguccaccaccaacaucaugaucaccaccaucaucaucgucaucaucgucauccuccuccuccucaucgccgucggccucuuccucuacugcaaggcccgcuccacccccgucacccucuccaaggaccagcucuccggcaucaacaacaucgccuucuccaacuga

SEQ ID NO: 14682 - RNA, 1608 nt, Artificial Sequence
  derived and/or modified CDS sequence (opt3) from HRSV(Memphis-37)__AIY60640.1__F_DSCav1_mut2
auggagcugcccauccucaagaccaacgccauuacaacuauacuugcugcagugacgcugugcuucgccagcucccagaauaucaccgaagaguuuuaccaaucuacauguucagcggucaguaaaggcuauuugggggcuuuaagaacuggaugguacaccagcguuauuacaaucgaacuguccaacauuaaggagaauaaaugcaacgguaccgacgccaaggugaaacuaaucaagcaggaacucgauaaguauaaaaaugcaguaacugaccugcagcuucugaugcagucuacuccugccgcuggcucggggucagcaauauguagcggaaucgccgugugcaaggucuugcaccucgagggcgaggugaacaaaauuaagaaugcucugcugaguaccaacaaagccguugugucccucucuaauggugucagcguguuaacguucaagguacuggaucuuaagaacuacaucgacaaacaauugcugccaauucuaaauaagcaguccuguucaaucccgaacauagaaacuguuauugaguuucagcagaaaaauaacaggcuccuggaaaucacccgggaguucagugugaaugcgggggucacaacucccgugagcaccuauaugcuuacaaacucugagcuguugucccucauuaacgauaugccuaucaccaaugaccaaaagaaacugaugucaaacaaugugcagaucguccgccagcagagcuacaguauuaugugcauaaucaaggaagagguuuuagcauaugugguacaacugccacucuacggagugauugauacgcccuguuggaaacuucauacuucuccucugugcacaaccaacacuaaggaaggcuccaauaucuguuugacacgaaccgaccguggcugguacugcgauaacgccgggagcgucucguuuuucccacaggcugagacguguaaggugcagucuaauagaguuuucugcgacaccaugaacucccuaacacugcccucagaagugaaucucugcaacauagauauuuucaauccuaaauaugacuguaagaucaugacaaguaaaaccgaugucagcuccucugugaucacaagccugggagccauuguaucaugcuacgguaagacuaaauguaccgcaaguaacaagaauaggggcaucauuaagacauuuuccaacgggugcgacuauguuagcaauaaaggaguggacaccgucucugugggcaacacucuuuacugugucaacaagcaagagggucagucacuguaugugaaaggggagccaauaaucaauuucuacgauccguugguuuuucccagugacgaauuugaugcuagcauuucccaggugaacgagaagaucaaucagucucucgccuuuauccggaaaucggacgaacuguuacacaacguaaaugucggaaagagcacgacaaacauuaugauaaccacuaucauuaucgugauuaucguuauacugcuacuccugaucgcggugggccuuuucuuguauugcaaggcccgcuccaccccugucacacugucaaaagaucaacucaguggcauuaauaacaucgcauucucuaauuga

SEQ ID NO: 14683 - RNA, 1608 nt, Artificial Sequence
  derived and/or modified CDS sequence (opt4) from HRSV(Memphis-37)__AIY60640.1__F_DSCav1_mut2
auggagcugcccauccugaagaccaacgccaucaccaccauccuggccgccgugacccugugcuucgccagcagccagaacaucaccgaggaguucuaccagagcaccugcagcgccgugagcaagggcuaccugggcgcccugagaaccggcugguacaccagcgugaucaccaucgagcugagcaacaucaaggagaacaagugcaacggcaccgacgccaaggugaagcugaucaagcaggagcuggacaaguacaagaacgccgugaccgaccugcagcugcugaugcagagcacccccgccgccggcagcggcagcgccaucugcagcggcaucgccgugugcaaggugcugcaccuggagggcgaggugaacaagaucaagaacgcccugcugagcaccaacaaggccguggugagccugagcaacggcgugagcgugcugaccuucaaggugcuggaccugaagaacuacaucgacaagcagcugcugcccauccugaacaagcagagcugcagcauccccaacaucgagaccgugaucgaguuccagcagaagaacaacagacugcuggagaucaccagagaguucagcgugaacgccggcgugaccacccccgugagcaccuacaugcugaccaacagcgagcugcugagccugaucaacgacaugcccaucaccaacgaccagaagaagcugaugagcaacaacgugcagaucgugagacagcagagcuacagcaucaugugcaucaucaaggaggaggugcuggccuacguggugcagcugccccuguacggcgugaucgacacccccugcuggaagcugcacaccagcccccugugcaccaccaacaccaaggagggcagcaacaucugccugaccagaaccgacagaggcugguacugcgacaacgccggcagcgugagcuucuucccccaggccgagaccugcaaggugcagagcaacagaguguucugcgacaccaugaacagccugacccugcccagcgaggugaaccugugcaacaucgacaucuucaaccccaaguacgacugcaagaucaugaccagcaagaccgacgugagcagcagcgugaucaccagccugggcgccaucgugagcugcuacggcaagaccaagugcaccgccagcaacaagaacagaggcaucaucaagaccuucagcaacggcugcgacuacgugagcaacaagggcguggacaccgugagcgugggcaacacccuguacugcgugaacaagcaggagggccagagccuguacgugaagggcgagcccaucaucaacuucuacgacccccugguguuccccagcgacgaguucgacgccagcaucagccaggugaacgagaagaucaaccagagccuggccuucaucagaaagagcgacgagcugcugcacaacgugaacgugggcaagagcaccaccaacaucaugaucaccaccaucaucaucgugaucaucgugauccugcugcugcugaucgccgugggccuguuccuguacugcaaggccagaagcacccccgugacccugagcaaggaccagcugagcggcaucaacaacaucgccuucagcaacuga

SEQ ID NO: 14684 - RNA, 1608 nt, Artificial Sequence
  derived and/or modified CDS sequence (opt5) from HRSV(Memphis-37)__AIY60640.1__F_DSCav1_mut2
auggagcugcccauccucaagaccaacgccauuacaacgauccuggcugccgugacccuuugcuucgcgagcucccagaauauuacagaagaguuuuaccaaucuaccuguagcgcugucuccaaaggcuaucugggggcccucagaacaggaugguacaccucuguuaucacaauugaacugagcaacaucaaggagaauaaaugcaacggcaccgacgccaaggugaaacuuaucaagcaggaacuggauaaguauaaaaaugcugugacggaccuccagcugcugaugcaguccaccccugccgcugggucuggaagcgccauuuguuccggcaucgcggucugcaaggugcuccaccuggagggggagguuaacaaaauuaagaaugcccuucugagcacaaacaaagcuguggucucucucuccaauggagugagcguucugaccuucaaggugcuugaucugaagaacuacaucgacaaacaacuccugccgauucugaauaagcagucuuguuccauccccaacauugaaacagucaucgaguuucagcagaaaaauaaccggcuccuggaaaucacccgcgaguucagcgugaaugccggcgugacgacaccugucucuaccuauaugcuuacaaacuccgagcugcucagccugauuaacgauaugcccaucaccaaugaccaaaagaaacuuauguccaacaauguucagauugugagacagcagucuuacagcaucaugugcauuaucaaggaagaggugcuggcuuaugucgugcaacucccucuguacggcguuaucgauacccccuguuggaaacugcauacauccccucucugcacgaccaacacaaaggaagggagcaauauuugucugacccggacagaccgcggaugguacugcgauaacgccggcucuguguccuuuuucccgcaggcggagaccuguaagguccagagcaauagaguguuuugcgacacgaugaacucucuuacacugcccagcgaaguuaaucucugcaacaucgauauuuucaauccuaaauaugacuguaagaucaugaccuccaaaaccgaugugucuagcuccgucauuacaagccugggggccaucgugucuugcuacggaaagaccaaauguacagcuuccaacaagaaucggggcaucauuaagacguuuagcaacgggugcgacuaugucucuaauaaaggaguggacaccguuuccgugggcaacacacuuuacugugucaacaagcaagagggccagagccuguaugugaaaggggagcccaucauuaauuucuacgauccucucguuuuucccuccgacgaguucgaugccucuaucagccaggugaacgaaaagauuaaucagucccuggcuuuuauccgcaaaucugacgaacugcuccacaacgucaaugugggaaagagcaccacaaacauuaugaucaccacgaucauuaucgugauuaucguuauucugcuucugcucaucgccgucggccuguuccuguauugcaaggccagauccaccccggugacacuuagcaaagaucaacucucugggaucaauaacauugcuuucuccaauuga

SEQ ID NO: 14685 - RNA, 1608 nt, Artificial Sequence
  derived and/or modified CDS sequence (opt6) from HRSV(Memphis-37)__AIY60640.1__F_DSCav1_mut2
auggagcuuccaauauuaaaaacaaacgcuauaacaacuauacucgcagcaguuacacucugcuucgcauccucacaaaacauaacugaagaauuuuaccaauccacuugcucagccguaucaaaaggauaucuaggagcacuuagaaccggaugguauacaucagugauaacaauagaacuaagcaacauaaaagaaaacaagugcaacggaacugacgcaaaagucaaacuaaucaaacaagaacuagacaaauacaaaaacgcaguaacagaccuacaauuacuaaugcaaucaacaccagcagcaggaucagguucagccauaugcucagguaucgcuguaugcaaaguccuucaccuagaaggugaaguaaacaaaauuaaaaacgcccuacucaguacaaauaaagcugucguaaguuuaucaaacggaguaucaguccuuacauucaaaguauuagaccuaaaaaauuauauagacaaacaauuacuaccaauacucaacaaacaaucaugcucaauaccaaauauagaaaccguaauagaauuucagcaaaaaaauaacagauuacuagaaauaaccagagaauuuucagucaacgcaggagucacaacacccgucucaaccuacaugcuaaccaacucagaacuucuaucucuuaucaacgacaugcccauaaccaaugaucaaaaaaaauuaaugucuaauaacguucaaauaguaagacaacaaucauacucaauaaugugcauaaucaaagaagaaguauuagcauacguaguacaacuaccccuauauggaguaauagacacacccugcuggaaacuacacacauccccccucuguacaacaaacacuaaagaaggaucaaacauuugccuaacaagaacagaccgcggaugguacugcgacaacgcaggcuccguaucuuucuuuccacaagccgaaacuuguaaaguucaaucaaacagaguauuuugcgauacaaugaacuccuuaacauuaccuucagaaguaaaccuaugcaacauagacaucuucaacccaaaauacgacugcaaaauaaugaccucaaaaacagacguauccucaucagucauaaccuccuuaggagcaauaguaucauguuacggaaaaacaaaauguacagcaucaaauaaaaauagaggaauaauaaaaaccuucuccaacggaugcgacuacguauccaauaaaggaguagacaccguaucaguaggaaacacacuauacuguguaaacaaacaagaaggccaaucucuauauguaaaaggcgaaccaaucauaaauuuuuacgacccacuugucuuccccuccgacgaauuugacgcaagcauaucacaaguaaacgaaaaaaucaaccaaagccuagccuucauaaggaaaucugacgaauuacuucauaacguaaauguuggaaaaucaaccacaaacauaaugauaaccaccaucauaauuguaauaauaguaauacuacuacuacuaauugcaguaggacucuuccuauauugcaaagcucgcucaacaccaguuaccuuaucaaaagaccaacuaucuggaauaaacaacauagccuuuuccaacuaa

SEQ ID NO: 14686 - RNA, 1608 nt, Artificial Sequence
  derived and/or modified CDS sequence (opt11) from HRSV(Memphis-37)__AIY60640.1__F_DSCav1_mut2
auggaacucccaauccuaaaaaccaacgccaucaccaccauccucgccgcugucaccuuaugcuuugccagcagccaaaacaucaccgaagaauuuuaccaaucaacaugcuccgccgucucaaaaggauaccucggcgcccuacgcaccggcugguacacaagcgucauaaccaucgagcucuccaacaucaaggaaaacaaaugcaauggaaccgacgccaaagucaaacuaaucaaacaagaacuagacaaguacaagaacgcagucaccgaccuccaacuccucaugcaguccacccccgcagcaggcucuggcucagcaauaugcuccggcaucgcugucugcaaaguccuacaccucgaaggcgaagucaacaaaaucaaaaacgcccuacuguccacaaacaaagccgucgucucccuauccaacggcgucucgguccuaaccuuuaagguucucgaucucaaaaauuacauagacaaacaacuacuccccauccucaacaaacaaucuugcucaauccccaacaucgaaaccgucaucgaguuccaacagaaaaacaacagacuacucgaaaucacccgcgaguucucagucaacgcgggcgucacaacacccgucagcaccuacaugcuaaccaacuccgaacuccucagccucauuaacgacaugcccaucaccaacgaccaaaagaaacuuauguccaacaacguucaaaucguccgccaacaauccuacuccaucaugugcaucaucaaagaagaaguacucgccuacguaguccaacugccccucuacggcgucaucgauaccccaugcuggaaacuacacaccagcccccucugcaccaccaacaccaaagaaggcuccaauaucugcuuaacccgcacagaccguggcugguacugcgauaacgccggcuccgucuccuucuucccccaagcagaaaccugcaaaguacaauccaaccgagucuucugugacaccaugaacucccuaacccuuccaucagaagucaaccucugcaacaucgacaucuucaaccccaaguacgacugcaaaaucaugacauccaaaaccgaugucucaagcagcgucauaaccucacucggcgcuaucguaagcugcuacggcaaaaccaaaugcaccgcaucaaacaaaaaccgcggaaucaucaaaaccuucagcaacggaugcgacuacguuuccaacaaaggcguagacaccgucuccgucggaaacacccucuacugcguaaacaaacaggaaggccaaucccucuacgucaaaggcgaacccaucauaaacuucuacgauccccuugucuucccguccgaugaguucgacgccuccaucucgcaagucaacgaaaagauaaaccaaucacuagcauucauccguaaauccgacgaacuccuccacaacgucaacgucggaaaauccaccaccaacauaaugaucaccaccauaaucaucgucaucaucguaauacuauuacuccucauagccgucggccucuuccuauauugcaaagcccgaucaacccccguaacccuuucuaaagaccaacuguccggaaucaacaacaucgcuuucagcaacuga

SEQ ID NO: 14687 - RNA, 1884 nt, Artificial Sequence
  mRNA product Design a-1 comprising derived and/or modified sequence from HRSV(Memphis-37)__AIY60640.1__F_DSCav1_mut2 (opt1)
gggagagucccgcagucggcguccagcggcucugcuuguucgugugugugucguugcaggccuuauucaagcuuaccauggagcugcccauccucaagaccaacgccaucaccacgauccuggccgcggugacccugugcuucgccagcucccagaacaucaccgaggaguucuaccagagcacgugcuccgccgucagcaagggcuaccucggcgcccugcgcaccgggugguacaccagcgugaucaccaucgagcuguccaacaucaaggagaacaagugcaacggcaccgacgccaaggugaagcucaucaagcaggagcuggacaaguacaagaacgcggucacggaccugcagcuccugaugcagagcaccccggccgccggcuccgggagcgcgaucugcuccggcaucgccgucugcaaggugcugcaccucgagggcgaggugaacaagaucaagaacgcccugcuguccaccaacaaggccgucgugagccucuccaacggggugagcguccugaccuucaaggugcuggaccucaagaacuacaucgacaagcagcugcugcccauccugaacaagcagagcugcuccauccccaacaucgagaccgucaucgaguuccagcagaagaacaaccgccuccuggagaucacgcgggaguucagcgugaacgcgggcgugaccacccccgucuccaccuacaugcugacgaacagcgagcuccugucccugaucaacgacaugccgaucaccaacgaccagaagaagcucaugagcaacaacgugcagaucgugcgccagcaguccuacagcaucaugugcaucaucaaggaggagguccuggccuacguggugcagcugccccucuacggggucaucgacacccccugcuggaagcugcacaccagcccccugugcacgaccaacaccaaggagggcuccaacaucugccucacccggacggaccgcgggugguacugcgacaacgccggcagcguguccuucuucccgcaggccgagaccugcaagguccagagcaaccggguguucugcgacaccaugaacucccugacccugcccagcgaggugaaccucugcaacaucgacaucuucaaccccaaguacgacugcaagaucaugacguccaagaccgacgucagcuccagcgugaucaccucccugggcgccaucgugagcugcuacgggaagaccaagugcacggcgagcaacaagaaccgcggcaucaucaagaccuucuccaacgggugcgacuacgucagcaacaagggcguggacaccguguccgucggcaacacccuguacugcgugaacaagcaggagggccagagccucuacgugaagggggagcccaucaucaacuucuacgacccgcuggucuuccccuccgacgaguucgacgccagcaucucccaggugaacgagaagaucaaccagagccuggccuucauccggaaguccgacgagcuccugcacaacgugaacgucggcaagagcaccacgaacaucaugaucaccaccaucaucaucgugaucaucgugauccugcugcuccugaucgccgucgggcuguuccucuacugcaaggcccgcuccacccccgugacgcugagcaaggaccagcuguccgggaucaacaacaucgcguucagcaacugaggacuagucccuguucccagagcccacuuuuuuuucuuuuuuugaaauaaaauagccugucuuucagaucuaaaaaaaaaaaaaaaaaaaaaaaaaaaaaaaaaaaaaaaaaaaaaaaaaaaaaaaaaaaaaaaaugcaucccccccccccccccccccccccccccccccaaaggcucuuuucagagccaccagaauu

SEQ ID NO: 14688 - RNA, 1884 nt, Artificial Sequence
  mRNA product Design a-1 comprising derived and/or modified sequence from HRSV(Memphis-37)__AIY60640.1__F_DSCav1_mut2 (opt1)
gggagagucccgcagucggcguccagcggcucugcuuguucgugugugugucguugcaggccuuauucaagcuuaccauggagcugcccauccucaagaccaacgccaucaccacgauccuggccgcggugacccugugcuucgccagcucccagaacaucaccgaggaguucuaccagagcacgugcuccgccgucagcaagggcuaccucggggcccugcgcaccggcugguacaccuccgugaucaccaucgagcugagcaacaucaaggagaacaagugcaacgggaccgacgccaaggugaagcucaucaagcaggagcuggacaaguacaagaacgcggucacggaccugcagcuccugaugcaguccaccccggccgccggcagcggguccgccaucugcagcggcaucgcggugugcaaggugcugcaccucgagggcgaggucaacaagaucaagaacgcccugcuguccaccaacaaggccguggugagccucuccaacggggucagcgugcugaccuucaaggugcuggaccucaagaacuacaucgacaagcagcugcugcccauccucaacaagcaguccugcagcauccccaacaucgagacggucaucgaguuccagcagaagaacaaccggcugcuggagaucacccgcgaguucuccgugaacgccggcgugaccacccccgucagcacguacaugcucaccaacuccgagcugcugagccucaucaacgacaugccgaucaccaacgaccagaagaagcugaugagcaacaacgugcagaucgugcggcagcaguccuacagcaucaugugcaucaucaaggaggagguccuggccuacguggugcagcucccccuguacggggucaucgacacccccugcuggaagcugcacacgagcccccucugcaccaccaacaccaaggagggcuccaacaucugccugacgcgcaccgaccgggggugguacugcgacaacgcgggcuccgugagcuucuucccgcaggccgagaccugcaaggugcaguccaaccgcgucuucugcgacaccaugaacagccugacgcuccccuccgaggugaaccugugcaacaucgacaucuucaaccccaaguacgacugcaagaucaugaccagcaagaccgacgucuccagcuccgugaucaccagccugggcgccaucguguccugcuacgggaagacgaagugcaccgccagcaacaagaaccggggcaucaucaagaccuucuccaacgggugcgacuacgucagcaacaagggcguggacaccguguccgucggcaacacgcucuacugcgugaacaagcaggaggggcagagccuguacgugaagggcgagcccaucaucaacuucuacgacccgcuggucuuccccagcgacgaguucgacgccuccaucagccaggugaacgagaagaucaaccagucccucgcguucauccgcaagagcgacgagcugcugcacaacgugaacgucgggaaguccaccaccaacaucaugaucaccaccaucaucaucgugaucaucgugauccuccugcugcucaucgccgucggccuguuccuguacugcaaggcccggagcacgcccgugacccuguccaaggaccagcucagcgggaucaacaacaucgccuucuccaacugaggacuagucccuguucccagagcccacuuuuuuuucuuuuuuugaaauaaaauagccugucuuucagaucuaaaaaaaaaaaaaaaaaaaaaaaaaaaaaaaaaaaaaaaaaaaaaaaaaaaaaaaaaaaaaaaaugcaucccccccccccccccccccccccccccccccaaaggcucuuuucagagccaccagaauu

SEQ ID NO: 14689 - RNA, 1884 nt, Artificial Sequence
  mRNA product Design a-1 comprising derived and/or modified sequence from HRSV(Memphis-37)__AIY60640.1__F_DSCav1_mut2 (opt2)
gggagagucccgcagucggcguccagcggcucugcuuguucgugugugugucguugcaggccuuauucaagcuuaccauggagcuccccauccucaagaccaacgccaucaccaccauccucgccgccgucacccucugcuucgccuccucccagaacaucaccgaggaguucuaccaguccaccugcuccgccgucuccaagggcuaccucggcgcccuccgcaccggcugguacaccuccgucaucaccaucgagcucuccaacaucaaggagaacaagugcaacggcaccgacgccaaggucaagcucaucaagcaggagcucgacaaguacaagaacgccgucaccgaccuccagcuccucaugcaguccacccccgccgccggcuccggcuccgccaucugcuccggcaucgccgucugcaagguccuccaccucgagggcgaggucaacaagaucaagaacgcccuccucuccaccaacaaggccgucgucucccucuccaacggcgucuccguccucaccuucaagguccucgaccucaagaacuacaucgacaagcagcuccuccccauccucaacaagcaguccugcuccauccccaacaucgagaccgucaucgaguuccagcagaagaacaaccgccuccucgagaucacccgcgaguucuccgucaacgccggcgucaccacccccgucuccaccuacaugcucaccaacuccgagcuccucucccucaucaacgacaugcccaucaccaacgaccagaagaagcucauguccaacaacguccagaucguccgccagcaguccuacuccaucaugugcaucaucaaggaggagguccucgccuacgucguccagcucccccucuacggcgucaucgacacccccugcuggaagcuccacaccuccccccucugcaccaccaacaccaaggagggcuccaacaucugccucacccgcaccgaccgcggcugguacugcgacaacgccggcuccgucuccuucuucccccaggccgagaccugcaagguccaguccaaccgcgucuucugcgacaccaugaacucccucacccuccccuccgaggucaaccucugcaacaucgacaucuucaaccccaaguacgacugcaagaucaugaccuccaagaccgacgucuccuccuccgucaucaccucccucggcgccaucgucuccugcuacggcaagaccaagugcaccgccuccaacaagaaccgcggcaucaucaagaccuucuccaacggcugcgacuacgucuccaacaagggcgucgacaccgucuccgucggcaacacccucuacugcgucaacaagcaggagggccagucccucuacgucaagggcgagcccaucaucaacuucuacgacccccucgucuuccccuccgacgaguucgacgccuccaucucccaggucaacgagaagaucaaccagucccucgccuucauccgcaaguccgacgagcuccuccacaacgucaacgucggcaaguccaccaccaacaucaugaucaccaccaucaucaucgucaucaucgucauccuccuccuccucaucgccgucggccucuuccucuacugcaaggcccgcuccacccccgucacccucuccaaggaccagcucuccggcaucaacaacaucgccuucuccaacugaggacuagucccuguucccagagcccacuuuuuuuucuuuuuuugaaauaaaauagccugucuuucagaucuaaaaaaaaaaaaaaaaaaaaaaaaaaaaaaaaaaaaaaaaaaaaaaaaaaaaaaaaaaaaaaaaugcaucccccccccccccccccccccccccccccccaaaggcucuuuucagagccaccagaauu

SEQ ID NO: 14690 - RNA, 1884 nt, Artificial Sequence
  mRNA product Design a-1 comprising derived and/or modified sequence from HRSV(Memphis-37)__AIY60640.1__F_DSCav1_mut2 (opt3)
gggagagucccgcagucggcguccagcggcucugcuuguucgugugugugucguugcaggccuuauucaagcuuaccauggagcugcccauccucaagaccaacgccauuacaacuauacuugcugcagugacgcugugcuucgccagcucccagaauaucaccgaagaguuuuaccaaucuacauguucagcggucaguaaaggcuauuugggggcuuuaagaacuggaugguacaccagcguuauuacaaucgaacuguccaacauuaaggagaauaaaugcaacgguaccgacgccaaggugaaacuaaucaagcaggaacucgauaaguauaaaaaugcaguaacugaccugcagcuucugaugcagucuacuccugccgcuggcucggggucagcaauauguagcggaaucgccgugugcaaggucuugcaccucgagggcgaggugaacaaaauuaagaaugcucugcugaguaccaacaaagccguugugucccucucuaauggugucagcguguuaacguucaagguacuggaucuuaagaacuacaucgacaaacaauugcugccaauucuaaauaagcaguccuguucaaucccgaacauagaaacuguuauugaguuucagcagaaaaauaacaggcuccuggaaaucacccgggaguucagugugaaugcgggggucacaacucccgugagcaccuauaugcuuacaaacucugagcuguugucccucauuaacgauaugccuaucaccaaugaccaaaagaaacugaugucaaacaaugugcagaucguccgccagcagagcuacaguauuaugugcauaaucaaggaagagguuuuagcauaugugguacaacugccacucuacggagugauugauacgcccuguuggaaacuucauacuucuccucugugcacaaccaacacuaaggaaggcuccaauaucuguuugacacgaaccgaccguggcugguacugcgauaacgccgggagcgucucguuuuucccacaggcugagacguguaaggugcagucuaauagaguuuucugcgacaccaugaacucccuaacacugcccucagaagugaaucucugcaacauagauauuuucaauccuaaauaugacuguaagaucaugacaaguaaaaccgaugucagcuccucugugaucacaagccugggagccauuguaucaugcuacgguaagacuaaauguaccgcaaguaacaagaauaggggcaucauuaagacauuuuccaacgggugcgacuauguuagcaauaaaggaguggacaccgucucugugggcaacacucuuuacugugucaacaagcaagagggucagucacuguaugugaaaggggagccaauaaucaauuucuacgauccguugguuuuucccagugacgaauuugaugcuagcauuucccaggugaacgagaagaucaaucagucucucgccuuuauccggaaaucggacgaacuguuacacaacguaaaugucggaaagagcacgacaaacauuaugauaaccacuaucauuaucgugauuaucguuauacugcuacuccugaucgcggugggccuuuucuuguauugcaaggcccgcuccaccccugucacacugucaaaagaucaacucaguggcauuaauaacaucgcauucucuaauugaggacuagucccuguucccagagcccacuuuuuuuucuuuuuuugaaauaaaauagccugucuuucagaucuaaaaaaaaaaaaaaaaaaaaaaaaaaaaaaaaaaaaaaaaaaaaaaaaaaaaaaaaaaaaaaaaugcaucccccccccccccccccccccccccccccccaaaggcucuuuucagagccaccagaauu

SEQ ID NO: 14691 - RNA, 1884 nt, Artificial Sequence
  mRNA product Design a-1 comprising derived and/or modified sequence from HRSV(Memphis-37)__AIY60640.1__F_DSCav1_mut2 (opt4)
gggagagucccgcagucggcguccagcggcucugcuuguucgugugugugucguugcaggccuuauucaagcuuaccauggagcugcccauccugaagaccaacgccaucaccaccauccuggccgccgugacccugugcuucgccagcagccagaacaucaccgaggaguucuaccagagcaccugcagcgccgugagcaagggcuaccugggcgcccugagaaccggcugguacaccagcgugaucaccaucgagcugagcaacaucaaggagaacaagugcaacggcaccgacgccaaggugaagcugaucaagcaggagcuggacaaguacaagaacgccgugaccgaccugcagcugcugaugcagagcacccccgccgccggcagcggcagcgccaucugcagcggcaucgccgugugcaaggugcugcaccuggagggcgaggugaacaagaucaagaacgcccugcugagcaccaacaaggccguggugagccugagcaacggcgugagcgugcugaccuucaaggugcuggaccugaagaacuacaucgacaagcagcugcugcccauccugaacaagcagagcugcagcauccccaacaucgagaccgugaucgaguuccagcagaagaacaacagacugcuggagaucaccagagaguucagcgugaacgccggcgugaccacccccgugagcaccuacaugcugaccaacagcgagcugcugagccugaucaacgacaugcccaucaccaacgaccagaagaagcugaugagcaacaacgugcagaucgugagacagcagagcuacagcaucaugugcaucaucaaggaggaggugcuggccuacguggugcagcugccccuguacggcgugaucgacacccccugcuggaagcugcacaccagcccccugugcaccaccaacaccaaggagggcagcaacaucugccugaccagaaccgacagaggcugguacugcgacaacgccggcagcgugagcuucuucccccaggccgagaccugcaaggugcagagcaacagaguguucugcgacaccaugaacagccugacccugcccagcgaggugaaccugugcaacaucgacaucuucaaccccaaguacgacugcaagaucaugaccagcaagaccgacgugagcagcagcgugaucaccagccugggcgccaucgugagcugcuacggcaagaccaagugcaccgccagcaacaagaacagaggcaucaucaagaccuucagcaacggcugcgacuacgugagcaacaagggcguggacaccgugagcgugggcaacacccuguacugcgugaacaagcaggagggccagagccuguacgugaagggcgagcccaucaucaacuucuacgacccccugguguuccccagcgacgaguucgacgccagcaucagccaggugaacgagaagaucaaccagagccuggccuucaucagaaagagcgacgagcugcugcacaacgugaacgugggcaagagcaccaccaacaucaugaucaccaccaucaucaucgugaucaucgugauccugcugcugcugaucgccgugggccuguuccuguacugcaaggccagaagcacccccgugacccugagcaaggaccagcugagcggcaucaacaacaucgccuucagcaacugaggacuagucccuguucccagagcccacuuuuuuuucuuuuuuugaaauaaaauagccugucuuucagaucuaaaaaaaaaaaaaaaaaaaaaaaaaaaaaaaaaaaaaaaaaaaaaaaaaaaaaaaaaaaaaaaaugcaucccccccccccccccccccccccccccccccaaaggcucuuuucagagccaccagaauu

SEQ ID NO: 14692 - RNA, 1884 nt, Artificial Sequence
  mRNA product Design a-1 comprising derived and/or modified sequence from HRSV(Memphis-37)__AIY60640.1__F_DSCav1_mut2 (opt5)
gggagagucccgcagucggcguccagcggcucugcuuguucgugugugugucguugcaggccuuauucaagcuuaccauggagcugcccauccucaagaccaacgccauuacaacgauccuggcugccgugacccuuugcuucgcgagcucccagaauauuacagaagaguuuuaccaaucuaccuguagcgcugucuccaaaggcuaucugggggcccucagaacaggaugguacaccucuguuaucacaauugaacugagcaacaucaaggagaauaaaugcaacggcaccgacgccaaggugaaacuuaucaagcaggaacuggauaaguauaaaaaugcugugacggaccuccagcugcugaugcaguccaccccugccgcugggucuggaagcgccauuuguuccggcaucgcggucugcaaggugcuccaccuggagggggagguuaacaaaauuaagaaugcccuucugagcacaaacaaagcuguggucucucucuccaauggagugagcguucugaccuucaaggugcuugaucugaagaacuacaucgacaaacaacuccugccgauucugaauaagcagucuuguuccauccccaacauugaaacagucaucgaguuucagcagaaaaauaaccggcuccuggaaaucacccgcgaguucagcgugaaugccggcgugacgacaccugucucuaccuauaugcuuacaaacuccgagcugcucagccugauuaacgauaugcccaucaccaaugaccaaaagaaacuuauguccaacaauguucagauugugagacagcagucuuacagcaucaugugcauuaucaaggaagaggugcuggcuuaugucgugcaacucccucuguacggcguuaucgauacccccuguuggaaacugcauacauccccucucugcacgaccaacacaaaggaagggagcaauauuugucugacccggacagaccgcggaugguacugcgauaacgccggcucuguguccuuuuucccgcaggcggagaccuguaagguccagagcaauagaguguuuugcgacacgaugaacucucuuacacugcccagcgaaguuaaucucugcaacaucgauauuuucaauccuaaauaugacuguaagaucaugaccuccaaaaccgaugugucuagcuccgucauuacaagccugggggccaucgugucuugcuacggaaagaccaaauguacagcuuccaacaagaaucggggcaucauuaagacguuuagcaacgggugcgacuaugucucuaauaaaggaguggacaccguuuccgugggcaacacacuuuacugugucaacaagcaagagggccagagccuguaugugaaaggggagcccaucauuaauuucuacgauccucucguuuuucccuccgacgaguucgaugccucuaucagccaggugaacgaaaagauuaaucagucccuggcuuuuauccgcaaaucugacgaacugcuccacaacgucaaugugggaaagagcaccacaaacauuaugaucaccacgaucauuaucgugauuaucguuauucugcuucugcucaucgccgucggccuguuccuguauugcaaggccagauccaccccggugacacuuagcaaagaucaacucucugggaucaauaacauugcuuucuccaauugaggacuagucccuguucccagagcccacuuuuuuuucuuuuuuugaaauaaaauagccugucuuucagaucuaaaaaaaaaaaaaaaaaaaaaaaaaaaaaaaaaaaaaaaaaaaaaaaaaaaaaaaaaaaaaaaaugcaucccccccccccccccccccccccccccccccaaaggcucuuuucagagccaccagaauu

SEQ ID NO: 14693 - RNA, 1884 nt, Artificial Sequence
  mRNA product Design a-1 comprising derived and/or modified sequence from HRSV(Memphis-37)__AIY60640.1__F_DSCav1_mut2 (opt6)
gggagagucccgcagucggcguccagcggcucugcuuguucgugugugugucguugcaggccuuauucaagcuuaccauggagcuuccaauauuaaaaacaaacgcuauaacaacuauacucgcagcaguuacacucugcuucgcauccucacaaaacauaacugaagaauuuuaccaauccacuugcucagccguaucaaaaggauaucuaggagcacuuagaaccggaugguauacaucagugauaacaauagaacuaagcaacauaaaagaaaacaagugcaacggaacugacgcaaaagucaaacuaaucaaacaagaacuagacaaauacaaaaacgcaguaacagaccuacaauuacuaaugcaaucaacaccagcagcaggaucagguucagccauaugcucagguaucgcuguaugcaaaguccuucaccuagaaggugaaguaaacaaaauuaaaaacgcccuacucaguacaaauaaagcugucguaaguuuaucaaacggaguaucaguccuuacauucaaaguauuagaccuaaaaaauuauauagacaaacaauuacuaccaauacucaacaaacaaucaugcucaauaccaaauauagaaaccguaauagaauuucagcaaaaaaauaacagauuacuagaaauaaccagagaauuuucagucaacgcaggagucacaacacccgucucaaccuacaugcuaaccaacucagaacuucuaucucuuaucaacgacaugcccauaaccaaugaucaaaaaaaauuaaugucuaauaacguucaaauaguaagacaacaaucauacucaauaaugugcauaaucaaagaagaaguauuagcauacguaguacaacuaccccuauauggaguaauagacacacccugcuggaaacuacacacauccccccucuguacaacaaacacuaaagaaggaucaaacauuugccuaacaagaacagaccgcggaugguacugcgacaacgcaggcuccguaucuuucuuuccacaagccgaaacuuguaaaguucaaucaaacagaguauuuugcgauacaaugaacuccuuaacauuaccuucagaaguaaaccuaugcaacauagacaucuucaacccaaaauacgacugcaaaauaaugaccucaaaaacagacguauccucaucagucauaaccuccuuaggagcaauaguaucauguuacggaaaaacaaaauguacagcaucaaauaaaaauagaggaauaauaaaaaccuucuccaacggaugcgacuacguauccaauaaaggaguagacaccguaucaguaggaaacacacuauacuguguaaacaaacaagaaggccaaucucuauauguaaaaggcgaaccaaucauaaauuuuuacgacccacuugucuuccccuccgacgaauuugacgcaagcauaucacaaguaaacgaaaaaaucaaccaaagccuagccuucauaaggaaaucugacgaauuacuucauaacguaaauguuggaaaaucaaccacaaacauaaugauaaccaccaucauaauuguaauaauaguaauacuacuacuacuaauugcaguaggacucuuccuauauugcaaagcucgcucaacaccaguuaccuuaucaaaagaccaacuaucuggaauaaacaacauagccuuuuccaacuaaggacuagucccuguucccagagcccacuuuuuuuucuuuuuuugaaauaaaauagccugucuuucagaucuaaaaaaaaaaaaaaaaaaaaaaaaaaaaaaaaaaaaaaaaaaaaaaaaaaaaaaaaaaaaaaaaugcaucccccccccccccccccccccccccccccccaaaggcucuuuucagagccaccagaauu

SEQ ID NO: 14694 - RNA, 1884 nt, Artificial Sequence
  mRNA product Design a-1 comprising derived and/or modified sequence from HRSV(Memphis-37)__AIY60640.1__F_DSCav1_mut2 (opt11)
gggagagucccgcagucggcguccagcggcucugcuuguucgugugugugucguugcaggccuuauucaagcuuaccauggaacucccaauccuaaaaaccaacgccaucaccaccauccucgccgcugucaccuuaugcuuugccagcagccaaaacaucaccgaagaauuuuaccaaucaacaugcuccgccgucucaaaaggauaccucggcgcccuacgcaccggcugguacacaagcgucauaaccaucgagcucuccaacaucaaggaaaacaaaugcaauggaaccgacgccaaagucaaacuaaucaaacaagaacuagacaaguacaagaacgcagucaccgaccuccaacuccucaugcaguccacccccgcagcaggcucuggcucagcaauaugcuccggcaucgcugucugcaaaguccuacaccucgaaggcgaagucaacaaaaucaaaaacgcccuacuguccacaaacaaagccgucgucucccuauccaacggcgucucgguccuaaccuuuaagguucucgaucucaaaaauuacauagacaaacaacuacuccccauccucaacaaacaaucuugcucaauccccaacaucgaaaccgucaucgaguuccaacagaaaaacaacagacuacucgaaaucacccgcgaguucucagucaacgcgggcgucacaacacccgucagcaccuacaugcuaaccaacuccgaacuccucagccucauuaacgacaugcccaucaccaacgaccaaaagaaacuuauguccaacaacguucaaaucguccgccaacaauccuacuccaucaugugcaucaucaaagaagaaguacucgccuacguaguccaacugccccucuacggcgucaucgauaccccaugcuggaaacuacacaccagcccccucugcaccaccaacaccaaagaaggcuccaauaucugcuuaacccgcacagaccguggcugguacugcgauaacgccggcuccgucuccuucuucccccaagcagaaaccugcaaaguacaauccaaccgagucuucugugacaccaugaacucccuaacccuuccaucagaagucaaccucugcaacaucgacaucuucaaccccaaguacgacugcaaaaucaugacauccaaaaccgaugucucaagcagcgucauaaccucacucggcgcuaucguaagcugcuacggcaaaaccaaaugcaccgcaucaaacaaaaaccgcggaaucaucaaaaccuucagcaacggaugcgacuacguuuccaacaaaggcguagacaccgucuccgucggaaacacccucuacugcguaaacaaacaggaaggccaaucccucuacgucaaaggcgaacccaucauaaacuucuacgauccccuugucuucccguccgaugaguucgacgccuccaucucgcaagucaacgaaaagauaaaccaaucacuagcauucauccguaaauccgacgaacuccuccacaacgucaacgucggaaaauccaccaccaacauaaugaucaccaccauaaucaucgucaucaucguaauacuauuacuccucauagccgucggccucuuccuauauugcaaagcccgaucaacccccguaacccuuucuaaagaccaacuguccggaaucaacaacaucgcuuucagcaacugaggacuagucccuguucccagagcccacuuuuuuuucuuuuuuugaaauaaaauagccugucuuucagaucuaaaaaaaaaaaaaaaaaaaaaaaaaaaaaaaaaaaaaaaaaaaaaaaaaaaaaaaaaaaaaaaaugcaucccccccccccccccccccccccccccccccaaaggcucuuuucagagccaccagaauu

SEQ ID NO: 14695 - RNA, 1903 nt, Artificial Sequence
  mRNA product Design a-2 comprising derived and/or modified sequence from HRSV(Memphis-37)__AIY60640.1__F_DSCav1_mut2 (opt1)
gggagaguccgcucagccagguugcagaagcggcuuagcguguguccuaaucuucucucugcguguagguaggccugugccgcaaacaagcuuaccauggagcugcccauccucaagaccaacgccaucaccacgauccuggccgcggugacccugugcuucgccagcucccagaacaucaccgaggaguucuaccagagcacgugcuccgccgucagcaagggcuaccucggcgcccugcgcaccgggugguacaccagcgugaucaccaucgagcuguccaacaucaaggagaacaagugcaacggcaccgacgccaaggugaagcucaucaagcaggagcuggacaaguacaagaacgcggucacggaccugcagcuccugaugcagagcaccccggccgccggcuccgggagcgcgaucugcuccggcaucgccgucugcaaggugcugcaccucgagggcgaggugaacaagaucaagaacgcccugcuguccaccaacaaggccgucgugagccucuccaacggggugagcguccugaccuucaaggugcuggaccucaagaacuacaucgacaagcagcugcugcccauccugaacaagcagagcugcuccauccccaacaucgagaccgucaucgaguuccagcagaagaacaaccgccuccuggagaucacgcgggaguucagcgugaacgcgggcgugaccacccccgucuccaccuacaugcugacgaacagcgagcuccugucccugaucaacgacaugccgaucaccaacgaccagaagaagcucaugagcaacaacgugcagaucgugcgccagcaguccuacagcaucaugugcaucaucaaggaggagguccuggccuacguggugcagcugccccucuacggggucaucgacacccccugcuggaagcugcacaccagcccccugugcacgaccaacaccaaggagggcuccaacaucugccucacccggacggaccgcgggugguacugcgacaacgccggcagcguguccuucuucccgcaggccgagaccugcaagguccagagcaaccggguguucugcgacaccaugaacucccugacccugcccagcgaggugaaccucugcaacaucgacaucuucaaccccaaguacgacugcaagaucaugacguccaagaccgacgucagcuccagcgugaucaccucccugggcgccaucgugagcugcuacgggaagaccaagugcacggcgagcaacaagaaccgcggcaucaucaagaccuucuccaacgggugcgacuacgucagcaacaagggcguggacaccguguccgucggcaacacccuguacugcgugaacaagcaggagggccagagccucuacgugaagggggagcccaucaucaacuucuacgacccgcuggucuuccccuccgacgaguucgacgccagcaucucccaggugaacgagaagaucaaccagagccuggccuucauccggaaguccgacgagcuccugcacaacgugaacgucggcaagagcaccacgaacaucaugaucaccaccaucaucaucgugaucaucgugauccugcugcuccugaucgccgucgggcuguuccucuacugcaaggcccgcuccacccccgugacgcugagcaaggaccagcuguccgggaucaacaacaucgcguucagcaacugaggacuagucccuguucccagagcccacuuuuuuuucuuuuuuugaaauaaaauagccugucuuucagaucuaaaaaaaaaaaaaaaaaaaaaaaaaaaaaaaaaaaaaaaaaaaaaaaaaaaaaaaaaaaaaaaaugcaucccccccccccccccccccccccccccccccaaaggcucuuuucagagccaccagaauu

SEQ ID NO: 14696 - RNA, 1903 nt, Artificial Sequence
  mRNA product Design a-2 comprising derived and/or modified sequence from HRSV(Memphis-37)__AIY60640.1__F_DSCav1_mut2 (opt1)
gggagaguccgcucagccagguugcagaagcggcuuagcguguguccuaaucuucucucugcguguagguaggccugugccgcaaacaagcuuaccauggagcugcccauccucaagaccaacgccaucaccacgauccuggccgcggugacccugugcuucgccagcucccagaacaucaccgaggaguucuaccagagcacgugcuccgccgucagcaagggcuaccucggggcccugcgcaccggcugguacaccuccgugaucaccaucgagcugagcaacaucaaggagaacaagugcaacgggaccgacgccaaggugaagcucaucaagcaggagcuggacaaguacaagaacgcggucacggaccugcagcuccugaugcaguccaccccggccgccggcagcggguccgccaucugcagcggcaucgcggugugcaaggugcugcaccucgagggcgaggucaacaagaucaagaacgcccugcuguccaccaacaaggccguggugagccucuccaacggggucagcgugcugaccuucaaggugcuggaccucaagaacuacaucgacaagcagcugcugcccauccucaacaagcaguccugcagcauccccaacaucgagacggucaucgaguuccagcagaagaacaaccggcugcuggagaucacccgcgaguucuccgugaacgccggcgugaccacccccgucagcacguacaugcucaccaacuccgagcugcugagccucaucaacgacaugccgaucaccaacgaccagaagaagcugaugagcaacaacgugcagaucgugcggcagcaguccuacagcaucaugugcaucaucaaggaggagguccuggccuacguggugcagcucccccuguacggggucaucgacacccccugcuggaagcugcacacgagcccccucugcaccaccaacaccaaggagggcuccaacaucugccugacgcgcaccgaccgggggugguacugcgacaacgcgggcuccgugagcuucuucccgcaggccgagaccugcaaggugcaguccaaccgcgucuucugcgacaccaugaacagccugacgcuccccuccgaggugaaccugugcaacaucgacaucuucaaccccaaguacgacugcaagaucaugaccagcaagaccgacgucuccagcuccgugaucaccagccugggcgccaucguguccugcuacgggaagacgaagugcaccgccagcaacaagaaccggggcaucaucaagaccuucuccaacgggugcgacuacgucagcaacaagggcguggacaccguguccgucggcaacacgcucuacugcgugaacaagcaggaggggcagagccuguacgugaagggcgagcccaucaucaacuucuacgacccgcuggucuuccccagcgacgaguucgacgccuccaucagccaggugaacgagaagaucaaccagucccucgcguucauccgcaagagcgacgagcugcugcacaacgugaacgucgggaaguccaccaccaacaucaugaucaccaccaucaucaucgugaucaucgugauccuccugcugcucaucgccgucggccuguuccuguacugcaaggcccggagcacgcccgugacccuguccaaggaccagcucagcgggaucaacaacaucgccuucuccaacugaggacuagucccuguucccagagcccacuuuuuuuucuuuuuuugaaauaaaauagccugucuuucagaucuaaaaaaaaaaaaaaaaaaaaaaaaaaaaaaaaaaaaaaaaaaaaaaaaaaaaaaaaaaaaaaaaugcaucccccccccccccccccccccccccccccccaaaggcucuuuucagagccaccagaauu

SEQ ID NO: 14697 - RNA, 1903 nt, Artificial Sequence
  mRNA product Design a-2 comprising derived and/or modified sequence from HRSV(Memphis-37)__AIY60640.1__F_DSCav1_mut2 (opt2)
gggagaguccgcucagccagguugcagaagcggcuuagcguguguccuaaucuucucucugcguguagguaggccugugccgcaaacaagcuuaccauggagcuccccauccucaagaccaacgccaucaccaccauccucgccgccgucacccucugcuucgccuccucccagaacaucaccgaggaguucuaccaguccaccugcuccgccgucuccaagggcuaccucggcgcccuccgcaccggcugguacaccuccgucaucaccaucgagcucuccaacaucaaggagaacaagugcaacggcaccgacgccaaggucaagcucaucaagcaggagcucgacaaguacaagaacgccgucaccgaccuccagcuccucaugcaguccacccccgccgccggcuccggcuccgccaucugcuccggcaucgccgucugcaagguccuccaccucgagggcgaggucaacaagaucaagaacgcccuccucuccaccaacaaggccgucgucucccucuccaacggcgucuccguccucaccuucaagguccucgaccucaagaacuacaucgacaagcagcuccuccccauccucaacaagcaguccugcuccauccccaacaucgagaccgucaucgaguuccagcagaagaacaaccgccuccucgagaucacccgcgaguucuccgucaacgccggcgucaccacccccgucuccaccuacaugcucaccaacuccgagcuccucucccucaucaacgacaugcccaucaccaacgaccagaagaagcucauguccaacaacguccagaucguccgccagcaguccuacuccaucaugugcaucaucaaggaggagguccucgccuacgucguccagcucccccucuacggcgucaucgacacccccugcuggaagcuccacaccuccccccucugcaccaccaacaccaaggagggcuccaacaucugccucacccgcaccgaccgcggcugguacugcgacaacgccggcuccgucuccuucuucccccaggccgagaccugcaagguccaguccaaccgcgucuucugcgacaccaugaacucccucacccuccccuccgaggucaaccucugcaacaucgacaucuucaaccccaaguacgacugcaagaucaugaccuccaagaccgacgucuccuccuccgucaucaccucccucggcgccaucgucuccugcuacggcaagaccaagugcaccgccuccaacaagaaccgcggcaucaucaagaccuucuccaacggcugcgacuacgucuccaacaagggcgucgacaccgucuccgucggcaacacccucuacugcgucaacaagcaggagggccagucccucuacgucaagggcgagcccaucaucaacuucuacgacccccucgucuuccccuccgacgaguucgacgccuccaucucccaggucaacgagaagaucaaccagucccucgccuucauccgcaaguccgacgagcuccuccacaacgucaacgucggcaaguccaccaccaacaucaugaucaccaccaucaucaucgucaucaucgucauccuccuccuccucaucgccgucggccucuuccucuacugcaaggcccgcuccacccccgucacccucuccaaggaccagcucuccggcaucaacaacaucgccuucuccaacugaggacuagucccuguucccagagcccacuuuuuuuucuuuuuuugaaauaaaauagccugucuuucagaucuaaaaaaaaaaaaaaaaaaaaaaaaaaaaaaaaaaaaaaaaaaaaaaaaaaaaaaaaaaaaaaaaugcaucccccccccccccccccccccccccccccccaaaggcucuuuucagagccaccagaauu

SEQ ID NO: 14698 - RNA, 1903 nt, Artificial Sequence
  mRNA product Design a-2 comprising derived and/or modified sequence from HRSV(Memphis-37)__AIY60640.1__F_DSCav1_mut2 (opt3)
gggagaguccgcucagccagguugcagaagcggcuuagcguguguccuaaucuucucucugcguguagguaggccugugccgcaaacaagcuuaccauggagcugcccauccucaagaccaacgccauuacaacuauacuugcugcagugacgcugugcuucgccagcucccagaauaucaccgaagaguuuuaccaaucuacauguucagcggucaguaaaggcuauuugggggcuuuaagaacuggaugguacaccagcguuauuacaaucgaacuguccaacauuaaggagaauaaaugcaacgguaccgacgccaaggugaaacuaaucaagcaggaacucgauaaguauaaaaaugcaguaacugaccugcagcuucugaugcagucuacuccugccgcuggcucggggucagcaauauguagcggaaucgccgugugcaaggucuugcaccucgagggcgaggugaacaaaauuaagaaugcucugcugaguaccaacaaagccguugugucccucucuaauggugucagcguguuaacguucaagguacuggaucuuaagaacuacaucgacaaacaauugcugccaauucuaaauaagcaguccuguucaaucccgaacauagaaacuguuauugaguuucagcagaaaaauaacaggcuccuggaaaucacccgggaguucagugugaaugcgggggucacaacucccgugagcaccuauaugcuuacaaacucugagcuguugucccucauuaacgauaugccuaucaccaaugaccaaaagaaacugaugucaaacaaugugcagaucguccgccagcagagcuacaguauuaugugcauaaucaaggaagagguuuuagcauaugugguacaacugccacucuacggagugauugauacgcccuguuggaaacuucauacuucuccucugugcacaaccaacacuaaggaaggcuccaauaucuguuugacacgaaccgaccguggcugguacugcgauaacgccgggagcgucucguuuuucccacaggcugagacguguaaggugcagucuaauagaguuuucugcgacaccaugaacucccuaacacugcccucagaagugaaucucugcaacauagauauuuucaauccuaaauaugacuguaagaucaugacaaguaaaaccgaugucagcuccucugugaucacaagccugggagccauuguaucaugcuacgguaagacuaaauguaccgcaaguaacaagaauaggggcaucauuaagacauuuuccaacgggugcgacuauguuagcaauaaaggaguggacaccgucucugugggcaacacucuuuacugugucaacaagcaagagggucagucacuguaugugaaaggggagccaauaaucaauuucuacgauccguugguuuuucccagugacgaauuugaugcuagcauuucccaggugaacgagaagaucaaucagucucucgccuuuauccggaaaucggacgaacuguuacacaacguaaaugucggaaagagcacgacaaacauuaugauaaccacuaucauuaucgugauuaucguuauacugcuacuccugaucgcggugggccuuuucuuguauugcaaggcccgcuccaccccugucacacugucaaaagaucaacucaguggcauuaauaacaucgcauucucuaauugaggacuagucccuguucccagagcccacuuuuuuuucuuuuuuugaaauaaaauagccugucuuucagaucuaaaaaaaaaaaaaaaaaaaaaaaaaaaaaaaaaaaaaaaaaaaaaaaaaaaaaaaaaaaaaaaaugcaucccccccccccccccccccccccccccccccaaaggcucuuuucagagccaccagaauu

SEQ ID NO: 14699 - RNA, 1903 nt, Artificial Sequence
  mRNA product Design a-2 comprising derived and/or modified sequence from HRSV(Memphis-37)__AIY60640.1__F_DSCav1_mut2 (opt4)
gggagaguccgcucagccagguugcagaagcggcuuagcguguguccuaaucuucucucugcguguagguaggccugugccgcaaacaagcuuaccauggagcugcccauccugaagaccaacgccaucaccaccauccuggccgccgugacccugugcuucgccagcagccagaacaucaccgaggaguucuaccagagcaccugcagcgccgugagcaagggcuaccugggcgcccugagaaccggcugguacaccagcgugaucaccaucgagcugagcaacaucaaggagaacaagugcaacggcaccgacgccaaggugaagcugaucaagcaggagcuggacaaguacaagaacgccgugaccgaccugcagcugcugaugcagagcacccccgccgccggcagcggcagcgccaucugcagcggcaucgccgugugcaaggugcugcaccuggagggcgaggugaacaagaucaagaacgcccugcugagcaccaacaaggccguggugagccugagcaacggcgugagcgugcugaccuucaaggugcuggaccugaagaacuacaucgacaagcagcugcugcccauccugaacaagcagagcugcagcauccccaacaucgagaccgugaucgaguuccagcagaagaacaacagacugcuggagaucaccagagaguucagcgugaacgccggcgugaccacccccgugagcaccuacaugcugaccaacagcgagcugcugagccugaucaacgacaugcccaucaccaacgaccagaagaagcugaugagcaacaacgugcagaucgugagacagcagagcuacagcaucaugugcaucaucaaggaggaggugcuggccuacguggugcagcugccccuguacggcgugaucgacacccccugcuggaagcugcacaccagcccccugugcaccaccaacaccaaggagggcagcaacaucugccugaccagaaccgacagaggcugguacugcgacaacgccggcagcgugagcuucuucccccaggccgagaccugcaaggugcagagcaacagaguguucugcgacaccaugaacagccugacccugcccagcgaggugaaccugugcaacaucgacaucuucaaccccaaguacgacugcaagaucaugaccagcaagaccgacgugagcagcagcgugaucaccagccugggcgccaucgugagcugcuacggcaagaccaagugcaccgccagcaacaagaacagaggcaucaucaagaccuucagcaacggcugcgacuacgugagcaacaagggcguggacaccgugagcgugggcaacacccuguacugcgugaacaagcaggagggccagagccuguacgugaagggcgagcccaucaucaacuucuacgacccccugguguuccccagcgacgaguucgacgccagcaucagccaggugaacgagaagaucaaccagagccuggccuucaucagaaagagcgacgagcugcugcacaacgugaacgugggcaagagcaccaccaacaucaugaucaccaccaucaucaucgugaucaucgugauccugcugcugcugaucgccgugggccuguuccuguacugcaaggccagaagcacccccgugacccugagcaaggaccagcugagcggcaucaacaacaucgccuucagcaacugaggacuagucccuguucccagagcccacuuuuuuuucuuuuuuugaaauaaaauagccugucuuucagaucuaaaaaaaaaaaaaaaaaaaaaaaaaaaaaaaaaaaaaaaaaaaaaaaaaaaaaaaaaaaaaaaaugcaucccccccccccccccccccccccccccccccaaaggcucuuuucagagccaccagaauu

SEQ ID NO: 14700 - RNA, 1903 nt, Artificial Sequence
  mRNA product Design a-2 comprising derived and/or modified sequence from HRSV(Memphis-37)__AIY60640.1__F_DSCav1_mut2 (opt5)
gggagaguccgcucagccagguugcagaagcggcuuagcguguguccuaaucuucucucugcguguagguaggccugugccgcaaacaagcuuaccauggagcugcccauccucaagaccaacgccauuacaacgauccuggcugccgugacccuuugcuucgcgagcucccagaauauuacagaagaguuuuaccaaucuaccuguagcgcugucuccaaaggcuaucugggggcccucagaacaggaugguacaccucuguuaucacaauugaacugagcaacaucaaggagaauaaaugcaacggcaccgacgccaaggugaaacuuaucaagcaggaacuggauaaguauaaaaaugcugugacggaccuccagcugcugaugcaguccaccccugccgcugggucuggaagcgccauuuguuccggcaucgcggucugcaaggugcuccaccuggagggggagguuaacaaaauuaagaaugcccuucugagcacaaacaaagcuguggucucucucuccaauggagugagcguucugaccuucaaggugcuugaucugaagaacuacaucgacaaacaacuccugccgauucugaauaagcagucuuguuccauccccaacauugaaacagucaucgaguuucagcagaaaaauaaccggcuccuggaaaucacccgcgaguucagcgugaaugccggcgugacgacaccugucucuaccuauaugcuuacaaacuccgagcugcucagccugauuaacgauaugcccaucaccaaugaccaaaagaaacuuauguccaacaauguucagauugugagacagcagucuuacagcaucaugugcauuaucaaggaagaggugcuggcuuaugucgugcaacucccucuguacggcguuaucgauacccccuguuggaaacugcauacauccccucucugcacgaccaacacaaaggaagggagcaauauuugucugacccggacagaccgcggaugguacugcgauaacgccggcucuguguccuuuuucccgcaggcggagaccuguaagguccagagcaauagaguguuuugcgacacgaugaacucucuuacacugcccagcgaaguuaaucucugcaacaucgauauuuucaauccuaaauaugacuguaagaucaugaccuccaaaaccgaugugucuagcuccgucauuacaagccugggggccaucgugucuugcuacggaaagaccaaauguacagcuuccaacaagaaucggggcaucauuaagacguuuagcaacgggugcgacuaugucucuaauaaaggaguggacaccguuuccgugggcaacacacuuuacugugucaacaagcaagagggccagagccuguaugugaaaggggagcccaucauuaauuucuacgauccucucguuuuucccuccgacgaguucgaugccucuaucagccaggugaacgaaaagauuaaucagucccuggcuuuuauccgcaaaucugacgaacugcuccacaacgucaaugugggaaagagcaccacaaacauuaugaucaccacgaucauuaucgugauuaucguuauucugcuucugcucaucgccgucggccuguuccuguauugcaaggccagauccaccccggugacacuuagcaaagaucaacucucugggaucaauaacauugcuuucuccaauugaggacuagucccuguucccagagcccacuuuuuuuucuuuuuuugaaauaaaauagccugucuuucagaucuaaaaaaaaaaaaaaaaaaaaaaaaaaaaaaaaaaaaaaaaaaaaaaaaaaaaaaaaaaaaaaaaugcaucccccccccccccccccccccccccccccccaaaggcucuuuucagagccaccagaauu

SEQ ID NO: 14701 - RNA, 1903 nt, Artificial Sequence
  mRNA product Design a-2 comprising derived and/or modified sequence from HRSV(Memphis-37)__AIY60640.1__F_DSCav1_mut2 (opt6)
gggagaguccgcucagccagguugcagaagcggcuuagcguguguccuaaucuucucucugcguguagguaggccugugccgcaaacaagcuuaccauggagcuuccaauauuaaaaacaaacgcuauaacaacuauacucgcagcaguuacacucugcuucgcauccucacaaaacauaacugaagaauuuuaccaauccacuugcucagccguaucaaaaggauaucuaggagcacuuagaaccggaugguauacaucagugauaacaauagaacuaagcaacauaaaagaaaacaagugcaacggaacugacgcaaaagucaaacuaaucaaacaagaacuagacaaauacaaaaacgcaguaacagaccuacaauuacuaaugcaaucaacaccagcagcaggaucagguucagccauaugcucagguaucgcuguaugcaaaguccuucaccuagaaggugaaguaaacaaaauuaaaaacgcccuacucaguacaaauaaagcugucguaaguuuaucaaacggaguaucaguccuuacauucaaaguauuagaccuaaaaaauuauauagacaaacaauuacuaccaauacucaacaaacaaucaugcucaauaccaaauauagaaaccguaauagaauuucagcaaaaaaauaacagauuacuagaaauaaccagagaauuuucagucaacgcaggagucacaacacccgucucaaccuacaugcuaaccaacucagaacuucuaucucuuaucaacgacaugcccauaaccaaugaucaaaaaaaauuaaugucuaauaacguucaaauaguaagacaacaaucauacucaauaaugugcauaaucaaagaagaaguauuagcauacguaguacaacuaccccuauauggaguaauagacacacccugcuggaaacuacacacauccccccucuguacaacaaacacuaaagaaggaucaaacauuugccuaacaagaacagaccgcggaugguacugcgacaacgcaggcuccguaucuuucuuuccacaagccgaaacuuguaaaguucaaucaaacagaguauuuugcgauacaaugaacuccuuaacauuaccuucagaaguaaaccuaugcaacauagacaucuucaacccaaaauacgacugcaaaauaaugaccucaaaaacagacguauccucaucagucauaaccuccuuaggagcaauaguaucauguuacggaaaaacaaaauguacagcaucaaauaaaaauagaggaauaauaaaaaccuucuccaacggaugcgacuacguauccaauaaaggaguagacaccguaucaguaggaaacacacuauacuguguaaacaaacaagaaggccaaucucuauauguaaaaggcgaaccaaucauaaauuuuuacgacccacuugucuuccccuccgacgaauuugacgcaagcauaucacaaguaaacgaaaaaaucaaccaaagccuagccuucauaaggaaaucugacgaauuacuucauaacguaaauguuggaaaaucaaccacaaacauaaugauaaccaccaucauaauuguaauaauaguaauacuacuacuacuaauugcaguaggacucuuccuauauugcaaagcucgcucaacaccaguuaccuuaucaaaagaccaacuaucuggaauaaacaacauagccuuuuccaacuaaggacuagucccuguucccagagcccacuuuuuuuucuuuuuuugaaauaaaauagccugucuuucagaucuaaaaaaaaaaaaaaaaaaaaaaaaaaaaaaaaaaaaaaaaaaaaaaaaaaaaaaaaaaaaaaaaugcaucccccccccccccccccccccccccccccccaaaggcucuuuucagagccaccagaauu

SEQ ID NO: 14702 - RNA, 1903 nt, Artificial Sequence
  mRNA product Design a-2 comprising derived and/or modified sequence from HRSV(Memphis-37)__AIY60640.1__F_DSCav1_mut2 (opt11)
gggagaguccgcucagccagguugcagaagcggcuuagcguguguccuaaucuucucucugcguguagguaggccugugccgcaaacaagcuuaccauggaacucccaauccuaaaaaccaacgccaucaccaccauccucgccgcugucaccuuaugcuuugccagcagccaaaacaucaccgaagaauuuuaccaaucaacaugcuccgccgucucaaaaggauaccucggcgcccuacgcaccggcugguacacaagcgucauaaccaucgagcucuccaacaucaaggaaaacaaaugcaauggaaccgacgccaaagucaaacuaaucaaacaagaacuagacaaguacaagaacgcagucaccgaccuccaacuccucaugcaguccacccccgcagcaggcucuggcucagcaauaugcuccggcaucgcugucugcaaaguccuacaccucgaaggcgaagucaacaaaaucaaaaacgcccuacuguccacaaacaaagccgucgucucccuauccaacggcgucucgguccuaaccuuuaagguucucgaucucaaaaauuacauagacaaacaacuacuccccauccucaacaaacaaucuugcucaauccccaacaucgaaaccgucaucgaguuccaacagaaaaacaacagacuacucgaaaucacccgcgaguucucagucaacgcgggcgucacaacacccgucagcaccuacaugcuaaccaacuccgaacuccucagccucauuaacgacaugcccaucaccaacgaccaaaagaaacuuauguccaacaacguucaaaucguccgccaacaauccuacuccaucaugugcaucaucaaagaagaaguacucgccuacguaguccaacugccccucuacggcgucaucgauaccccaugcuggaaacuacacaccagcccccucugcaccaccaacaccaaagaaggcuccaauaucugcuuaacccgcacagaccguggcugguacugcgauaacgccggcuccgucuccuucuucccccaagcagaaaccugcaaaguacaauccaaccgagucuucugugacaccaugaacucccuaacccuuccaucagaagucaaccucugcaacaucgacaucuucaaccccaaguacgacugcaaaaucaugacauccaaaaccgaugucucaagcagcgucauaaccucacucggcgcuaucguaagcugcuacggcaaaaccaaaugcaccgcaucaaacaaaaaccgcggaaucaucaaaaccuucagcaacggaugcgacuacguuuccaacaaaggcguagacaccgucuccgucggaaacacccucuacugcguaaacaaacaggaaggccaaucccucuacgucaaaggcgaacccaucauaaacuucuacgauccccuugucuucccguccgaugaguucgacgccuccaucucgcaagucaacgaaaagauaaaccaaucacuagcauucauccguaaauccgacgaacuccuccacaacgucaacgucggaaaauccaccaccaacauaaugaucaccaccauaaucaucgucaucaucguaauacuauuacuccucauagccgucggccucuuccuauauugcaaagcccgaucaacccccguaacccuuucuaaagaccaacuguccggaaucaacaacaucgcuuucagcaacugaggacuagucccuguucccagagcccacuuuuuuuucuuuuuuugaaauaaaauagccugucuuucagaucuaaaaaaaaaaaaaaaaaaaaaaaaaaaaaaaaaaaaaaaaaaaaaaaaaaaaaaaaaaaaaaaaugcaucccccccccccccccccccccccccccccccaaaggcucuuuucagagccaccagaauu

SEQ ID NO: 14703 - RNA, 1981 nt, Artificial Sequence
  mRNA product Design a-3 comprising derived and/or modified sequence from HRSV(Memphis-37)__AIY60640.1__F_DSCav1_mut2 (opt1)
gggagagggcgcuuggcuugcaaggacccugagcugcggcauugaagcacacccaacccaacucgacugaagucagccucacugaaccggaucugagaaucuucucucucugggcuugccagggcucuccgaaccuagcuagcauccucuucaauuccaacuagaaagcuuaccauggagcugcccauccucaagaccaacgccaucaccacgauccuggccgcggugacccugugcuucgccagcucccagaacaucaccgaggaguucuaccagagcacgugcuccgccgucagcaagggcuaccucggcgcccugcgcaccgggugguacaccagcgugaucaccaucgagcuguccaacaucaaggagaacaagugcaacggcaccgacgccaaggugaagcucaucaagcaggagcuggacaaguacaagaacgcggucacggaccugcagcuccugaugcagagcaccccggccgccggcuccgggagcgcgaucugcuccggcaucgccgucugcaaggugcugcaccucgagggcgaggugaacaagaucaagaacgcccugcuguccaccaacaaggccgucgugagccucuccaacggggugagcguccugaccuucaaggugcuggaccucaagaacuacaucgacaagcagcugcugcccauccugaacaagcagagcugcuccauccccaacaucgagaccgucaucgaguuccagcagaagaacaaccgccuccuggagaucacgcgggaguucagcgugaacgcgggcgugaccacccccgucuccaccuacaugcugacgaacagcgagcuccugucccugaucaacgacaugccgaucaccaacgaccagaagaagcucaugagcaacaacgugcagaucgugcgccagcaguccuacagcaucaugugcaucaucaaggaggagguccuggccuacguggugcagcugccccucuacggggucaucgacacccccugcuggaagcugcacaccagcccccugugcacgaccaacaccaaggagggcuccaacaucugccucacccggacggaccgcgggugguacugcgacaacgccggcagcguguccuucuucccgcaggccgagaccugcaagguccagagcaaccggguguucugcgacaccaugaacucccugacccugcccagcgaggugaaccucugcaacaucgacaucuucaaccccaaguacgacugcaagaucaugacguccaagaccgacgucagcuccagcgugaucaccucccugggcgccaucgugagcugcuacgggaagaccaagugcacggcgagcaacaagaaccgcggcaucaucaagaccuucuccaacgggugcgacuacgucagcaacaagggcguggacaccguguccgucggcaacacccuguacugcgugaacaagcaggagggccagagccucuacgugaagggggagcccaucaucaacuucuacgacccgcuggucuuccccuccgacgaguucgacgccagcaucucccaggugaacgagaagaucaaccagagccuggccuucauccggaaguccgacgagcuccugcacaacgugaacgucggcaagagcaccacgaacaucaugaucaccaccaucaucaucgugaucaucgugauccugcugcuccugaucgccgucgggcuguuccucuacugcaaggcccgcuccacccccgugacgcugagcaaggaccagcuguccgggaucaacaacaucgcguucagcaacugaggacuagucccuguucccagagcccacuuuuuuuucuuuuuuugaaauaaaauagccugucuuucagaucuaaaaaaaaaaaaaaaaaaaaaaaaaaaaaaaaaaaaaaaaaaaaaaaaaaaaaaaaaaaaaaaaugcaucccccccccccccccccccccccccccccccaaaggcucuuuucagagccaccagaauu

SEQ ID NO: 14704 - RNA, 1981 nt, Artificial Sequence
  mRNA product Design a-3 comprising derived and/or modified sequence from HRSV(Memphis-37)__AIY60640.1__F_DSCav1_mut2 (opt1)
gggagagggcgcuuggcuugcaaggacccugagcugcggcauugaagcacacccaacccaacucgacugaagucagccucacugaaccggaucugagaaucuucucucucugggcuugccagggcucuccgaaccuagcuagcauccucuucaauuccaacuagaaagcuuaccauggagcugcccauccucaagaccaacgccaucaccacgauccuggccgcggugacccugugcuucgccagcucccagaacaucaccgaggaguucuaccagagcacgugcuccgccgucagcaagggcuaccucggggcccugcgcaccggcugguacaccuccgugaucaccaucgagcugagcaacaucaaggagaacaagugcaacgggaccgacgccaaggugaagcucaucaagcaggagcuggacaaguacaagaacgcggucacggaccugcagcuccugaugcaguccaccccggccgccggcagcggguccgccaucugcagcggcaucgcggugugcaaggugcugcaccucgagggcgaggucaacaagaucaagaacgcccugcuguccaccaacaaggccguggugagccucuccaacggggucagcgugcugaccuucaaggugcuggaccucaagaacuacaucgacaagcagcugcugcccauccucaacaagcaguccugcagcauccccaacaucgagacggucaucgaguuccagcagaagaacaaccggcugcuggagaucacccgcgaguucuccgugaacgccggcgugaccacccccgucagcacguacaugcucaccaacuccgagcugcugagccucaucaacgacaugccgaucaccaacgaccagaagaagcugaugagcaacaacgugcagaucgugcggcagcaguccuacagcaucaugugcaucaucaaggaggagguccuggccuacguggugcagcucccccuguacggggucaucgacacccccugcuggaagcugcacacgagcccccucugcaccaccaacaccaaggagggcuccaacaucugccugacgcgcaccgaccgggggugguacugcgacaacgcgggcuccgugagcuucuucccgcaggccgagaccugcaaggugcaguccaaccgcgucuucugcgacaccaugaacagccugacgcuccccuccgaggugaaccugugcaacaucgacaucuucaaccccaaguacgacugcaagaucaugaccagcaagaccgacgucuccagcuccgugaucaccagccugggcgccaucguguccugcuacgggaagacgaagugcaccgccagcaacaagaaccggggcaucaucaagaccuucuccaacgggugcgacuacgucagcaacaagggcguggacaccguguccgucggcaacacgcucuacugcgugaacaagcaggaggggcagagccuguacgugaagggcgagcccaucaucaacuucuacgacccgcuggucuuccccagcgacgaguucgacgccuccaucagccaggugaacgagaagaucaaccagucccucgcguucauccgcaagagcgacgagcugcugcacaacgugaacgucgggaaguccaccaccaacaucaugaucaccaccaucaucaucgugaucaucgugauccuccugcugcucaucgccgucggccuguuccuguacugcaaggcccggagcacgcccgugacccuguccaaggaccagcucagcgggaucaacaacaucgccuucuccaacugaggacuagucccuguucccagagcccacuuuuuuuucuuuuuuugaaauaaaauagccugucuuucagaucuaaaaaaaaaaaaaaaaaaaaaaaaaaaaaaaaaaaaaaaaaaaaaaaaaaaaaaaaaaaaaaaaugcaucccccccccccccccccccccccccccccccaaaggcucuuuucagagccaccagaauu

SEQ ID NO: 14705 - RNA, 1981 nt, Artificial Sequence
  mRNA product Design a-3 comprising derived and/or modified sequence from HRSV(Memphis-37)__AIY60640.1__F_DSCav1_mut2 (opt2)
gggagagggcgcuuggcuugcaaggacccugagcugcggcauugaagcacacccaacccaacucgacugaagucagccucacugaaccggaucugagaaucuucucucucugggcuugccagggcucuccgaaccuagcuagcauccucuucaauuccaacuagaaagcuuaccauggagcuccccauccucaagaccaacgccaucaccaccauccucgccgccgucacccucugcuucgccuccucccagaacaucaccgaggaguucuaccaguccaccugcuccgccgucuccaagggcuaccucggcgcccuccgcaccggcugguacaccuccgucaucaccaucgagcucuccaacaucaaggagaacaagugcaacggcaccgacgccaaggucaagcucaucaagcaggagcucgacaaguacaagaacgccgucaccgaccuccagcuccucaugcaguccacccccgccgccggcuccggcuccgccaucugcuccggcaucgccgucugcaagguccuccaccucgagggcgaggucaacaagaucaagaacgcccuccucuccaccaacaaggccgucgucucccucuccaacggcgucuccguccucaccuucaagguccucgaccucaagaacuacaucgacaagcagcuccuccccauccucaacaagcaguccugcuccauccccaacaucgagaccgucaucgaguuccagcagaagaacaaccgccuccucgagaucacccgcgaguucuccgucaacgccggcgucaccacccccgucuccaccuacaugcucaccaacuccgagcuccucucccucaucaacgacaugcccaucaccaacgaccagaagaagcucauguccaacaacguccagaucguccgccagcaguccuacuccaucaugugcaucaucaaggaggagguccucgccuacgucguccagcucccccucuacggcgucaucgacacccccugcuggaagcuccacaccuccccccucugcaccaccaacaccaaggagggcuccaacaucugccucacccgcaccgaccgcggcugguacugcgacaacgccggcuccgucuccuucuucccccaggccgagaccugcaagguccaguccaaccgcgucuucugcgacaccaugaacucccucacccuccccuccgaggucaaccucugcaacaucgacaucuucaaccccaaguacgacugcaagaucaugaccuccaagaccgacgucuccuccuccgucaucaccucccucggcgccaucgucuccugcuacggcaagaccaagugcaccgccuccaacaagaaccgcggcaucaucaagaccuucuccaacggcugcgacuacgucuccaacaagggcgucgacaccgucuccgucggcaacacccucuacugcgucaacaagcaggagggccagucccucuacgucaagggcgagcccaucaucaacuucuacgacccccucgucuuccccuccgacgaguucgacgccuccaucucccaggucaacgagaagaucaaccagucccucgccuucauccgcaaguccgacgagcuccuccacaacgucaacgucggcaaguccaccaccaacaucaugaucaccaccaucaucaucgucaucaucgucauccuccuccuccucaucgccgucggccucuuccucuacugcaaggcccgcuccacccccgucacccucuccaaggaccagcucuccggcaucaacaacaucgccuucuccaacugaggacuagucccuguucccagagcccacuuuuuuuucuuuuuuugaaauaaaauagccugucuuucagaucuaaaaaaaaaaaaaaaaaaaaaaaaaaaaaaaaaaaaaaaaaaaaaaaaaaaaaaaaaaaaaaaaugcaucccccccccccccccccccccccccccccccaaaggcucuuuucagagccaccagaauu

SEQ ID NO: 14706 - RNA, 1981 nt, Artificial Sequence
  mRNA product Design a-3 comprising derived and/or modified sequence from HRSV(Memphis-37)__AIY60640.1__F_DSCav1_mut2 (opt3)
gggagagggcgcuuggcuugcaaggacccugagcugcggcauugaagcacacccaacccaacucgacugaagucagccucacugaaccggaucugagaaucuucucucucugggcuugccagggcucuccgaaccuagcuagcauccucuucaauuccaacuagaaagcuuaccauggagcugcccauccucaagaccaacgccauuacaacuauacuugcugcagugacgcugugcuucgccagcucccagaauaucaccgaagaguuuuaccaaucuacauguucagcggucaguaaaggcuauuugggggcuuuaagaacuggaugguacaccagcguuauuacaaucgaacuguccaacauuaaggagaauaaaugcaacgguaccgacgccaaggugaaacuaaucaagcaggaacucgauaaguauaaaaaugcaguaacugaccugcagcuucugaugcagucuacuccugccgcuggcucggggucagcaauauguagcggaaucgccgugugcaaggucuugcaccucgagggcgaggugaacaaaauuaagaaugcucugcugaguaccaacaaagccguugugucccucucuaauggugucagcguguuaacguucaagguacuggaucuuaagaacuacaucgacaaacaauugcugccaauucuaaauaagcaguccuguucaaucccgaacauagaaacuguuauugaguuucagcagaaaaauaacaggcuccuggaaaucacccgggaguucagugugaaugcgggggucacaacucccgugagcaccuauaugcuuacaaacucugagcuguugucccucauuaacgauaugccuaucaccaaugaccaaaagaaacugaugucaaacaaugugcagaucguccgccagcagagcuacaguauuaugugcauaaucaaggaagagguuuuagcauaugugguacaacugccacucuacggagugauugauacgcccuguuggaaacuucauacuucuccucugugcacaaccaacacuaaggaaggcuccaauaucuguuugacacgaaccgaccguggcugguacugcgauaacgccgggagcgucucguuuuucccacaggcugagacguguaaggugcagucuaauagaguuuucugcgacaccaugaacucccuaacacugcccucagaagugaaucucugcaacauagauauuuucaauccuaaauaugacuguaagaucaugacaaguaaaaccgaugucagcuccucugugaucacaagccugggagccauuguaucaugcuacgguaagacuaaauguaccgcaaguaacaagaauaggggcaucauuaagacauuuuccaacgggugcgacuauguuagcaauaaaggaguggacaccgucucugugggcaacacucuuuacugugucaacaagcaagagggucagucacuguaugugaaaggggagccaauaaucaauuucuacgauccguugguuuuucccagugacgaauuugaugcuagcauuucccaggugaacgagaagaucaaucagucucucgccuuuauccggaaaucggacgaacuguuacacaacguaaaugucggaaagagcacgacaaacauuaugauaaccacuaucauuaucgugauuaucguuauacugcuacuccugaucgcggugggccuuuucuuguauugcaaggcccgcuccaccccugucacacugucaaaagaucaacucaguggcauuaauaacaucgcauucucuaauugaggacuagucccuguucccagagcccacuuuuuuuucuuuuuuugaaauaaaauagccugucuuucagaucuaaaaaaaaaaaaaaaaaaaaaaaaaaaaaaaaaaaaaaaaaaaaaaaaaaaaaaaaaaaaaaaaugcaucccccccccccccccccccccccccccccccaaaggcucuuuucagagccaccagaauu

SEQ ID NO: 14707 - RNA, 1981 nt, Artificial Sequence
  mRNA product Design a-3 comprising derived and/or modified sequence from HRSV(Memphis-37)__AIY60640.1__F_DSCav1_mut2 (opt4)
gggagagggcgcuuggcuugcaaggacccugagcugcggcauugaagcacacccaacccaacucgacugaagucagccucacugaaccggaucugagaaucuucucucucugggcuugccagggcucuccgaaccuagcuagcauccucuucaauuccaacuagaaagcuuaccauggagcugcccauccugaagaccaacgccaucaccaccauccuggccgccgugacccugugcuucgccagcagccagaacaucaccgaggaguucuaccagagcaccugcagcgccgugagcaagggcuaccugggcgcccugagaaccggcugguacaccagcgugaucaccaucgagcugagcaacaucaaggagaacaagugcaacggcaccgacgccaaggugaagcugaucaagcaggagcuggacaaguacaagaacgccgugaccgaccugcagcugcugaugcagagcacccccgccgccggcagcggcagcgccaucugcagcggcaucgccgugugcaaggugcugcaccuggagggcgaggugaacaagaucaagaacgcccugcugagcaccaacaaggccguggugagccugagcaacggcgugagcgugcugaccuucaaggugcuggaccugaagaacuacaucgacaagcagcugcugcccauccugaacaagcagagcugcagcauccccaacaucgagaccgugaucgaguuccagcagaagaacaacagacugcuggagaucaccagagaguucagcgugaacgccggcgugaccacccccgugagcaccuacaugcugaccaacagcgagcugcugagccugaucaacgacaugcccaucaccaacgaccagaagaagcugaugagcaacaacgugcagaucgugagacagcagagcuacagcaucaugugcaucaucaaggaggaggugcuggccuacguggugcagcugccccuguacggcgugaucgacacccccugcuggaagcugcacaccagcccccugugcaccaccaacaccaaggagggcagcaacaucugccugaccagaaccgacagaggcugguacugcgacaacgccggcagcgugagcuucuucccccaggccgagaccugcaaggugcagagcaacagaguguucugcgacaccaugaacagccugacccugcccagcgaggugaaccugugcaacaucgacaucuucaaccccaaguacgacugcaagaucaugaccagcaagaccgacgugagcagcagcgugaucaccagccugggcgccaucgugagcugcuacggcaagaccaagugcaccgccagcaacaagaacagaggcaucaucaagaccuucagcaacggcugcgacuacgugagcaacaagggcguggacaccgugagcgugggcaacacccuguacugcgugaacaagcaggagggccagagccuguacgugaagggcgagcccaucaucaacuucuacgacccccugguguuccccagcgacgaguucgacgccagcaucagccaggugaacgagaagaucaaccagagccuggccuucaucagaaagagcgacgagcugcugcacaacgugaacgugggcaagagcaccaccaacaucaugaucaccaccaucaucaucgugaucaucgugauccugcugcugcugaucgccgugggccuguuccuguacugcaaggccagaagcacccccgugacccugagcaaggaccagcugagcggcaucaacaacaucgccuucagcaacugaggacuagucccuguucccagagcccacuuuuuuuucuuuuuuugaaauaaaauagccugucuuucagaucuaaaaaaaaaaaaaaaaaaaaaaaaaaaaaaaaaaaaaaaaaaaaaaaaaaaaaaaaaaaaaaaaugcaucccccccccccccccccccccccccccccccaaaggcucuuuucagagccaccagaauu

SEQ ID NO: 14708 - RNA, 1981 nt, Artificial Sequence
  mRNA product Design a-3 comprising derived and/or modified sequence from HRSV(Memphis-37)__AIY60640.1__F_DSCav1_mut2 (opt5)
gggagagggcgcuuggcuugcaaggacccugagcugcggcauugaagcacacccaacccaacucgacugaagucagccucacugaaccggaucugagaaucuucucucucugggcuugccagggcucuccgaaccuagcuagcauccucuucaauuccaacuagaaagcuuaccauggagcugcccauccucaagaccaacgccauuacaacgauccuggcugccgugacccuuugcuucgcgagcucccagaauauuacagaagaguuuuaccaaucuaccuguagcgcugucuccaaaggcuaucugggggcccucagaacaggaugguacaccucuguuaucacaauugaacugagcaacaucaaggagaauaaaugcaacggcaccgacgccaaggugaaacuuaucaagcaggaacuggauaaguauaaaaaugcugugacggaccuccagcugcugaugcaguccaccccugccgcugggucuggaagcgccauuuguuccggcaucgcggucugcaaggugcuccaccuggagggggagguuaacaaaauuaagaaugcccuucugagcacaaacaaagcuguggucucucucuccaauggagugagcguucugaccuucaaggugcuugaucugaagaacuacaucgacaaacaacuccugccgauucugaauaagcagucuuguuccauccccaacauugaaacagucaucgaguuucagcagaaaaauaaccggcuccuggaaaucacccgcgaguucagcgugaaugccggcgugacgacaccugucucuaccuauaugcuuacaaacuccgagcugcucagccugauuaacgauaugcccaucaccaaugaccaaaagaaacuuauguccaacaauguucagauugugagacagcagucuuacagcaucaugugcauuaucaaggaagaggugcuggcuuaugucgugcaacucccucuguacggcguuaucgauacccccuguuggaaacugcauacauccccucucugcacgaccaacacaaaggaagggagcaauauuugucugacccggacagaccgcggaugguacugcgauaacgccggcucuguguccuuuuucccgcaggcggagaccuguaagguccagagcaauagaguguuuugcgacacgaugaacucucuuacacugcccagcgaaguuaaucucugcaacaucgauauuuucaauccuaaauaugacuguaagaucaugaccuccaaaaccgaugugucuagcuccgucauuacaagccugggggccaucgugucuugcuacggaaagaccaaauguacagcuuccaacaagaaucggggcaucauuaagacguuuagcaacgggugcgacuaugucucuaauaaaggaguggacaccguuuccgugggcaacacacuuuacugugucaacaagcaagagggccagagccuguaugugaaaggggagcccaucauuaauuucuacgauccucucguuuuucccuccgacgaguucgaugccucuaucagccaggugaacgaaaagauuaaucagucccuggcuuuuauccgcaaaucugacgaacugcuccacaacgucaaugugggaaagagcaccacaaacauuaugaucaccacgaucauuaucgugauuaucguuauucugcuucugcucaucgccgucggccuguuccuguauugcaaggccagauccaccccggugacacuuagcaaagaucaacucucugggaucaauaacauugcuuucuccaauugaggacuagucccuguucccagagcccacuuuuuuuucuuuuuuugaaauaaaauagccugucuuucagaucuaaaaaaaaaaaaaaaaaaaaaaaaaaaaaaaaaaaaaaaaaaaaaaaaaaaaaaaaaaaaaaaaugcaucccccccccccccccccccccccccccccccaaaggcucuuuucagagccaccagaauu

SEQ ID NO: 14709 - RNA, 1981 nt, Artificial Sequence
  mRNA product Design a-3 comprising derived and/or modified sequence from HRSV(Memphis-37)__AIY60640.1__F_DSCav1_mut2 (opt6)
gggagagggcgcuuggcuugcaaggacccugagcugcggcauugaagcacacccaacccaacucgacugaagucagccucacugaaccggaucugagaaucuucucucucugggcuugccagggcucuccgaaccuagcuagcauccucuucaauuccaacuagaaagcuuaccauggagcuuccaauauuaaaaacaaacgcuauaacaacuauacucgcagcaguuacacucugcuucgcauccucacaaaacauaacugaagaauuuuaccaauccacuugcucagccguaucaaaaggauaucuaggagcacuuagaaccggaugguauacaucagugauaacaauagaacuaagcaacauaaaagaaaacaagugcaacggaacugacgcaaaagucaaacuaaucaaacaagaacuagacaaauacaaaaacgcaguaacagaccuacaauuacuaaugcaaucaacaccagcagcaggaucagguucagccauaugcucagguaucgcuguaugcaaaguccuucaccuagaaggugaaguaaacaaaauuaaaaacgcccuacucaguacaaauaaagcugucguaaguuuaucaaacggaguaucaguccuuacauucaaaguauuagaccuaaaaaauuauauagacaaacaauuacuaccaauacucaacaaacaaucaugcucaauaccaaauauagaaaccguaauagaauuucagcaaaaaaauaacagauuacuagaaauaaccagagaauuuucagucaacgcaggagucacaacacccgucucaaccuacaugcuaaccaacucagaacuucuaucucuuaucaacgacaugcccauaaccaaugaucaaaaaaaauuaaugucuaauaacguucaaauaguaagacaacaaucauacucaauaaugugcauaaucaaagaagaaguauuagcauacguaguacaacuaccccuauauggaguaauagacacacccugcuggaaacuacacacauccccccucuguacaacaaacacuaaagaaggaucaaacauuugccuaacaagaacagaccgcggaugguacugcgacaacgcaggcuccguaucuuucuuuccacaagccgaaacuuguaaaguucaaucaaacagaguauuuugcgauacaaugaacuccuuaacauuaccuucagaaguaaaccuaugcaacauagacaucuucaacccaaaauacgacugcaaaauaaugaccucaaaaacagacguauccucaucagucauaaccuccuuaggagcaauaguaucauguuacggaaaaacaaaauguacagcaucaaauaaaaauagaggaauaauaaaaaccuucuccaacggaugcgacuacguauccaauaaaggaguagacaccguaucaguaggaaacacacuauacuguguaaacaaacaagaaggccaaucucuauauguaaaaggcgaaccaaucauaaauuuuuacgacccacuugucuuccccuccgacgaauuugacgcaagcauaucacaaguaaacgaaaaaaucaaccaaagccuagccuucauaaggaaaucugacgaauuacuucauaacguaaauguuggaaaaucaaccacaaacauaaugauaaccaccaucauaauuguaauaauaguaauacuacuacuacuaauugcaguaggacucuuccuauauugcaaagcucgcucaacaccaguuaccuuaucaaaagaccaacuaucuggaauaaacaacauagccuuuuccaacuaaggacuagucccuguucccagagcccacuuuuuuuucuuuuuuugaaauaaaauagccugucuuucagaucuaaaaaaaaaaaaaaaaaaaaaaaaaaaaaaaaaaaaaaaaaaaaaaaaaaaaaaaaaaaaaaaaugcaucccccccccccccccccccccccccccccccaaaggcucuuuucagagccaccagaauu

SEQ ID NO: 14710 - RNA, 1981 nt, Artificial Sequence
  mRNA product Design a-3 comprising derived and/or modified sequence from HRSV(Memphis-37)__AIY60640.1__F_DSCav1_mut2 (opt11)
gggagagggcgcuuggcuugcaaggacccugagcugcggcauugaagcacacccaacccaacucgacugaagucagccucacugaaccggaucugagaaucuucucucucugggcuugccagggcucuccgaaccuagcuagcauccucuucaauuccaacuagaaagcuuaccauggaacucccaauccuaaaaaccaacgccaucaccaccauccucgccgcugucaccuuaugcuuugccagcagccaaaacaucaccgaagaauuuuaccaaucaacaugcuccgccgucucaaaaggauaccucggcgcccuacgcaccggcugguacacaagcgucauaaccaucgagcucuccaacaucaaggaaaacaaaugcaauggaaccgacgccaaagucaaacuaaucaaacaagaacuagacaaguacaagaacgcagucaccgaccuccaacuccucaugcaguccacccccgcagcaggcucuggcucagcaauaugcuccggcaucgcugucugcaaaguccuacaccucgaaggcgaagucaacaaaaucaaaaacgcccuacuguccacaaacaaagccgucgucucccuauccaacggcgucucgguccuaaccuuuaagguucucgaucucaaaaauuacauagacaaacaacuacuccccauccucaacaaacaaucuugcucaauccccaacaucgaaaccgucaucgaguuccaacagaaaaacaacagacuacucgaaaucacccgcgaguucucagucaacgcgggcgucacaacacccgucagcaccuacaugcuaaccaacuccgaacuccucagccucauuaacgacaugcccaucaccaacgaccaaaagaaacuuauguccaacaacguucaaaucguccgccaacaauccuacuccaucaugugcaucaucaaagaagaaguacucgccuacguaguccaacugccccucuacggcgucaucgauaccccaugcuggaaacuacacaccagcccccucugcaccaccaacaccaaagaaggcuccaauaucugcuuaacccgcacagaccguggcugguacugcgauaacgccggcuccgucuccuucuucccccaagcagaaaccugcaaaguacaauccaaccgagucuucugugacaccaugaacucccuaacccuuccaucagaagucaaccucugcaacaucgacaucuucaaccccaaguacgacugcaaaaucaugacauccaaaaccgaugucucaagcagcgucauaaccucacucggcgcuaucguaagcugcuacggcaaaaccaaaugcaccgcaucaaacaaaaaccgcggaaucaucaaaaccuucagcaacggaugcgacuacguuuccaacaaaggcguagacaccgucuccgucggaaacacccucuacugcguaaacaaacaggaaggccaaucccucuacgucaaaggcgaacccaucauaaacuucuacgauccccuugucuucccguccgaugaguucgacgccuccaucucgcaagucaacgaaaagauaaaccaaucacuagcauucauccguaaauccgacgaacuccuccacaacgucaacgucggaaaauccaccaccaacauaaugaucaccaccauaaucaucgucaucaucguaauacuauuacuccucauagccgucggccucuuccuauauugcaaagcccgaucaacccccguaacccuuucuaaagaccaacuguccggaaucaacaacaucgcuuucagcaacugaggacuagucccuguucccagagcccacuuuuuuuucuuuuuuugaaauaaaauagccugucuuucagaucuaaaaaaaaaaaaaaaaaaaaaaaaaaaaaaaaaaaaaaaaaaaaaaaaaaaaaaaaaaaaaaaaugcaucccccccccccccccccccccccccccccccaaaggcucuuuucagagccaccagaauu

SEQ ID NO: 14711 - RNA, 1930 nt, Artificial Sequence
  mRNA product Design a-4 comprising derived and/or modified sequence from HRSV(Memphis-37)__AIY60640.1__F_DSCav1_mut2 (opt1)
gggagacuccugucgggcggaaguaggaggaguagaguuuaaaaacaguacucuuuuuccgguucgggacguaguugaagcaacgacaagccggauaaccgcucuugagacaggaagcuuaccauggagcugcccauccucaagaccaacgccaucaccacgauccuggccgcggugacccugugcuucgccagcucccagaacaucaccgaggaguucuaccagagcacgugcuccgccgucagcaagggcuaccucggcgcccugcgcaccgggugguacaccagcgugaucaccaucgagcuguccaacaucaaggagaacaagugcaacggcaccgacgccaaggugaagcucaucaagcaggagcuggacaaguacaagaacgcggucacggaccugcagcuccugaugcagagcaccccggccgccggcuccgggagcgcgaucugcuccggcaucgccgucugcaaggugcugcaccucgagggcgaggugaacaagaucaagaacgcccugcuguccaccaacaaggccgucgugagccucuccaacggggugagcguccugaccuucaaggugcuggaccucaagaacuacaucgacaagcagcugcugcccauccugaacaagcagagcugcuccauccccaacaucgagaccgucaucgaguuccagcagaagaacaaccgccuccuggagaucacgcgggaguucagcgugaacgcgggcgugaccacccccgucuccaccuacaugcugacgaacagcgagcuccugucccugaucaacgacaugccgaucaccaacgaccagaagaagcucaugagcaacaacgugcagaucgugcgccagcaguccuacagcaucaugugcaucaucaaggaggagguccuggccuacguggugcagcugccccucuacggggucaucgacacccccugcuggaagcugcacaccagcccccugugcacgaccaacaccaaggagggcuccaacaucugccucacccggacggaccgcgggugguacugcgacaacgccggcagcguguccuucuucccgcaggccgagaccugcaagguccagagcaaccggguguucugcgacaccaugaacucccugacccugcccagcgaggugaaccucugcaacaucgacaucuucaaccccaaguacgacugcaagaucaugacguccaagaccgacgucagcuccagcgugaucaccucccugggcgccaucgugagcugcuacgggaagaccaagugcacggcgagcaacaagaaccgcggcaucaucaagaccuucuccaacgggugcgacuacgucagcaacaagggcguggacaccguguccgucggcaacacccuguacugcgugaacaagcaggagggccagagccucuacgugaagggggagcccaucaucaacuucuacgacccgcuggucuuccccuccgacgaguucgacgccagcaucucccaggugaacgagaagaucaaccagagccuggccuucauccggaaguccgacgagcuccugcacaacgugaacgucggcaagagcaccacgaacaucaugaucaccaccaucaucaucgugaucaucgugauccugcugcuccugaucgccgucgggcuguuccucuacugcaaggcccgcuccacccccgugacgcugagcaaggaccagcuguccgggaucaacaacaucgcguucagcaacugaggacuagucccuguucccagagcccacuuuuuuuucuuuuuuugaaauaaaauagccugucuuucagaucuaaaaaaaaaaaaaaaaaaaaaaaaaaaaaaaaaaaaaaaaaaaaaaaaaaaaaaaaaaaaaaaaugcaucccccccccccccccccccccccccccccccaaaggcucuuuucagagccaccagaauu

SEQ ID NO: 14712 - RNA, 1930 nt, Artificial Sequence
  mRNA product Design a-4 comprising derived and/or modified sequence from HRSV(Memphis-37)__AIY60640.1__F_DSCav1_mut2 (opt1)
gggagacuccugucgggcggaaguaggaggaguagaguuuaaaaacaguacucuuuuuccgguucgggacguaguugaagcaacgacaagccggauaaccgcucuugagacaggaagcuuaccauggagcugcccauccucaagaccaacgccaucaccacgauccuggccgcggugacccugugcuucgccagcucccagaacaucaccgaggaguucuaccagagcacgugcuccgccgucagcaagggcuaccucggggcccugcgcaccggcugguacaccuccgugaucaccaucgagcugagcaacaucaaggagaacaagugcaacgggaccgacgccaaggugaagcucaucaagcaggagcuggacaaguacaagaacgcggucacggaccugcagcuccugaugcaguccaccccggccgccggcagcggguccgccaucugcagcggcaucgcggugugcaaggugcugcaccucgagggcgaggucaacaagaucaagaacgcccugcuguccaccaacaaggccguggugagccucuccaacggggucagcgugcugaccuucaaggugcuggaccucaagaacuacaucgacaagcagcugcugcccauccucaacaagcaguccugcagcauccccaacaucgagacggucaucgaguuccagcagaagaacaaccggcugcuggagaucacccgcgaguucuccgugaacgccggcgugaccacccccgucagcacguacaugcucaccaacuccgagcugcugagccucaucaacgacaugccgaucaccaacgaccagaagaagcugaugagcaacaacgugcagaucgugcggcagcaguccuacagcaucaugugcaucaucaaggaggagguccuggccuacguggugcagcucccccuguacggggucaucgacacccccugcuggaagcugcacacgagcccccucugcaccaccaacaccaaggagggcuccaacaucugccugacgcgcaccgaccgggggugguacugcgacaacgcgggcuccgugagcuucuucccgcaggccgagaccugcaaggugcaguccaaccgcgucuucugcgacaccaugaacagccugacgcuccccuccgaggugaaccugugcaacaucgacaucuucaaccccaaguacgacugcaagaucaugaccagcaagaccgacgucuccagcuccgugaucaccagccugggcgccaucguguccugcuacgggaagacgaagugcaccgccagcaacaagaaccggggcaucaucaagaccuucuccaacgggugcgacuacgucagcaacaagggcguggacaccguguccgucggcaacacgcucuacugcgugaacaagcaggaggggcagagccuguacgugaagggcgagcccaucaucaacuucuacgacccgcuggucuuccccagcgacgaguucgacgccuccaucagccaggugaacgagaagaucaaccagucccucgcguucauccgcaagagcgacgagcugcugcacaacgugaacgucgggaaguccaccaccaacaucaugaucaccaccaucaucaucgugaucaucgugauccuccugcugcucaucgccgucggccuguuccuguacugcaaggcccggagcacgcccgugacccuguccaaggaccagcucagcgggaucaacaacaucgccuucuccaacugaggacuagucccuguucccagagcccacuuuuuuuucuuuuuuugaaauaaaauagccugucuuucagaucuaaaaaaaaaaaaaaaaaaaaaaaaaaaaaaaaaaaaaaaaaaaaaaaaaaaaaaaaaaaaaaaaugcaucccccccccccccccccccccccccccccccaaaggcucuuuucagagccaccagaauu

SEQ ID NO: 14713 - RNA, 1930 nt, Artificial Sequence
  mRNA product Design a-4 comprising derived and/or modified sequence from HRSV(Memphis-37)__AIY60640.1__F_DSCav1_mut2 (opt2)
gggagacuccugucgggcggaaguaggaggaguagaguuuaaaaacaguacucuuuuuccgguucgggacguaguugaagcaacgacaagccggauaaccgcucuugagacaggaagcuuaccauggagcuccccauccucaagaccaacgccaucaccaccauccucgccgccgucacccucugcuucgccuccucccagaacaucaccgaggaguucuaccaguccaccugcuccgccgucuccaagggcuaccucggcgcccuccgcaccggcugguacaccuccgucaucaccaucgagcucuccaacaucaaggagaacaagugcaacggcaccgacgccaaggucaagcucaucaagcaggagcucgacaaguacaagaacgccgucaccgaccuccagcuccucaugcaguccacccccgccgccggcuccggcuccgccaucugcuccggcaucgccgucugcaagguccuccaccucgagggcgaggucaacaagaucaagaacgcccuccucuccaccaacaaggccgucgucucccucuccaacggcgucuccguccucaccuucaagguccucgaccucaagaacuacaucgacaagcagcuccuccccauccucaacaagcaguccugcuccauccccaacaucgagaccgucaucgaguuccagcagaagaacaaccgccuccucgagaucacccgcgaguucuccgucaacgccggcgucaccacccccgucuccaccuacaugcucaccaacuccgagcuccucucccucaucaacgacaugcccaucaccaacgaccagaagaagcucauguccaacaacguccagaucguccgccagcaguccuacuccaucaugugcaucaucaaggaggagguccucgccuacgucguccagcucccccucuacggcgucaucgacacccccugcuggaagcuccacaccuccccccucugcaccaccaacaccaaggagggcuccaacaucugccucacccgcaccgaccgcggcugguacugcgacaacgccggcuccgucuccuucuucccccaggccgagaccugcaagguccaguccaaccgcgucuucugcgacaccaugaacucccucacccuccccuccgaggucaaccucugcaacaucgacaucuucaaccccaaguacgacugcaagaucaugaccuccaagaccgacgucuccuccuccgucaucaccucccucggcgccaucgucuccugcuacggcaagaccaagugcaccgccuccaacaagaaccgcggcaucaucaagaccuucuccaacggcugcgacuacgucuccaacaagggcgucgacaccgucuccgucggcaacacccucuacugcgucaacaagcaggagggccagucccucuacgucaagggcgagcccaucaucaacuucuacgacccccucgucuuccccuccgacgaguucgacgccuccaucucccaggucaacgagaagaucaaccagucccucgccuucauccgcaaguccgacgagcuccuccacaacgucaacgucggcaaguccaccaccaacaucaugaucaccaccaucaucaucgucaucaucgucauccuccuccuccucaucgccgucggccucuuccucuacugcaaggcccgcuccacccccgucacccucuccaaggaccagcucuccggcaucaacaacaucgccuucuccaacugaggacuagucccuguucccagagcccacuuuuuuuucuuuuuuugaaauaaaauagccugucuuucagaucuaaaaaaaaaaaaaaaaaaaaaaaaaaaaaaaaaaaaaaaaaaaaaaaaaaaaaaaaaaaaaaaaugcaucccccccccccccccccccccccccccccccaaaggcucuuuucagagccaccagaauu

SEQ ID NO: 14714 - RNA, 1930 nt, Artificial Sequence
  mRNA product Design a-4 comprising derived and/or modified sequence from HRSV(Memphis-37)__AIY60640.1__F_DSCav1_mut2 (opt3)
gggagacuccugucgggcggaaguaggaggaguagaguuuaaaaacaguacucuuuuuccgguucgggacguaguugaagcaacgacaagccggauaaccgcucuugagacaggaagcuuaccauggagcugcccauccucaagaccaacgccauuacaacuauacuugcugcagugacgcugugcuucgccagcucccagaauaucaccgaagaguuuuaccaaucuacauguucagcggucaguaaaggcuauuugggggcuuuaagaacuggaugguacaccagcguuauuacaaucgaacuguccaacauuaaggagaauaaaugcaacgguaccgacgccaaggugaaacuaaucaagcaggaacucgauaaguauaaaaaugcaguaacugaccugcagcuucugaugcagucuacuccugccgcuggcucggggucagcaauauguagcggaaucgccgugugcaaggucuugcaccucgagggcgaggugaacaaaauuaagaaugcucugcugaguaccaacaaagccguugugucccucucuaauggugucagcguguuaacguucaagguacuggaucuuaagaacuacaucgacaaacaauugcugccaauucuaaauaagcaguccuguucaaucccgaacauagaaacuguuauugaguuucagcagaaaaauaacaggcuccuggaaaucacccgggaguucagugugaaugcgggggucacaacucccgugagcaccuauaugcuuacaaacucugagcuguugucccucauuaacgauaugccuaucaccaaugaccaaaagaaacugaugucaaacaaugugcagaucguccgccagcagagcuacaguauuaugugcauaaucaaggaagagguuuuagcauaugugguacaacugccacucuacggagugauugauacgcccuguuggaaacuucauacuucuccucugugcacaaccaacacuaaggaaggcuccaauaucuguuugacacgaaccgaccguggcugguacugcgauaacgccgggagcgucucguuuuucccacaggcugagacguguaaggugcagucuaauagaguuuucugcgacaccaugaacucccuaacacugcccucagaagugaaucucugcaacauagauauuuucaauccuaaauaugacuguaagaucaugacaaguaaaaccgaugucagcuccucugugaucacaagccugggagccauuguaucaugcuacgguaagacuaaauguaccgcaaguaacaagaauaggggcaucauuaagacauuuuccaacgggugcgacuauguuagcaauaaaggaguggacaccgucucugugggcaacacucuuuacugugucaacaagcaagagggucagucacuguaugugaaaggggagccaauaaucaauuucuacgauccguugguuuuucccagugacgaauuugaugcuagcauuucccaggugaacgagaagaucaaucagucucucgccuuuauccggaaaucggacgaacuguuacacaacguaaaugucggaaagagcacgacaaacauuaugauaaccacuaucauuaucgugauuaucguuauacugcuacuccugaucgcggugggccuuuucuuguauugcaaggcccgcuccaccccugucacacugucaaaagaucaacucaguggcauuaauaacaucgcauucucuaauugaggacuagucccuguucccagagcccacuuuuuuuucuuuuuuugaaauaaaauagccugucuuucagaucuaaaaaaaaaaaaaaaaaaaaaaaaaaaaaaaaaaaaaaaaaaaaaaaaaaaaaaaaaaaaaaaaugcaucccccccccccccccccccccccccccccccaaaggcucuuuucagagccaccagaauu

SEQ ID NO: 14715 - RNA, 1930 nt, Artificial Sequence
  mRNA product Design a-4 comprising derived and/or modified sequence from HRSV(Memphis-37)__AIY60640.1__F_DSCav1_mut2 (opt4)
gggagacuccugucgggcggaaguaggaggaguagaguuuaaaaacaguacucuuuuuccgguucgggacguaguugaagcaacgacaagccggauaaccgcucuugagacaggaagcuuaccauggagcugcccauccugaagaccaacgccaucaccaccauccuggccgccgugacccugugcuucgccagcagccagaacaucaccgaggaguucuaccagagcaccugcagcgccgugagcaagggcuaccugggcgcccugagaaccggcugguacaccagcgugaucaccaucgagcugagcaacaucaaggagaacaagugcaacggcaccgacgccaaggugaagcugaucaagcaggagcuggacaaguacaagaacgccgugaccgaccugcagcugcugaugcagagcacccccgccgccggcagcggcagcgccaucugcagcggcaucgccgugugcaaggugcugcaccuggagggcgaggugaacaagaucaagaacgcccugcugagcaccaacaaggccguggugagccugagcaacggcgugagcgugcugaccuucaaggugcuggaccugaagaacuacaucgacaagcagcugcugcccauccugaacaagcagagcugcagcauccccaacaucgagaccgugaucgaguuccagcagaagaacaacagacugcuggagaucaccagagaguucagcgugaacgccggcgugaccacccccgugagcaccuacaugcugaccaacagcgagcugcugagccugaucaacgacaugcccaucaccaacgaccagaagaagcugaugagcaacaacgugcagaucgugagacagcagagcuacagcaucaugugcaucaucaaggaggaggugcuggccuacguggugcagcugccccuguacggcgugaucgacacccccugcuggaagcugcacaccagcccccugugcaccaccaacaccaaggagggcagcaacaucugccugaccagaaccgacagaggcugguacugcgacaacgccggcagcgugagcuucuucccccaggccgagaccugcaaggugcagagcaacagaguguucugcgacaccaugaacagccugacccugcccagcgaggugaaccugugcaacaucgacaucuucaaccccaaguacgacugcaagaucaugaccagcaagaccgacgugagcagcagcgugaucaccagccugggcgccaucgugagcugcuacggcaagaccaagugcaccgccagcaacaagaacagaggcaucaucaagaccuucagcaacggcugcgacuacgugagcaacaagggcguggacaccgugagcgugggcaacacccuguacugcgugaacaagcaggagggccagagccuguacgugaagggcgagcccaucaucaacuucuacgacccccugguguuccccagcgacgaguucgacgccagcaucagccaggugaacgagaagaucaaccagagccuggccuucaucagaaagagcgacgagcugcugcacaacgugaacgugggcaagagcaccaccaacaucaugaucaccaccaucaucaucgugaucaucgugauccugcugcugcugaucgccgugggccuguuccuguacugcaaggccagaagcacccccgugacccugagcaaggaccagcugagcggcaucaacaacaucgccuucagcaacugaggacuagucccuguucccagagcccacuuuuuuuucuuuuuuugaaauaaaauagccugucuuucagaucuaaaaaaaaaaaaaaaaaaaaaaaaaaaaaaaaaaaaaaaaaaaaaaaaaaaaaaaaaaaaaaaaugcaucccccccccccccccccccccccccccccccaaaggcucuuuucagagccaccagaauu

SEQ ID NO: 14716 - RNA, 1930 nt, Artificial Sequence
  mRNA product Design a-4 comprising derived and/or modified sequence from HRSV(Memphis-37)__AIY60640.1__F_DSCav1_mut2 (opt5)
gggagacuccugucgggcggaaguaggaggaguagaguuuaaaaacaguacucuuuuuccgguucgggacguaguugaagcaacgacaagccggauaaccgcucuugagacaggaagcuuaccauggagcugcccauccucaagaccaacgccauuacaacgauccuggcugccgugacccuuugcuucgcgagcucccagaauauuacagaagaguuuuaccaaucuaccuguagcgcugucuccaaaggcuaucugggggcccucagaacaggaugguacaccucuguuaucacaauugaacugagcaacaucaaggagaauaaaugcaacggcaccgacgccaaggugaaacuuaucaagcaggaacuggauaaguauaaaaaugcugugacggaccuccagcugcugaugcaguccaccccugccgcugggucuggaagcgccauuuguuccggcaucgcggucugcaaggugcuccaccuggagggggagguuaacaaaauuaagaaugcccuucugagcacaaacaaagcuguggucucucucuccaauggagugagcguucugaccuucaaggugcuugaucugaagaacuacaucgacaaacaacuccugccgauucugaauaagcagucuuguuccauccccaacauugaaacagucaucgaguuucagcagaaaaauaaccggcuccuggaaaucacccgcgaguucagcgugaaugccggcgugacgacaccugucucuaccuauaugcuuacaaacuccgagcugcucagccugauuaacgauaugcccaucaccaaugaccaaaagaaacuuauguccaacaauguucagauugugagacagcagucuuacagcaucaugugcauuaucaaggaagaggugcuggcuuaugucgugcaacucccucuguacggcguuaucgauacccccuguuggaaacugcauacauccccucucugcacgaccaacacaaaggaagggagcaauauuugucugacccggacagaccgcggaugguacugcgauaacgccggcucuguguccuuuuucccgcaggcggagaccuguaagguccagagcaauagaguguuuugcgacacgaugaacucucuuacacugcccagcgaaguuaaucucugcaacaucgauauuuucaauccuaaauaugacuguaagaucaugaccuccaaaaccgaugugucuagcuccgucauuacaagccugggggccaucgugucuugcuacggaaagaccaaauguacagcuuccaacaagaaucggggcaucauuaagacguuuagcaacgggugcgacuaugucucuaauaaaggaguggacaccguuuccgugggcaacacacuuuacugugucaacaagcaagagggccagagccuguaugugaaaggggagcccaucauuaauuucuacgauccucucguuuuucccuccgacgaguucgaugccucuaucagccaggugaacgaaaagauuaaucagucccuggcuuuuauccgcaaaucugacgaacugcuccacaacgucaaugugggaaagagcaccacaaacauuaugaucaccacgaucauuaucgugauuaucguuauucugcuucugcucaucgccgucggccuguuccuguauugcaaggccagauccaccccggugacacuuagcaaagaucaacucucugggaucaauaacauugcuuucuccaauugaggacuagucccuguucccagagcccacuuuuuuuucuuuuuuugaaauaaaauagccugucuuucagaucuaaaaaaaaaaaaaaaaaaaaaaaaaaaaaaaaaaaaaaaaaaaaaaaaaaaaaaaaaaaaaaaaugcaucccccccccccccccccccccccccccccccaaaggcucuuuucagagccaccagaauu

SEQ ID NO: 14717 - RNA, 1930 nt, Artificial Sequence
  mRNA product Design a-4 comprising derived and/or modified sequence from HRSV(Memphis-37)__AIY60640.1__F_DSCav1_mut2 (opt6)
gggagacuccugucgggcggaaguaggaggaguagaguuuaaaaacaguacucuuuuuccgguucgggacguaguugaagcaacgacaagccggauaaccgcucuugagacaggaagcuuaccauggagcuuccaauauuaaaaacaaacgcuauaacaacuauacucgcagcaguuacacucugcuucgcauccucacaaaacauaacugaagaauuuuaccaauccacuugcucagccguaucaaaaggauaucuaggagcacuuagaaccggaugguauacaucagugauaacaauagaacuaagcaacauaaaagaaaacaagugcaacggaacugacgcaaaagucaaacuaaucaaacaagaacuagacaaauacaaaaacgcaguaacagaccuacaauuacuaaugcaaucaacaccagcagcaggaucagguucagccauaugcucagguaucgcuguaugcaaaguccuucaccuagaaggugaaguaaacaaaauuaaaaacgcccuacucaguacaaauaaagcugucguaaguuuaucaaacggaguaucaguccuuacauucaaaguauuagaccuaaaaaauuauauagacaaacaauuacuaccaauacucaacaaacaaucaugcucaauaccaaauauagaaaccguaauagaauuucagcaaaaaaauaacagauuacuagaaauaaccagagaauuuucagucaacgcaggagucacaacacccgucucaaccuacaugcuaaccaacucagaacuucuaucucuuaucaacgacaugcccauaaccaaugaucaaaaaaaauuaaugucuaauaacguucaaauaguaagacaacaaucauacucaauaaugugcauaaucaaagaagaaguauuagcauacguaguacaacuaccccuauauggaguaauagacacacccugcuggaaacuacacacauccccccucuguacaacaaacacuaaagaaggaucaaacauuugccuaacaagaacagaccgcggaugguacugcgacaacgcaggcuccguaucuuucuuuccacaagccgaaacuuguaaaguucaaucaaacagaguauuuugcgauacaaugaacuccuuaacauuaccuucagaaguaaaccuaugcaacauagacaucuucaacccaaaauacgacugcaaaauaaugaccucaaaaacagacguauccucaucagucauaaccuccuuaggagcaauaguaucauguuacggaaaaacaaaauguacagcaucaaauaaaaauagaggaauaauaaaaaccuucuccaacggaugcgacuacguauccaauaaaggaguagacaccguaucaguaggaaacacacuauacuguguaaacaaacaagaaggccaaucucuauauguaaaaggcgaaccaaucauaaauuuuuacgacccacuugucuuccccuccgacgaauuugacgcaagcauaucacaaguaaacgaaaaaaucaaccaaagccuagccuucauaaggaaaucugacgaauuacuucauaacguaaauguuggaaaaucaaccacaaacauaaugauaaccaccaucauaauuguaauaauaguaauacuacuacuacuaauugcaguaggacucuuccuauauugcaaagcucgcucaacaccaguuaccuuaucaaaagaccaacuaucuggaauaaacaacauagccuuuuccaacuaaggacuagucccuguucccagagcccacuuuuuuuucuuuuuuugaaauaaaauagccugucuuucagaucuaaaaaaaaaaaaaaaaaaaaaaaaaaaaaaaaaaaaaaaaaaaaaaaaaaaaaaaaaaaaaaaaugcaucccccccccccccccccccccccccccccccaaaggcucuuuucagagccaccagaauu

SEQ ID NO: 14718 - RNA, 1930 nt, Artificial Sequence
  mRNA product Design a-4 comprising derived and/or modified sequence from HRSV(Memphis-37)__AIY60640.1__F_DSCav1_mut2 (opt11)
gggagacuccugucgggcggaaguaggaggaguagaguuuaaaaacaguacucuuuuuccgguucgggacguaguugaagcaacgacaagccggauaaccgcucuugagacaggaagcuuaccauggaacucccaauccuaaaaaccaacgccaucaccaccauccucgccgcugucaccuuaugcuuugccagcagccaaaacaucaccgaagaauuuuaccaaucaacaugcuccgccgucucaaaaggauaccucggcgcccuacgcaccggcugguacacaagcgucauaaccaucgagcucuccaacaucaaggaaaacaaaugcaauggaaccgacgccaaagucaaacuaaucaaacaagaacuagacaaguacaagaacgcagucaccgaccuccaacuccucaugcaguccacccccgcagcaggcucuggcucagcaauaugcuccggcaucgcugucugcaaaguccuacaccucgaaggcgaagucaacaaaaucaaaaacgcccuacuguccacaaacaaagccgucgucucccuauccaacggcgucucgguccuaaccuuuaagguucucgaucucaaaaauuacauagacaaacaacuacuccccauccucaacaaacaaucuugcucaauccccaacaucgaaaccgucaucgaguuccaacagaaaaacaacagacuacucgaaaucacccgcgaguucucagucaacgcgggcgucacaacacccgucagcaccuacaugcuaaccaacuccgaacuccucagccucauuaacgacaugcccaucaccaacgaccaaaagaaacuuauguccaacaacguucaaaucguccgccaacaauccuacuccaucaugugcaucaucaaagaagaaguacucgccuacguaguccaacugccccucuacggcgucaucgauaccccaugcuggaaacuacacaccagcccccucugcaccaccaacaccaaagaaggcuccaauaucugcuuaacccgcacagaccguggcugguacugcgauaacgccggcuccgucuccuucuucccccaagcagaaaccugcaaaguacaauccaaccgagucuucugugacaccaugaacucccuaacccuuccaucagaagucaaccucugcaacaucgacaucuucaaccccaaguacgacugcaaaaucaugacauccaaaaccgaugucucaagcagcgucauaaccucacucggcgcuaucguaagcugcuacggcaaaaccaaaugcaccgcaucaaacaaaaaccgcggaaucaucaaaaccuucagcaacggaugcgacuacguuuccaacaaaggcguagacaccgucuccgucggaaacacccucuacugcguaaacaaacaggaaggccaaucccucuacgucaaaggcgaacccaucauaaacuucuacgauccccuugucuucccguccgaugaguucgacgccuccaucucgcaagucaacgaaaagauaaaccaaucacuagcauucauccguaaauccgacgaacuccuccacaacgucaacgucggaaaauccaccaccaacauaaugaucaccaccauaaucaucgucaucaucguaauacuauuacuccucauagccgucggccucuuccuauauugcaaagcccgaucaacccccguaacccuuucuaaagaccaacuguccggaaucaacaacaucgcuuucagcaacugaggacuagucccuguucccagagcccacuuuuuuuucuuuuuuugaaauaaaauagccugucuuucagaucuaaaaaaaaaaaaaaaaaaaaaaaaaaaaaaaaaaaaaaaaaaaaaaaaaaaaaaaaaaaaaaaaugcaucccccccccccccccccccccccccccccccaaaggcucuuuucagagccaccagaauu

SEQ ID NO: 14719 - RNA, 1876 nt, Artificial Sequence
  mRNA product Design a-5 comprising derived and/or modified sequence from HRSV(Memphis-37)__AIY60640.1__F_DSCav1_mut2 (opt1)
gggagacuuucccauucuguagcagaauuugguguugccuguggucuuggucccgcggagaagcuuaccauggagcugcccauccucaagaccaacgccaucaccacgauccuggccgcggugacccugugcuucgccagcucccagaacaucaccgaggaguucuaccagagcacgugcuccgccgucagcaagggcuaccucggcgcccugcgcaccgggugguacaccagcgugaucaccaucgagcuguccaacaucaaggagaacaagugcaacggcaccgacgccaaggugaagcucaucaagcaggagcuggacaaguacaagaacgcggucacggaccugcagcuccugaugcagagcaccccggccgccggcuccgggagcgcgaucugcuccggcaucgccgucugcaaggugcugcaccucgagggcgaggugaacaagaucaagaacgcccugcuguccaccaacaaggccgucgugagccucuccaacggggugagcguccugaccuucaaggugcuggaccucaagaacuacaucgacaagcagcugcugcccauccugaacaagcagagcugcuccauccccaacaucgagaccgucaucgaguuccagcagaagaacaaccgccuccuggagaucacgcgggaguucagcgugaacgcgggcgugaccacccccgucuccaccuacaugcugacgaacagcgagcuccugucccugaucaacgacaugccgaucaccaacgaccagaagaagcucaugagcaacaacgugcagaucgugcgccagcaguccuacagcaucaugugcaucaucaaggaggagguccuggccuacguggugcagcugccccucuacggggucaucgacacccccugcuggaagcugcacaccagcccccugugcacgaccaacaccaaggagggcuccaacaucugccucacccggacggaccgcgggugguacugcgacaacgccggcagcguguccuucuucccgcaggccgagaccugcaagguccagagcaaccggguguucugcgacaccaugaacucccugacccugcccagcgaggugaaccucugcaacaucgacaucuucaaccccaaguacgacugcaagaucaugacguccaagaccgacgucagcuccagcgugaucaccucccugggcgccaucgugagcugcuacgggaagaccaagugcacggcgagcaacaagaaccgcggcaucaucaagaccuucuccaacgggugcgacuacgucagcaacaagggcguggacaccguguccgucggcaacacccuguacugcgugaacaagcaggagggccagagccucuacgugaagggggagcccaucaucaacuucuacgacccgcuggucuuccccuccgacgaguucgacgccagcaucucccaggugaacgagaagaucaaccagagccuggccuucauccggaaguccgacgagcuccugcacaacgugaacgucggcaagagcaccacgaacaucaugaucaccaccaucaucaucgugaucaucgugauccugcugcuccugaucgccgucgggcuguuccucuacugcaaggcccgcuccacccccgugacgcugagcaaggaccagcuguccgggaucaacaacaucgcguucagcaacugaggacuagucccuguucccagagcccacuuuuuuuucuuuuuuugaaauaaaauagccugucuuucagaucuaaaaaaaaaaaaaaaaaaaaaaaaaaaaaaaaaaaaaaaaaaaaaaaaaaaaaaaaaaaaaaaaugcaucccccccccccccccccccccccccccccccaaaggcucuuuucagagccaccagaauu

SEQ ID NO: 14720 - RNA, 1876 nt, Artificial Sequence
  mRNA product Design a-5 comprising derived and/or modified sequence from HRSV(Memphis-37)__AIY60640.1__F_DSCav1_mut2 (opt1)
gggagacuuucccauucuguagcagaauuugguguugccuguggucuuggucccgcggagaagcuuaccauggagcugcccauccucaagaccaacgccaucaccacgauccuggccgcggugacccugugcuucgccagcucccagaacaucaccgaggaguucuaccagagcacgugcuccgccgucagcaagggcuaccucggggcccugcgcaccggcugguacaccuccgugaucaccaucgagcugagcaacaucaaggagaacaagugcaacgggaccgacgccaaggugaagcucaucaagcaggagcuggacaaguacaagaacgcggucacggaccugcagcuccugaugcaguccaccccggccgccggcagcggguccgccaucugcagcggcaucgcggugugcaaggugcugcaccucgagggcgaggucaacaagaucaagaacgcccugcuguccaccaacaaggccguggugagccucuccaacggggucagcgugcugaccuucaaggugcuggaccucaagaacuacaucgacaagcagcugcugcccauccucaacaagcaguccugcagcauccccaacaucgagacggucaucgaguuccagcagaagaacaaccggcugcuggagaucacccgcgaguucuccgugaacgccggcgugaccacccccgucagcacguacaugcucaccaacuccgagcugcugagccucaucaacgacaugccgaucaccaacgaccagaagaagcugaugagcaacaacgugcagaucgugcggcagcaguccuacagcaucaugugcaucaucaaggaggagguccuggccuacguggugcagcucccccuguacggggucaucgacacccccugcuggaagcugcacacgagcccccucugcaccaccaacaccaaggagggcuccaacaucugccugacgcgcaccgaccgggggugguacugcgacaacgcgggcuccgugagcuucuucccgcaggccgagaccugcaaggugcaguccaaccgcgucuucugcgacaccaugaacagccugacgcuccccuccgaggugaaccugugcaacaucgacaucuucaaccccaaguacgacugcaagaucaugaccagcaagaccgacgucuccagcuccgugaucaccagccugggcgccaucguguccugcuacgggaagacgaagugcaccgccagcaacaagaaccggggcaucaucaagaccuucuccaacgggugcgacuacgucagcaacaagggcguggacaccguguccgucggcaacacgcucuacugcgugaacaagcaggaggggcagagccuguacgugaagggcgagcccaucaucaacuucuacgacccgcuggucuuccccagcgacgaguucgacgccuccaucagccaggugaacgagaagaucaaccagucccucgcguucauccgcaagagcgacgagcugcugcacaacgugaacgucgggaaguccaccaccaacaucaugaucaccaccaucaucaucgugaucaucgugauccuccugcugcucaucgccgucggccuguuccuguacugcaaggcccggagcacgcccgugacccuguccaaggaccagcucagcgggaucaacaacaucgccuucuccaacugaggacuagucccuguucccagagcccacuuuuuuuucuuuuuuugaaauaaaauagccugucuuucagaucuaaaaaaaaaaaaaaaaaaaaaaaaaaaaaaaaaaaaaaaaaaaaaaaaaaaaaaaaaaaaaaaaugcaucccccccccccccccccccccccccccccccaaaggcucuuuucagagccaccagaauu

SEQ ID NO: 14721 - RNA, 1876 nt, Artificial Sequence
  mRNA product Design a-5 comprising derived and/or modified sequence from HRSV(Memphis-37)__AIY60640.1__F_DSCav1_mut2 (opt2)
gggagacuuucccauucuguagcagaauuugguguugccuguggucuuggucccgcggagaagcuuaccauggagcuccccauccucaagaccaacgccaucaccaccauccucgccgccgucacccucugcuucgccuccucccagaacaucaccgaggaguucuaccaguccaccugcuccgccgucuccaagggcuaccucggcgcccuccgcaccggcugguacaccuccgucaucaccaucgagcucuccaacaucaaggagaacaagugcaacggcaccgacgccaaggucaagcucaucaagcaggagcucgacaaguacaagaacgccgucaccgaccuccagcuccucaugcaguccacccccgccgccggcuccggcuccgccaucugcuccggcaucgccgucugcaagguccuccaccucgagggcgaggucaacaagaucaagaacgcccuccucuccaccaacaaggccgucgucucccucuccaacggcgucuccguccucaccuucaagguccucgaccucaagaacuacaucgacaagcagcuccuccccauccucaacaagcaguccugcuccauccccaacaucgagaccgucaucgaguuccagcagaagaacaaccgccuccucgagaucacccgcgaguucuccgucaacgccggcgucaccacccccgucuccaccuacaugcucaccaacuccgagcuccucucccucaucaacgacaugcccaucaccaacgaccagaagaagcucauguccaacaacguccagaucguccgccagcaguccuacuccaucaugugcaucaucaaggaggagguccucgccuacgucguccagcucccccucuacggcgucaucgacacccccugcuggaagcuccacaccuccccccucugcaccaccaacaccaaggagggcuccaacaucugccucacccgcaccgaccgcggcugguacugcgacaacgccggcuccgucuccuucuucccccaggccgagaccugcaagguccaguccaaccgcgucuucugcgacaccaugaacucccucacccuccccuccgaggucaaccucugcaacaucgacaucuucaaccccaaguacgacugcaagaucaugaccuccaagaccgacgucuccuccuccgucaucaccucccucggcgccaucgucuccugcuacggcaagaccaagugcaccgccuccaacaagaaccgcggcaucaucaagaccuucuccaacggcugcgacuacgucuccaacaagggcgucgacaccgucuccgucggcaacacccucuacugcgucaacaagcaggagggccagucccucuacgucaagggcgagcccaucaucaacuucuacgacccccucgucuuccccuccgacgaguucgacgccuccaucucccaggucaacgagaagaucaaccagucccucgccuucauccgcaaguccgacgagcuccuccacaacgucaacgucggcaaguccaccaccaacaucaugaucaccaccaucaucaucgucaucaucgucauccuccuccuccucaucgccgucggccucuuccucuacugcaaggcccgcuccacccccgucacccucuccaaggaccagcucuccggcaucaacaacaucgccuucuccaacugaggacuagucccuguucccagagcccacuuuuuuuucuuuuuuugaaauaaaauagccugucuuucagaucuaaaaaaaaaaaaaaaaaaaaaaaaaaaaaaaaaaaaaaaaaaaaaaaaaaaaaaaaaaaaaaaaugcaucccccccccccccccccccccccccccccccaaaggcucuuuucagagccaccagaauu

SEQ ID NO: 14722 - RNA, 1876 nt, Artificial Sequence
  mRNA product Design a-5 comprising derived and/or modified sequence from HRSV(Memphis-37)__AIY60640.1__F_DSCav1_mut2 (opt3)
gggagacuuucccauucuguagcagaauuugguguugccuguggucuuggucccgcggagaagcuuaccauggagcugcccauccucaagaccaacgccauuacaacuauacuugcugcagugacgcugugcuucgccagcucccagaauaucaccgaagaguuuuaccaaucuacauguucagcggucaguaaaggcuauuugggggcuuuaagaacuggaugguacaccagcguuauuacaaucgaacuguccaacauuaaggagaauaaaugcaacgguaccgacgccaaggugaaacuaaucaagcaggaacucgauaaguauaaaaaugcaguaacugaccugcagcuucugaugcagucuacuccugccgcuggcucggggucagcaauauguagcggaaucgccgugugcaaggucuugcaccucgagggcgaggugaacaaaauuaagaaugcucugcugaguaccaacaaagccguugugucccucucuaauggugucagcguguuaacguucaagguacuggaucuuaagaacuacaucgacaaacaauugcugccaauucuaaauaagcaguccuguucaaucccgaacauagaaacuguuauugaguuucagcagaaaaauaacaggcuccuggaaaucacccgggaguucagugugaaugcgggggucacaacucccgugagcaccuauaugcuuacaaacucugagcuguugucccucauuaacgauaugccuaucaccaaugaccaaaagaaacugaugucaaacaaugugcagaucguccgccagcagagcuacaguauuaugugcauaaucaaggaagagguuuuagcauaugugguacaacugccacucuacggagugauugauacgcccuguuggaaacuucauacuucuccucugugcacaaccaacacuaaggaaggcuccaauaucuguuugacacgaaccgaccguggcugguacugcgauaacgccgggagcgucucguuuuucccacaggcugagacguguaaggugcagucuaauagaguuuucugcgacaccaugaacucccuaacacugcccucagaagugaaucucugcaacauagauauuuucaauccuaaauaugacuguaagaucaugacaaguaaaaccgaugucagcuccucugugaucacaagccugggagccauuguaucaugcuacgguaagacuaaauguaccgcaaguaacaagaauaggggcaucauuaagacauuuuccaacgggugcgacuauguuagcaauaaaggaguggacaccgucucugugggcaacacucuuuacugugucaacaagcaagagggucagucacuguaugugaaaggggagccaauaaucaauuucuacgauccguugguuuuucccagugacgaauuugaugcuagcauuucccaggugaacgagaagaucaaucagucucucgccuuuauccggaaaucggacgaacuguuacacaacguaaaugucggaaagagcacgacaaacauuaugauaaccacuaucauuaucgugauuaucguuauacugcuacuccugaucgcggugggccuuuucuuguauugcaaggcccgcuccaccccugucacacugucaaaagaucaacucaguggcauuaauaacaucgcauucucuaauugaggacuagucccuguucccagagcccacuuuuuuuucuuuuuuugaaauaaaauagccugucuuucagaucuaaaaaaaaaaaaaaaaaaaaaaaaaaaaaaaaaaaaaaaaaaaaaaaaaaaaaaaaaaaaaaaaugcaucccccccccccccccccccccccccccccccaaaggcucuuuucagagccaccagaauu

SEQ ID NO: 14723 - RNA, 1876 nt, Artificial Sequence
  mRNA product Design a-5 comprising derived and/or modified sequence from HRSV(Memphis-37)__AIY60640.1__F_DSCav1_mut2 (opt4)
gggagacuuucccauucuguagcagaauuugguguugccuguggucuuggucccgcggagaagcuuaccauggagcugcccauccugaagaccaacgccaucaccaccauccuggccgccgugacccugugcuucgccagcagccagaacaucaccgaggaguucuaccagagcaccugcagcgccgugagcaagggcuaccugggcgcccugagaaccggcugguacaccagcgugaucaccaucgagcugagcaacaucaaggagaacaagugcaacggcaccgacgccaaggugaagcugaucaagcaggagcuggacaaguacaagaacgccgugaccgaccugcagcugcugaugcagagcacccccgccgccggcagcggcagcgccaucugcagcggcaucgccgugugcaaggugcugcaccuggagggcgaggugaacaagaucaagaacgcccugcugagcaccaacaaggccguggugagccugagcaacggcgugagcgugcugaccuucaaggugcuggaccugaagaacuacaucgacaagcagcugcugcccauccugaacaagcagagcugcagcauccccaacaucgagaccgugaucgaguuccagcagaagaacaacagacugcuggagaucaccagagaguucagcgugaacgccggcgugaccacccccgugagcaccuacaugcugaccaacagcgagcugcugagccugaucaacgacaugcccaucaccaacgaccagaagaagcugaugagcaacaacgugcagaucgugagacagcagagcuacagcaucaugugcaucaucaaggaggaggugcuggccuacguggugcagcugccccuguacggcgugaucgacacccccugcuggaagcugcacaccagcccccugugcaccaccaacaccaaggagggcagcaacaucugccugaccagaaccgacagaggcugguacugcgacaacgccggcagcgugagcuucuucccccaggccgagaccugcaaggugcagagcaacagaguguucugcgacaccaugaacagccugacccugcccagcgaggugaaccugugcaacaucgacaucuucaaccccaaguacgacugcaagaucaugaccagcaagaccgacgugagcagcagcgugaucaccagccugggcgccaucgugagcugcuacggcaagaccaagugcaccgccagcaacaagaacagaggcaucaucaagaccuucagcaacggcugcgacuacgugagcaacaagggcguggacaccgugagcgugggcaacacccuguacugcgugaacaagcaggagggccagagccuguacgugaagggcgagcccaucaucaacuucuacgacccccugguguuccccagcgacgaguucgacgccagcaucagccaggugaacgagaagaucaaccagagccuggccuucaucagaaagagcgacgagcugcugcacaacgugaacgugggcaagagcaccaccaacaucaugaucaccaccaucaucaucgugaucaucgugauccugcugcugcugaucgccgugggccuguuccuguacugcaaggccagaagcacccccgugacccugagcaaggaccagcugagcggcaucaacaacaucgccuucagcaacugaggacuagucccuguucccagagcccacuuuuuuuucuuuuuuugaaauaaaauagccugucuuucagaucuaaaaaaaaaaaaaaaaaaaaaaaaaaaaaaaaaaaaaaaaaaaaaaaaaaaaaaaaaaaaaaaaugcaucccccccccccccccccccccccccccccccaaaggcucuuuucagagccaccagaauu

SEQ ID NO: 14724 - RNA, 1876 nt, Artificial Sequence
  mRNA product Design a-5 comprising derived and/or modified sequence from HRSV(Memphis-37)__AIY60640.1__F_DSCav1_mut2 (opt5)
gggagacuuucccauucuguagcagaauuugguguugccuguggucuuggucccgcggagaagcuuaccauggagcugcccauccucaagaccaacgccauuacaacgauccuggcugccgugacccuuugcuucgcgagcucccagaauauuacagaagaguuuuaccaaucuaccuguagcgcugucuccaaaggcuaucugggggcccucagaacaggaugguacaccucuguuaucacaauugaacugagcaacaucaaggagaauaaaugcaacggcaccgacgccaaggugaaacuuaucaagcaggaacuggauaaguauaaaaaugcugugacggaccuccagcugcugaugcaguccaccccugccgcugggucuggaagcgccauuuguuccggcaucgcggucugcaaggugcuccaccuggagggggagguuaacaaaauuaagaaugcccuucugagcacaaacaaagcuguggucucucucuccaauggagugagcguucugaccuucaaggugcuugaucugaagaacuacaucgacaaacaacuccugccgauucugaauaagcagucuuguuccauccccaacauugaaacagucaucgaguuucagcagaaaaauaaccggcuccuggaaaucacccgcgaguucagcgugaaugccggcgugacgacaccugucucuaccuauaugcuuacaaacuccgagcugcucagccugauuaacgauaugcccaucaccaaugaccaaaagaaacuuauguccaacaauguucagauugugagacagcagucuuacagcaucaugugcauuaucaaggaagaggugcuggcuuaugucgugcaacucccucuguacggcguuaucgauacccccuguuggaaacugcauacauccccucucugcacgaccaacacaaaggaagggagcaauauuugucugacccggacagaccgcggaugguacugcgauaacgccggcucuguguccuuuuucccgcaggcggagaccuguaagguccagagcaauagaguguuuugcgacacgaugaacucucuuacacugcccagcgaaguuaaucucugcaacaucgauauuuucaauccuaaauaugacuguaagaucaugaccuccaaaaccgaugugucuagcuccgucauuacaagccugggggccaucgugucuugcuacggaaagaccaaauguacagcuuccaacaagaaucggggcaucauuaagacguuuagcaacgggugcgacuaugucucuaauaaaggaguggacaccguuuccgugggcaacacacuuuacugugucaacaagcaagagggccagagccuguaugugaaaggggagcccaucauuaauuucuacgauccucucguuuuucccuccgacgaguucgaugccucuaucagccaggugaacgaaaagauuaaucagucccuggcuuuuauccgcaaaucugacgaacugcuccacaacgucaaugugggaaagagcaccacaaacauuaugaucaccacgaucauuaucgugauuaucguuauucugcuucugcucaucgccgucggccuguuccuguauugcaaggccagauccaccccggugacacuuagcaaagaucaacucucugggaucaauaacauugcuuucuccaauugaggacuagucccuguucccagagcccacuuuuuuuucuuuuuuugaaauaaaauagccugucuuucagaucuaaaaaaaaaaaaaaaaaaaaaaaaaaaaaaaaaaaaaaaaaaaaaaaaaaaaaaaaaaaaaaaaugcaucccccccccccccccccccccccccccccccaaaggcucuuuucagagccaccagaauu

SEQ ID NO: 14725 - RNA, 1876 nt, Artificial Sequence
  mRNA product Design a-5 comprising derived and/or modified sequence from HRSV(Memphis-37)__AIY60640.1__F_DSCav1_mut2 (opt6)
gggagacuuucccauucuguagcagaauuugguguugccuguggucuuggucccgcggagaagcuuaccauggagcuuccaauauuaaaaacaaacgcuauaacaacuauacucgcagcaguuacacucugcuucgcauccucacaaaacauaacugaagaauuuuaccaauccacuugcucagccguaucaaaaggauaucuaggagcacuuagaaccggaugguauacaucagugauaacaauagaacuaagcaacauaaaagaaaacaagugcaacggaacugacgcaaaagucaaacuaaucaaacaagaacuagacaaauacaaaaacgcaguaacagaccuacaauuacuaaugcaaucaacaccagcagcaggaucagguucagccauaugcucagguaucgcuguaugcaaaguccuucaccuagaaggugaaguaaacaaaauuaaaaacgcccuacucaguacaaauaaagcugucguaaguuuaucaaacggaguaucaguccuuacauucaaaguauuagaccuaaaaaauuauauagacaaacaauuacuaccaauacucaacaaacaaucaugcucaauaccaaauauagaaaccguaauagaauuucagcaaaaaaauaacagauuacuagaaauaaccagagaauuuucagucaacgcaggagucacaacacccgucucaaccuacaugcuaaccaacucagaacuucuaucucuuaucaacgacaugcccauaaccaaugaucaaaaaaaauuaaugucuaauaacguucaaauaguaagacaacaaucauacucaauaaugugcauaaucaaagaagaaguauuagcauacguaguacaacuaccccuauauggaguaauagacacacccugcuggaaacuacacacauccccccucuguacaacaaacacuaaagaaggaucaaacauuugccuaacaagaacagaccgcggaugguacugcgacaacgcaggcuccguaucuuucuuuccacaagccgaaacuuguaaaguucaaucaaacagaguauuuugcgauacaaugaacuccuuaacauuaccuucagaaguaaaccuaugcaacauagacaucuucaacccaaaauacgacugcaaaauaaugaccucaaaaacagacguauccucaucagucauaaccuccuuaggagcaauaguaucauguuacggaaaaacaaaauguacagcaucaaauaaaaauagaggaauaauaaaaaccuucuccaacggaugcgacuacguauccaauaaaggaguagacaccguaucaguaggaaacacacuauacuguguaaacaaacaagaaggccaaucucuauauguaaaaggcgaaccaaucauaaauuuuuacgacccacuugucuuccccuccgacgaauuugacgcaagcauaucacaaguaaacgaaaaaaucaaccaaagccuagccuucauaaggaaaucugacgaauuacuucauaacguaaauguuggaaaaucaaccacaaacauaaugauaaccaccaucauaauuguaauaauaguaauacuacuacuacuaauugcaguaggacucuuccuauauugcaaagcucgcucaacaccaguuaccuuaucaaaagaccaacuaucuggaauaaacaacauagccuuuuccaacuaaggacuagucccuguucccagagcccacuuuuuuuucuuuuuuugaaauaaaauagccugucuuucagaucuaaaaaaaaaaaaaaaaaaaaaaaaaaaaaaaaaaaaaaaaaaaaaaaaaaaaaaaaaaaaaaaaugcaucccccccccccccccccccccccccccccccaaaggcucuuuucagagccaccagaauu

SEQ ID NO: 14726 - RNA, 1876 nt, Artificial Sequence
  mRNA product Design a-5 comprising derived and/or modified sequence from HRSV(Memphis-37)__AIY60640.1__F_DSCav1_mut2 (opt11)
gggagacuuucccauucuguagcagaauuugguguugccuguggucuuggucccgcggagaagcuuaccauggaacucccaauccuaaaaaccaacgccaucaccaccauccucgccgcugucaccuuaugcuuugccagcagccaaaacaucaccgaagaauuuuaccaaucaacaugcuccgccgucucaaaaggauaccucggcgcccuacgcaccggcugguacacaagcgucauaaccaucgagcucuccaacaucaaggaaaacaaaugcaauggaaccgacgccaaagucaaacuaaucaaacaagaacuagacaaguacaagaacgcagucaccgaccuccaacuccucaugcaguccacccccgcagcaggcucuggcucagcaauaugcuccggcaucgcugucugcaaaguccuacaccucgaaggcgaagucaacaaaaucaaaaacgcccuacuguccacaaacaaagccgucgucucccuauccaacggcgucucgguccuaaccuuuaagguucucgaucucaaaaauuacauagacaaacaacuacuccccauccucaacaaacaaucuugcucaauccccaacaucgaaaccgucaucgaguuccaacagaaaaacaacagacuacucgaaaucacccgcgaguucucagucaacgcgggcgucacaacacccgucagcaccuacaugcuaaccaacuccgaacuccucagccucauuaacgacaugcccaucaccaacgaccaaaagaaacuuauguccaacaacguucaaaucguccgccaacaauccuacuccaucaugugcaucaucaaagaagaaguacucgccuacguaguccaacugccccucuacggcgucaucgauaccccaugcuggaaacuacacaccagcccccucugcaccaccaacaccaaagaaggcuccaauaucugcuuaacccgcacagaccguggcugguacugcgauaacgccggcuccgucuccuucuucccccaagcagaaaccugcaaaguacaauccaaccgagucuucugugacaccaugaacucccuaacccuuccaucagaagucaaccucugcaacaucgacaucuucaaccccaaguacgacugcaaaaucaugacauccaaaaccgaugucucaagcagcgucauaaccucacucggcgcuaucguaagcugcuacggcaaaaccaaaugcaccgcaucaaacaaaaaccgcggaaucaucaaaaccuucagcaacggaugcgacuacguuuccaacaaaggcguagacaccgucuccgucggaaacacccucuacugcguaaacaaacaggaaggccaaucccucuacgucaaaggcgaacccaucauaaacuucuacgauccccuugucuucccguccgaugaguucgacgccuccaucucgcaagucaacgaaaagauaaaccaaucacuagcauucauccguaaauccgacgaacuccuccacaacgucaacgucggaaaauccaccaccaacauaaugaucaccaccauaaucaucgucaucaucguaauacuauuacuccucauagccgucggccucuuccuauauugcaaagcccgaucaacccccguaacccuuucuaaagaccaacuguccggaaucaacaacaucgcuuucagcaacugaggacuagucccuguucccagagcccacuuuuuuuucuuuuuuugaaauaaaauagccugucuuucagaucuaaaaaaaaaaaaaaaaaaaaaaaaaaaaaaaaaaaaaaaaaaaaaaaaaaaaaaaaaaaaaaaaugcaucccccccccccccccccccccccccccccccaaaggcucuuuucagagccaccagaauu

SEQ ID NO: 14727 - RNA, 2057 nt, Artificial Sequence
  mRNA product Design b-1 comprising derived and/or modified sequence from HRSV(Memphis-37)__AIY60640.1__F_DSCav1_mut2 (opt1)
gggagacggagacggccugcaggaccugcucucucagcccucagccgaggccuacgccgagccgagugcgcagccgacgaccgggaggagccgcagccuucaacucugagguacugugauccgcgcugcccgccgggccgccccaguccgcugcugcggcaccuccuucccucgcgcccucuucgcucgccagcgccuucccugugagccugcgucaccgcggccgccaagcuuaccauggagcugcccauccucaagaccaacgccaucaccacgauccuggccgcggugacccugugcuucgccagcucccagaacaucaccgaggaguucuaccagagcacgugcuccgccgucagcaagggcuaccucggcgcccugcgcaccgggugguacaccagcgugaucaccaucgagcuguccaacaucaaggagaacaagugcaacggcaccgacgccaaggugaagcucaucaagcaggagcuggacaaguacaagaacgcggucacggaccugcagcuccugaugcagagcaccccggccgccggcuccgggagcgcgaucugcuccggcaucgccgucugcaaggugcugcaccucgagggcgaggugaacaagaucaagaacgcccugcuguccaccaacaaggccgucgugagccucuccaacggggugagcguccugaccuucaaggugcuggaccucaagaacuacaucgacaagcagcugcugcccauccugaacaagcagagcugcuccauccccaacaucgagaccgucaucgaguuccagcagaagaacaaccgccuccuggagaucacgcgggaguucagcgugaacgcgggcgugaccacccccgucuccaccuacaugcugacgaacagcgagcuccugucccugaucaacgacaugccgaucaccaacgaccagaagaagcucaugagcaacaacgugcagaucgugcgccagcaguccuacagcaucaugugcaucaucaaggaggagguccuggccuacguggugcagcugccccucuacggggucaucgacacccccugcuggaagcugcacaccagcccccugugcacgaccaacaccaaggagggcuccaacaucugccucacccggacggaccgcgggugguacugcgacaacgccggcagcguguccuucuucccgcaggccgagaccugcaagguccagagcaaccggguguucugcgacaccaugaacucccugacccugcccagcgaggugaaccucugcaacaucgacaucuucaaccccaaguacgacugcaagaucaugacguccaagaccgacgucagcuccagcgugaucaccucccugggcgccaucgugagcugcuacgggaagaccaagugcacggcgagcaacaagaaccgcggcaucaucaagaccuucuccaacgggugcgacuacgucagcaacaagggcguggacaccguguccgucggcaacacccuguacugcgugaacaagcaggagggccagagccucuacgugaagggggagcccaucaucaacuucuacgacccgcuggucuuccccuccgacgaguucgacgccagcaucucccaggugaacgagaagaucaaccagagccuggccuucauccggaaguccgacgagcuccugcacaacgugaacgucggcaagagcaccacgaacaucaugaucaccaccaucaucaucgugaucaucgugauccugcugcuccugaucgccgucgggcuguuccucuacugcaaggcccgcuccacccccgugacgcugagcaaggaccagcuguccgggaucaacaacaucgcguucagcaacugaggacuaguguccaccugucccuccugggcugcuggauugucucguuuuccugccaaauaaacaggaucagcgcuuuacagaucuaaaaaaaaaaaaaaaaaaaaaaaaaaaaaaaaaaaaaaaaaaaaaaaaaaaaaaaaaaaaaaaaugcaucccccccccccccccccccccccccccccccaaaggcucuuuucagagccaccagaauu

SEQ ID NO: 14728 - RNA, 2057 nt, Artificial Sequence
  mRNA product Design b-1 comprising derived and/or modified sequence from HRSV(Memphis-37)__AIY60640.1__F_DSCav1_mut2 (opt1)
gggagacggagacggccugcaggaccugcucucucagcccucagccgaggccuacgccgagccgagugcgcagccgacgaccgggaggagccgcagccuucaacucugagguacugugauccgcgcugcccgccgggccgccccaguccgcugcugcggcaccuccuucccucgcgcccucuucgcucgccagcgccuucccugugagccugcgucaccgcggccgccaagcuuaccauggagcugcccauccucaagaccaacgccaucaccacgauccuggccgcggugacccugugcuucgccagcucccagaacaucaccgaggaguucuaccagagcacgugcuccgccgucagcaagggcuaccucggggcccugcgcaccggcugguacaccuccgugaucaccaucgagcugagcaacaucaaggagaacaagugcaacgggaccgacgccaaggugaagcucaucaagcaggagcuggacaaguacaagaacgcggucacggaccugcagcuccugaugcaguccaccccggccgccggcagcggguccgccaucugcagcggcaucgcggugugcaaggugcugcaccucgagggcgaggucaacaagaucaagaacgcccugcuguccaccaacaaggccguggugagccucuccaacggggucagcgugcugaccuucaaggugcuggaccucaagaacuacaucgacaagcagcugcugcccauccucaacaagcaguccugcagcauccccaacaucgagacggucaucgaguuccagcagaagaacaaccggcugcuggagaucacccgcgaguucuccgugaacgccggcgugaccacccccgucagcacguacaugcucaccaacuccgagcugcugagccucaucaacgacaugccgaucaccaacgaccagaagaagcugaugagcaacaacgugcagaucgugcggcagcaguccuacagcaucaugugcaucaucaaggaggagguccuggccuacguggugcagcucccccuguacggggucaucgacacccccugcuggaagcugcacacgagcccccucugcaccaccaacaccaaggagggcuccaacaucugccugacgcgcaccgaccgggggugguacugcgacaacgcgggcuccgugagcuucuucccgcaggccgagaccugcaaggugcaguccaaccgcgucuucugcgacaccaugaacagccugacgcuccccuccgaggugaaccugugcaacaucgacaucuucaaccccaaguacgacugcaagaucaugaccagcaagaccgacgucuccagcuccgugaucaccagccugggcgccaucguguccugcuacgggaagacgaagugcaccgccagcaacaagaaccggggcaucaucaagaccuucuccaacgggugcgacuacgucagcaacaagggcguggacaccguguccgucggcaacacgcucuacugcgugaacaagcaggaggggcagagccuguacgugaagggcgagcccaucaucaacuucuacgacccgcuggucuuccccagcgacgaguucgacgccuccaucagccaggugaacgagaagaucaaccagucccucgcguucauccgcaagagcgacgagcugcugcacaacgugaacgucgggaaguccaccaccaacaucaugaucaccaccaucaucaucgugaucaucgugauccuccugcugcucaucgccgucggccuguuccuguacugcaaggcccggagcacgcccgugacccuguccaaggaccagcucagcgggaucaacaacaucgccuucuccaacugaggacuaguguccaccugucccuccugggcugcuggauugucucguuuuccugccaaauaaacaggaucagcgcuuuacagaucuaaaaaaaaaaaaaaaaaaaaaaaaaaaaaaaaaaaaaaaaaaaaaaaaaaaaaaaaaaaaaaaaugcaucccccccccccccccccccccccccccccccaaaggcucuuuucagagccaccagaauu

SEQ ID NO: 14729 - RNA, 2057 nt, Artificial Sequence
  mRNA product Design b-1 comprising derived and/or modified sequence from HRSV(Memphis-37)__AIY60640.1__F_DSCav1_mut2 (opt2)
gggagacggagacggccugcaggaccugcucucucagcccucagccgaggccuacgccgagccgagugcgcagccgacgaccgggaggagccgcagccuucaacucugagguacugugauccgcgcugcccgccgggccgccccaguccgcugcugcggcaccuccuucccucgcgcccucuucgcucgccagcgccuucccugugagccugcgucaccgcggccgccaagcuuaccauggagcuccccauccucaagaccaacgccaucaccaccauccucgccgccgucacccucugcuucgccuccucccagaacaucaccgaggaguucuaccaguccaccugcuccgccgucuccaagggcuaccucggcgcccuccgcaccggcugguacaccuccgucaucaccaucgagcucuccaacaucaaggagaacaagugcaacggcaccgacgccaaggucaagcucaucaagcaggagcucgacaaguacaagaacgccgucaccgaccuccagcuccucaugcaguccacccccgccgccggcuccggcuccgccaucugcuccggcaucgccgucugcaagguccuccaccucgagggcgaggucaacaagaucaagaacgcccuccucuccaccaacaaggccgucgucucccucuccaacggcgucuccguccucaccuucaagguccucgaccucaagaacuacaucgacaagcagcuccuccccauccucaacaagcaguccugcuccauccccaacaucgagaccgucaucgaguuccagcagaagaacaaccgccuccucgagaucacccgcgaguucuccgucaacgccggcgucaccacccccgucuccaccuacaugcucaccaacuccgagcuccucucccucaucaacgacaugcccaucaccaacgaccagaagaagcucauguccaacaacguccagaucguccgccagcaguccuacuccaucaugugcaucaucaaggaggagguccucgccuacgucguccagcucccccucuacggcgucaucgacacccccugcuggaagcuccacaccuccccccucugcaccaccaacaccaaggagggcuccaacaucugccucacccgcaccgaccgcggcugguacugcgacaacgccggcuccgucuccuucuucccccaggccgagaccugcaagguccaguccaaccgcgucuucugcgacaccaugaacucccucacccuccccuccgaggucaaccucugcaacaucgacaucuucaaccccaaguacgacugcaagaucaugaccuccaagaccgacgucuccuccuccgucaucaccucccucggcgccaucgucuccugcuacggcaagaccaagugcaccgccuccaacaagaaccgcggcaucaucaagaccuucuccaacggcugcgacuacgucuccaacaagggcgucgacaccgucuccgucggcaacacccucuacugcgucaacaagcaggagggccagucccucuacgucaagggcgagcccaucaucaacuucuacgacccccucgucuuccccuccgacgaguucgacgccuccaucucccaggucaacgagaagaucaaccagucccucgccuucauccgcaaguccgacgagcuccuccacaacgucaacgucggcaaguccaccaccaacaucaugaucaccaccaucaucaucgucaucaucgucauccuccuccuccucaucgccgucggccucuuccucuacugcaaggcccgcuccacccccgucacccucuccaaggaccagcucuccggcaucaacaacaucgccuucuccaacugaggacuaguguccaccugucccuccugggcugcuggauugucucguuuuccugccaaauaaacaggaucagcgcuuuacagaucuaaaaaaaaaaaaaaaaaaaaaaaaaaaaaaaaaaaaaaaaaaaaaaaaaaaaaaaaaaaaaaaaugcaucccccccccccccccccccccccccccccccaaaggcucuuuucagagccaccagaauu

SEQ ID NO: 14730 - RNA, 2057 nt, Artificial Sequence
  mRNA product Design b-1 comprising derived and/or modified sequence from HRSV(Memphis-37)__AIY60640.1__F_DSCav1_mut2 (opt3)
gggagacggagacggccugcaggaccugcucucucagcccucagccgaggccuacgccgagccgagugcgcagccgacgaccgggaggagccgcagccuucaacucugagguacugugauccgcgcugcccgccgggccgccccaguccgcugcugcggcaccuccuucccucgcgcccucuucgcucgccagcgccuucccugugagccugcgucaccgcggccgccaagcuuaccauggagcugcccauccucaagaccaacgccauuacaacuauacuugcugcagugacgcugugcuucgccagcucccagaauaucaccgaagaguuuuaccaaucuacauguucagcggucaguaaaggcuauuugggggcuuuaagaacuggaugguacaccagcguuauuacaaucgaacuguccaacauuaaggagaauaaaugcaacgguaccgacgccaaggugaaacuaaucaagcaggaacucgauaaguauaaaaaugcaguaacugaccugcagcuucugaugcagucuacuccugccgcuggcucggggucagcaauauguagcggaaucgccgugugcaaggucuugcaccucgagggcgaggugaacaaaauuaagaaugcucugcugaguaccaacaaagccguugugucccucucuaauggugucagcguguuaacguucaagguacuggaucuuaagaacuacaucgacaaacaauugcugccaauucuaaauaagcaguccuguucaaucccgaacauagaaacuguuauugaguuucagcagaaaaauaacaggcuccuggaaaucacccgggaguucagugugaaugcgggggucacaacucccgugagcaccuauaugcuuacaaacucugagcuguugucccucauuaacgauaugccuaucaccaaugaccaaaagaaacugaugucaaacaaugugcagaucguccgccagcagagcuacaguauuaugugcauaaucaaggaagagguuuuagcauaugugguacaacugccacucuacggagugauugauacgcccuguuggaaacuucauacuucuccucugugcacaaccaacacuaaggaaggcuccaauaucuguuugacacgaaccgaccguggcugguacugcgauaacgccgggagcgucucguuuuucccacaggcugagacguguaaggugcagucuaauagaguuuucugcgacaccaugaacucccuaacacugcccucagaagugaaucucugcaacauagauauuuucaauccuaaauaugacuguaagaucaugacaaguaaaaccgaugucagcuccucugugaucacaagccugggagccauuguaucaugcuacgguaagacuaaauguaccgcaaguaacaagaauaggggcaucauuaagacauuuuccaacgggugcgacuauguuagcaauaaaggaguggacaccgucucugugggcaacacucuuuacugugucaacaagcaagagggucagucacuguaugugaaaggggagccaauaaucaauuucuacgauccguugguuuuucccagugacgaauuugaugcuagcauuucccaggugaacgagaagaucaaucagucucucgccuuuauccggaaaucggacgaacuguuacacaacguaaaugucggaaagagcacgacaaacauuaugauaaccacuaucauuaucgugauuaucguuauacugcuacuccugaucgcggugggccuuuucuuguauugcaaggcccgcuccaccccugucacacugucaaaagaucaacucaguggcauuaauaacaucgcauucucuaauugaggacuaguguccaccugucccuccugggcugcuggauugucucguuuuccugccaaauaaacaggaucagcgcuuuacagaucuaaaaaaaaaaaaaaaaaaaaaaaaaaaaaaaaaaaaaaaaaaaaaaaaaaaaaaaaaaaaaaaaugcaucccccccccccccccccccccccccccccccaaaggcucuuuucagagccaccagaauu

SEQ ID NO: 14731 - RNA, 2057 nt, Artificial Sequence
  mRNA product Design b-1 comprising derived and/or modified sequence from HRSV(Memphis-37)__AIY60640.1__F_DSCav1_mut2 (opt4)
gggagacggagacggccugcaggaccugcucucucagcccucagccgaggccuacgccgagccgagugcgcagccgacgaccgggaggagccgcagccuucaacucugagguacugugauccgcgcugcccgccgggccgccccaguccgcugcugcggcaccuccuucccucgcgcccucuucgcucgccagcgccuucccugugagccugcgucaccgcggccgccaagcuuaccauggagcugcccauccugaagaccaacgccaucaccaccauccuggccgccgugacccugugcuucgccagcagccagaacaucaccgaggaguucuaccagagcaccugcagcgccgugagcaagggcuaccugggcgcccugagaaccggcugguacaccagcgugaucaccaucgagcugagcaacaucaaggagaacaagugcaacggcaccgacgccaaggugaagcugaucaagcaggagcuggacaaguacaagaacgccgugaccgaccugcagcugcugaugcagagcacccccgccgccggcagcggcagcgccaucugcagcggcaucgccgugugcaaggugcugcaccuggagggcgaggugaacaagaucaagaacgcccugcugagcaccaacaaggccguggugagccugagcaacggcgugagcgugcugaccuucaaggugcuggaccugaagaacuacaucgacaagcagcugcugcccauccugaacaagcagagcugcagcauccccaacaucgagaccgugaucgaguuccagcagaagaacaacagacugcuggagaucaccagagaguucagcgugaacgccggcgugaccacccccgugagcaccuacaugcugaccaacagcgagcugcugagccugaucaacgacaugcccaucaccaacgaccagaagaagcugaugagcaacaacgugcagaucgugagacagcagagcuacagcaucaugugcaucaucaaggaggaggugcuggccuacguggugcagcugccccuguacggcgugaucgacacccccugcuggaagcugcacaccagcccccugugcaccaccaacaccaaggagggcagcaacaucugccugaccagaaccgacagaggcugguacugcgacaacgccggcagcgugagcuucuucccccaggccgagaccugcaaggugcagagcaacagaguguucugcgacaccaugaacagccugacccugcccagcgaggugaaccugugcaacaucgacaucuucaaccccaaguacgacugcaagaucaugaccagcaagaccgacgugagcagcagcgugaucaccagccugggcgccaucgugagcugcuacggcaagaccaagugcaccgccagcaacaagaacagaggcaucaucaagaccuucagcaacggcugcgacuacgugagcaacaagggcguggacaccgugagcgugggcaacacccuguacugcgugaacaagcaggagggccagagccuguacgugaagggcgagcccaucaucaacuucuacgacccccugguguuccccagcgacgaguucgacgccagcaucagccaggugaacgagaagaucaaccagagccuggccuucaucagaaagagcgacgagcugcugcacaacgugaacgugggcaagagcaccaccaacaucaugaucaccaccaucaucaucgugaucaucgugauccugcugcugcugaucgccgugggccuguuccuguacugcaaggccagaagcacccccgugacccugagcaaggaccagcugagcggcaucaacaacaucgccuucagcaacugaggacuaguguccaccugucccuccugggcugcuggauugucucguuuuccugccaaauaaacaggaucagcgcuuuacagaucuaaaaaaaaaaaaaaaaaaaaaaaaaaaaaaaaaaaaaaaaaaaaaaaaaaaaaaaaaaaaaaaaugcaucccccccccccccccccccccccccccccccaaaggcucuuuucagagccaccagaauu

SEQ ID NO: 14732 - RNA, 2057 nt, Artificial Sequence
  mRNA product Design b-1 comprising derived and/or modified sequence from HRSV(Memphis-37)__AIY60640.1__F_DSCav1_mut2 (opt5)
gggagacggagacggccugcaggaccugcucucucagcccucagccgaggccuacgccgagccgagugcgcagccgacgaccgggaggagccgcagccuucaacucugagguacugugauccgcgcugcccgccgggccgccccaguccgcugcugcggcaccuccuucccucgcgcccucuucgcucgccagcgccuucccugugagccugcgucaccgcggccgccaagcuuaccauggagcugcccauccucaagaccaacgccauuacaacgauccuggcugccgugacccuuugcuucgcgagcucccagaauauuacagaagaguuuuaccaaucuaccuguagcgcugucuccaaaggcuaucugggggcccucagaacaggaugguacaccucuguuaucacaauugaacugagcaacaucaaggagaauaaaugcaacggcaccgacgccaaggugaaacuuaucaagcaggaacuggauaaguauaaaaaugcugugacggaccuccagcugcugaugcaguccaccccugccgcugggucuggaagcgccauuuguuccggcaucgcggucugcaaggugcuccaccuggagggggagguuaacaaaauuaagaaugcccuucugagcacaaacaaagcuguggucucucucuccaauggagugagcguucugaccuucaaggugcuugaucugaagaacuacaucgacaaacaacuccugccgauucugaauaagcagucuuguuccauccccaacauugaaacagucaucgaguuucagcagaaaaauaaccggcuccuggaaaucacccgcgaguucagcgugaaugccggcgugacgacaccugucucuaccuauaugcuuacaaacuccgagcugcucagccugauuaacgauaugcccaucaccaaugaccaaaagaaacuuauguccaacaauguucagauugugagacagcagucuuacagcaucaugugcauuaucaaggaagaggugcuggcuuaugucgugcaacucccucuguacggcguuaucgauacccccuguuggaaacugcauacauccccucucugcacgaccaacacaaaggaagggagcaauauuugucugacccggacagaccgcggaugguacugcgauaacgccggcucuguguccuuuuucccgcaggcggagaccuguaagguccagagcaauagaguguuuugcgacacgaugaacucucuuacacugcccagcgaaguuaaucucugcaacaucgauauuuucaauccuaaauaugacuguaagaucaugaccuccaaaaccgaugugucuagcuccgucauuacaagccugggggccaucgugucuugcuacggaaagaccaaauguacagcuuccaacaagaaucggggcaucauuaagacguuuagcaacgggugcgacuaugucucuaauaaaggaguggacaccguuuccgugggcaacacacuuuacugugucaacaagcaagagggccagagccuguaugugaaaggggagcccaucauuaauuucuacgauccucucguuuuucccuccgacgaguucgaugccucuaucagccaggugaacgaaaagauuaaucagucccuggcuuuuauccgcaaaucugacgaacugcuccacaacgucaaugugggaaagagcaccacaaacauuaugaucaccacgaucauuaucgugauuaucguuauucugcuucugcucaucgccgucggccuguuccuguauugcaaggccagauccaccccggugacacuuagcaaagaucaacucucugggaucaauaacauugcuuucuccaauugaggacuaguguccaccugucccuccugggcugcuggauugucucguuuuccugccaaauaaacaggaucagcgcuuuacagaucuaaaaaaaaaaaaaaaaaaaaaaaaaaaaaaaaaaaaaaaaaaaaaaaaaaaaaaaaaaaaaaaaugcaucccccccccccccccccccccccccccccccaaaggcucuuuucagagccaccagaauu

SEQ ID NO: 14733 - RNA, 2057 nt, Artificial Sequence
  mRNA product Design b-1 comprising derived and/or modified sequence from HRSV(Memphis-37)__AIY60640.1__F_DSCav1_mut2 (opt6)
gggagacggagacggccugcaggaccugcucucucagcccucagccgaggccuacgccgagccgagugcgcagccgacgaccgggaggagccgcagccuucaacucugagguacugugauccgcgcugcccgccgggccgccccaguccgcugcugcggcaccuccuucccucgcgcccucuucgcucgccagcgccuucccugugagccugcgucaccgcggccgccaagcuuaccauggagcuuccaauauuaaaaacaaacgcuauaacaacuauacucgcagcaguuacacucugcuucgcauccucacaaaacauaacugaagaauuuuaccaauccacuugcucagccguaucaaaaggauaucuaggagcacuuagaaccggaugguauacaucagugauaacaauagaacuaagcaacauaaaagaaaacaagugcaacggaacugacgcaaaagucaaacuaaucaaacaagaacuagacaaauacaaaaacgcaguaacagaccuacaauuacuaaugcaaucaacaccagcagcaggaucagguucagccauaugcucagguaucgcuguaugcaaaguccuucaccuagaaggugaaguaaacaaaauuaaaaacgcccuacucaguacaaauaaagcugucguaaguuuaucaaacggaguaucaguccuuacauucaaaguauuagaccuaaaaaauuauauagacaaacaauuacuaccaauacucaacaaacaaucaugcucaauaccaaauauagaaaccguaauagaauuucagcaaaaaaauaacagauuacuagaaauaaccagagaauuuucagucaacgcaggagucacaacacccgucucaaccuacaugcuaaccaacucagaacuucuaucucuuaucaacgacaugcccauaaccaaugaucaaaaaaaauuaaugucuaauaacguucaaauaguaagacaacaaucauacucaauaaugugcauaaucaaagaagaaguauuagcauacguaguacaacuaccccuauauggaguaauagacacacccugcuggaaacuacacacauccccccucuguacaacaaacacuaaagaaggaucaaacauuugccuaacaagaacagaccgcggaugguacugcgacaacgcaggcuccguaucuuucuuuccacaagccgaaacuuguaaaguucaaucaaacagaguauuuugcgauacaaugaacuccuuaacauuaccuucagaaguaaaccuaugcaacauagacaucuucaacccaaaauacgacugcaaaauaaugaccucaaaaacagacguauccucaucagucauaaccuccuuaggagcaauaguaucauguuacggaaaaacaaaauguacagcaucaaauaaaaauagaggaauaauaaaaaccuucuccaacggaugcgacuacguauccaauaaaggaguagacaccguaucaguaggaaacacacuauacuguguaaacaaacaagaaggccaaucucuauauguaaaaggcgaaccaaucauaaauuuuuacgacccacuugucuuccccuccgacgaauuugacgcaagcauaucacaaguaaacgaaaaaaucaaccaaagccuagccuucauaaggaaaucugacgaauuacuucauaacguaaauguuggaaaaucaaccacaaacauaaugauaaccaccaucauaauuguaauaauaguaauacuacuacuacuaauugcaguaggacucuuccuauauugcaaagcucgcucaacaccaguuaccuuaucaaaagaccaacuaucuggaauaaacaacauagccuuuuccaacuaaggacuaguguccaccugucccuccugggcugcuggauugucucguuuuccugccaaauaaacaggaucagcgcuuuacagaucuaaaaaaaaaaaaaaaaaaaaaaaaaaaaaaaaaaaaaaaaaaaaaaaaaaaaaaaaaaaaaaaaugcaucccccccccccccccccccccccccccccccaaaggcucuuuucagagccaccagaauu

SEQ ID NO: 14734 - RNA, 2057 nt, Artificial Sequence
  mRNA product Design b-1 comprising derived and/or modified sequence from HRSV(Memphis-37)__AIY60640.1__F_DSCav1_mut2 (opt11)
gggagacggagacggccugcaggaccugcucucucagcccucagccgaggccuacgccgagccgagugcgcagccgacgaccgggaggagccgcagccuucaacucugagguacugugauccgcgcugcccgccgggccgccccaguccgcugcugcggcaccuccuucccucgcgcccucuucgcucgccagcgccuucccugugagccugcgucaccgcggccgccaagcuuaccauggaacucccaauccuaaaaaccaacgccaucaccaccauccucgccgcugucaccuuaugcuuugccagcagccaaaacaucaccgaagaauuuuaccaaucaacaugcuccgccgucucaaaaggauaccucggcgcccuacgcaccggcugguacacaagcgucauaaccaucgagcucuccaacaucaaggaaaacaaaugcaauggaaccgacgccaaagucaaacuaaucaaacaagaacuagacaaguacaagaacgcagucaccgaccuccaacuccucaugcaguccacccccgcagcaggcucuggcucagcaauaugcuccggcaucgcugucugcaaaguccuacaccucgaaggcgaagucaacaaaaucaaaaacgcccuacuguccacaaacaaagccgucgucucccuauccaacggcgucucgguccuaaccuuuaagguucucgaucucaaaaauuacauagacaaacaacuacuccccauccucaacaaacaaucuugcucaauccccaacaucgaaaccgucaucgaguuccaacagaaaaacaacagacuacucgaaaucacccgcgaguucucagucaacgcgggcgucacaacacccgucagcaccuacaugcuaaccaacuccgaacuccucagccucauuaacgacaugcccaucaccaacgaccaaaagaaacuuauguccaacaacguucaaaucguccgccaacaauccuacuccaucaugugcaucaucaaagaagaaguacucgccuacguaguccaacugccccucuacggcgucaucgauaccccaugcuggaaacuacacaccagcccccucugcaccaccaacaccaaagaaggcuccaauaucugcuuaacccgcacagaccguggcugguacugcgauaacgccggcuccgucuccuucuucccccaagcagaaaccugcaaaguacaauccaaccgagucuucugugacaccaugaacucccuaacccuuccaucagaagucaaccucugcaacaucgacaucuucaaccccaaguacgacugcaaaaucaugacauccaaaaccgaugucucaagcagcgucauaaccucacucggcgcuaucguaagcugcuacggcaaaaccaaaugcaccgcaucaaacaaaaaccgcggaaucaucaaaaccuucagcaacggaugcgacuacguuuccaacaaaggcguagacaccgucuccgucggaaacacccucuacugcguaaacaaacaggaaggccaaucccucuacgucaaaggcgaacccaucauaaacuucuacgauccccuugucuucccguccgaugaguucgacgccuccaucucgcaagucaacgaaaagauaaaccaaucacuagcauucauccguaaauccgacgaacuccuccacaacgucaacgucggaaaauccaccaccaacauaaugaucaccaccauaaucaucgucaucaucguaauacuauuacuccucauagccgucggccucuuccuauauugcaaagcccgaucaacccccguaacccuuucuaaagaccaacuguccggaaucaacaacaucgcuuucagcaacugaggacuaguguccaccugucccuccugggcugcuggauugucucguuuuccugccaaauaaacaggaucagcgcuuuacagaucuaaaaaaaaaaaaaaaaaaaaaaaaaaaaaaaaaaaaaaaaaaaaaaaaaaaaaaaaaaaaaaaaugcaucccccccccccccccccccccccccccccccaaaggcucuuuucagagccaccagaauu

SEQ ID NO: 14735 - RNA, 1877 nt, Artificial Sequence
  mRNA product Design b-2 comprising derived and/or modified sequence from HRSV(Memphis-37)__AIY60640.1__F_DSCav1_mut2 (opt1)
gggagagccucugcuggaguccggggaguggcguuggcugcuagagcgaagcuuaccauggagcugcccauccucaagaccaacgccaucaccacgauccuggccgcggugacccugugcuucgccagcucccagaacaucaccgaggaguucuaccagagcacgugcuccgccgucagcaagggcuaccucggcgcccugcgcaccgggugguacaccagcgugaucaccaucgagcuguccaacaucaaggagaacaagugcaacggcaccgacgccaaggugaagcucaucaagcaggagcuggacaaguacaagaacgcggucacggaccugcagcuccugaugcagagcaccccggccgccggcuccgggagcgcgaucugcuccggcaucgccgucugcaaggugcugcaccucgagggcgaggugaacaagaucaagaacgcccugcuguccaccaacaaggccgucgugagccucuccaacggggugagcguccugaccuucaaggugcuggaccucaagaacuacaucgacaagcagcugcugcccauccugaacaagcagagcugcuccauccccaacaucgagaccgucaucgaguuccagcagaagaacaaccgccuccuggagaucacgcgggaguucagcgugaacgcgggcgugaccacccccgucuccaccuacaugcugacgaacagcgagcuccugucccugaucaacgacaugccgaucaccaacgaccagaagaagcucaugagcaacaacgugcagaucgugcgccagcaguccuacagcaucaugugcaucaucaaggaggagguccuggccuacguggugcagcugccccucuacggggucaucgacacccccugcuggaagcugcacaccagcccccugugcacgaccaacaccaaggagggcuccaacaucugccucacccggacggaccgcgggugguacugcgacaacgccggcagcguguccuucuucccgcaggccgagaccugcaagguccagagcaaccggguguucugcgacaccaugaacucccugacccugcccagcgaggugaaccucugcaacaucgacaucuucaaccccaaguacgacugcaagaucaugacguccaagaccgacgucagcuccagcgugaucaccucccugggcgccaucgugagcugcuacgggaagaccaagugcacggcgagcaacaagaaccgcggcaucaucaagaccuucuccaacgggugcgacuacgucagcaacaagggcguggacaccguguccgucggcaacacccuguacugcgugaacaagcaggagggccagagccucuacgugaagggggagcccaucaucaacuucuacgacccgcuggucuuccccuccgacgaguucgacgccagcaucucccaggugaacgagaagaucaaccagagccuggccuucauccggaaguccgacgagcuccugcacaacgugaacgucggcaagagcaccacgaacaucaugaucaccaccaucaucaucgugaucaucgugauccugcugcuccugaucgccgucgggcuguuccucuacugcaaggcccgcuccacccccgugacgcugagcaaggaccagcuguccgggaucaacaacaucgcguucagcaacugaggacuaguguccaccugucccuccugggcugcuggauugucucguuuuccugccaaauaaacaggaucagcgcuuuacagaucuaaaaaaaaaaaaaaaaaaaaaaaaaaaaaaaaaaaaaaaaaaaaaaaaaaaaaaaaaaaaaaaaugcaucccccccccccccccccccccccccccccccaaaggcucuuuucagagccaccagaauu

SEQ ID NO: 14736 - RNA, 1877 nt, Artificial Sequence
  mRNA product Design b-2 comprising derived and/or modified sequence from HRSV(Memphis-37)__AIY60640.1__F_DSCav1_mut2 (opt1)
gggagagccucugcuggaguccggggaguggcguuggcugcuagagcgaagcuuaccauggagcugcccauccucaagaccaacgccaucaccacgauccuggccgcggugacccugugcuucgccagcucccagaacaucaccgaggaguucuaccagagcacgugcuccgccgucagcaagggcuaccucggggcccugcgcaccggcugguacaccuccgugaucaccaucgagcugagcaacaucaaggagaacaagugcaacgggaccgacgccaaggugaagcucaucaagcaggagcuggacaaguacaagaacgcggucacggaccugcagcuccugaugcaguccaccccggccgccggcagcggguccgccaucugcagcggcaucgcggugugcaaggugcugcaccucgagggcgaggucaacaagaucaagaacgcccugcuguccaccaacaaggccguggugagccucuccaacggggucagcgugcugaccuucaaggugcuggaccucaagaacuacaucgacaagcagcugcugcccauccucaacaagcaguccugcagcauccccaacaucgagacggucaucgaguuccagcagaagaacaaccggcugcuggagaucacccgcgaguucuccgugaacgccggcgugaccacccccgucagcacguacaugcucaccaacuccgagcugcugagccucaucaacgacaugccgaucaccaacgaccagaagaagcugaugagcaacaacgugcagaucgugcggcagcaguccuacagcaucaugugcaucaucaaggaggagguccuggccuacguggugcagcucccccuguacggggucaucgacacccccugcuggaagcugcacacgagcccccucugcaccaccaacaccaaggagggcuccaacaucugccugacgcgcaccgaccgggggugguacugcgacaacgcgggcuccgugagcuucuucccgcaggccgagaccugcaaggugcaguccaaccgcgucuucugcgacaccaugaacagccugacgcuccccuccgaggugaaccugugcaacaucgacaucuucaaccccaaguacgacugcaagaucaugaccagcaagaccgacgucuccagcuccgugaucaccagccugggcgccaucguguccugcuacgggaagacgaagugcaccgccagcaacaagaaccggggcaucaucaagaccuucuccaacgggugcgacuacgucagcaacaagggcguggacaccguguccgucggcaacacgcucuacugcgugaacaagcaggaggggcagagccuguacgugaagggcgagcccaucaucaacuucuacgacccgcuggucuuccccagcgacgaguucgacgccuccaucagccaggugaacgagaagaucaaccagucccucgcguucauccgcaagagcgacgagcugcugcacaacgugaacgucgggaaguccaccaccaacaucaugaucaccaccaucaucaucgugaucaucgugauccuccugcugcucaucgccgucggccuguuccuguacugcaaggcccggagcacgcccgugacccuguccaaggaccagcucagcgggaucaacaacaucgccuucuccaacugaggacuaguguccaccugucccuccugggcugcuggauugucucguuuuccugccaaauaaacaggaucagcgcuuuacagaucuaaaaaaaaaaaaaaaaaaaaaaaaaaaaaaaaaaaaaaaaaaaaaaaaaaaaaaaaaaaaaaaaugcaucccccccccccccccccccccccccccccccaaaggcucuuuucagagccaccagaauu

SEQ ID NO: 14737 - RNA, 1877 nt, Artificial Sequence
  mRNA product Design b-2 comprising derived and/or modified sequence from HRSV(Memphis-37)__AIY60640.1__F_DSCav1_mut2 (opt2)
gggagagccucugcuggaguccggggaguggcguuggcugcuagagcgaagcuuaccauggagcuccccauccucaagaccaacgccaucaccaccauccucgccgccgucacccucugcuucgccuccucccagaacaucaccgaggaguucuaccaguccaccugcuccgccgucuccaagggcuaccucggcgcccuccgcaccggcugguacaccuccgucaucaccaucgagcucuccaacaucaaggagaacaagugcaacggcaccgacgccaaggucaagcucaucaagcaggagcucgacaaguacaagaacgccgucaccgaccuccagcuccucaugcaguccacccccgccgccggcuccggcuccgccaucugcuccggcaucgccgucugcaagguccuccaccucgagggcgaggucaacaagaucaagaacgcccuccucuccaccaacaaggccgucgucucccucuccaacggcgucuccguccucaccuucaagguccucgaccucaagaacuacaucgacaagcagcuccuccccauccucaacaagcaguccugcuccauccccaacaucgagaccgucaucgaguuccagcagaagaacaaccgccuccucgagaucacccgcgaguucuccgucaacgccggcgucaccacccccgucuccaccuacaugcucaccaacuccgagcuccucucccucaucaacgacaugcccaucaccaacgaccagaagaagcucauguccaacaacguccagaucguccgccagcaguccuacuccaucaugugcaucaucaaggaggagguccucgccuacgucguccagcucccccucuacggcgucaucgacacccccugcuggaagcuccacaccuccccccucugcaccaccaacaccaaggagggcuccaacaucugccucacccgcaccgaccgcggcugguacugcgacaacgccggcuccgucuccuucuucccccaggccgagaccugcaagguccaguccaaccgcgucuucugcgacaccaugaacucccucacccuccccuccgaggucaaccucugcaacaucgacaucuucaaccccaaguacgacugcaagaucaugaccuccaagaccgacgucuccuccuccgucaucaccucccucggcgccaucgucuccugcuacggcaagaccaagugcaccgccuccaacaagaaccgcggcaucaucaagaccuucuccaacggcugcgacuacgucuccaacaagggcgucgacaccgucuccgucggcaacacccucuacugcgucaacaagcaggagggccagucccucuacgucaagggcgagcccaucaucaacuucuacgacccccucgucuuccccuccgacgaguucgacgccuccaucucccaggucaacgagaagaucaaccagucccucgccuucauccgcaaguccgacgagcuccuccacaacgucaacgucggcaaguccaccaccaacaucaugaucaccaccaucaucaucgucaucaucgucauccuccuccuccucaucgccgucggccucuuccucuacugcaaggcccgcuccacccccgucacccucuccaaggaccagcucuccggcaucaacaacaucgccuucuccaacugaggacuaguguccaccugucccuccugggcugcuggauugucucguuuuccugccaaauaaacaggaucagcgcuuuacagaucuaaaaaaaaaaaaaaaaaaaaaaaaaaaaaaaaaaaaaaaaaaaaaaaaaaaaaaaaaaaaaaaaugcaucccccccccccccccccccccccccccccccaaaggcucuuuucagagccaccagaauu

SEQ ID NO: 14738 - RNA, 1877 nt, Artificial Sequence
  mRNA product Design b-2 comprising derived and/or modified sequence from HRSV(Memphis-37)__AIY60640.1__F_DSCav1_mut2 (opt3)
gggagagccucugcuggaguccggggaguggcguuggcugcuagagcgaagcuuaccauggagcugcccauccucaagaccaacgccauuacaacuauacuugcugcagugacgcugugcuucgccagcucccagaauaucaccgaagaguuuuaccaaucuacauguucagcggucaguaaaggcuauuugggggcuuuaagaacuggaugguacaccagcguuauuacaaucgaacuguccaacauuaaggagaauaaaugcaacgguaccgacgccaaggugaaacuaaucaagcaggaacucgauaaguauaaaaaugcaguaacugaccugcagcuucugaugcagucuacuccugccgcuggcucggggucagcaauauguagcggaaucgccgugugcaaggucuugcaccucgagggcgaggugaacaaaauuaagaaugcucugcugaguaccaacaaagccguugugucccucucuaauggugucagcguguuaacguucaagguacuggaucuuaagaacuacaucgacaaacaauugcugccaauucuaaauaagcaguccuguucaaucccgaacauagaaacuguuauugaguuucagcagaaaaauaacaggcuccuggaaaucacccgggaguucagugugaaugcgggggucacaacucccgugagcaccuauaugcuuacaaacucugagcuguugucccucauuaacgauaugccuaucaccaaugaccaaaagaaacugaugucaaacaaugugcagaucguccgccagcagagcuacaguauuaugugcauaaucaaggaagagguuuuagcauaugugguacaacugccacucuacggagugauugauacgcccuguuggaaacuucauacuucuccucugugcacaaccaacacuaaggaaggcuccaauaucuguuugacacgaaccgaccguggcugguacugcgauaacgccgggagcgucucguuuuucccacaggcugagacguguaaggugcagucuaauagaguuuucugcgacaccaugaacucccuaacacugcccucagaagugaaucucugcaacauagauauuuucaauccuaaauaugacuguaagaucaugacaaguaaaaccgaugucagcuccucugugaucacaagccugggagccauuguaucaugcuacgguaagacuaaauguaccgcaaguaacaagaauaggggcaucauuaagacauuuuccaacgggugcgacuauguuagcaauaaaggaguggacaccgucucugugggcaacacucuuuacugugucaacaagcaagagggucagucacuguaugugaaaggggagccaauaaucaauuucuacgauccguugguuuuucccagugacgaauuugaugcuagcauuucccaggugaacgagaagaucaaucagucucucgccuuuauccggaaaucggacgaacuguuacacaacguaaaugucggaaagagcacgacaaacauuaugauaaccacuaucauuaucgugauuaucguuauacugcuacuccugaucgcggugggccuuuucuuguauugcaaggcccgcuccaccccugucacacugucaaaagaucaacucaguggcauuaauaacaucgcauucucuaauugaggacuaguguccaccugucccuccugggcugcuggauugucucguuuuccugccaaauaaacaggaucagcgcuuuacagaucuaaaaaaaaaaaaaaaaaaaaaaaaaaaaaaaaaaaaaaaaaaaaaaaaaaaaaaaaaaaaaaaaugcaucccccccccccccccccccccccccccccccaaaggcucuuuucagagccaccagaauu

SEQ ID NO: 14739 - RNA, 1877 nt, Artificial Sequence
  mRNA product Design b-2 comprising derived and/or modified sequence from HRSV(Memphis-37)__AIY60640.1__F_DSCav1_mut2 (opt4)
gggagagccucugcuggaguccggggaguggcguuggcugcuagagcgaagcuuaccauggagcugcccauccugaagaccaacgccaucaccaccauccuggccgccgugacccugugcuucgccagcagccagaacaucaccgaggaguucuaccagagcaccugcagcgccgugagcaagggcuaccugggcgcccugagaaccggcugguacaccagcgugaucaccaucgagcugagcaacaucaaggagaacaagugcaacggcaccgacgccaaggugaagcugaucaagcaggagcuggacaaguacaagaacgccgugaccgaccugcagcugcugaugcagagcacccccgccgccggcagcggcagcgccaucugcagcggcaucgccgugugcaaggugcugcaccuggagggcgaggugaacaagaucaagaacgcccugcugagcaccaacaaggccguggugagccugagcaacggcgugagcgugcugaccuucaaggugcuggaccugaagaacuacaucgacaagcagcugcugcccauccugaacaagcagagcugcagcauccccaacaucgagaccgugaucgaguuccagcagaagaacaacagacugcuggagaucaccagagaguucagcgugaacgccggcgugaccacccccgugagcaccuacaugcugaccaacagcgagcugcugagccugaucaacgacaugcccaucaccaacgaccagaagaagcugaugagcaacaacgugcagaucgugagacagcagagcuacagcaucaugugcaucaucaaggaggaggugcuggccuacguggugcagcugccccuguacggcgugaucgacacccccugcuggaagcugcacaccagcccccugugcaccaccaacaccaaggagggcagcaacaucugccugaccagaaccgacagaggcugguacugcgacaacgccggcagcgugagcuucuucccccaggccgagaccugcaaggugcagagcaacagaguguucugcgacaccaugaacagccugacccugcccagcgaggugaaccugugcaacaucgacaucuucaaccccaaguacgacugcaagaucaugaccagcaagaccgacgugagcagcagcgugaucaccagccugggcgccaucgugagcugcuacggcaagaccaagugcaccgccagcaacaagaacagaggcaucaucaagaccuucagcaacggcugcgacuacgugagcaacaagggcguggacaccgugagcgugggcaacacccuguacugcgugaacaagcaggagggccagagccuguacgugaagggcgagcccaucaucaacuucuacgacccccugguguuccccagcgacgaguucgacgccagcaucagccaggugaacgagaagaucaaccagagccuggccuucaucagaaagagcgacgagcugcugcacaacgugaacgugggcaagagcaccaccaacaucaugaucaccaccaucaucaucgugaucaucgugauccugcugcugcugaucgccgugggccuguuccuguacugcaaggccagaagcacccccgugacccugagcaaggaccagcugagcggcaucaacaacaucgccuucagcaacugaggacuaguguccaccugucccuccugggcugcuggauugucucguuuuccugccaaauaaacaggaucagcgcuuuacagaucuaaaaaaaaaaaaaaaaaaaaaaaaaaaaaaaaaaaaaaaaaaaaaaaaaaaaaaaaaaaaaaaaugcaucccccccccccccccccccccccccccccccaaaggcucuuuucagagccaccagaauu

SEQ ID NO: 14740 - RNA, 1877 nt, Artificial Sequence
  mRNA product Design b-2 comprising derived and/or modified sequence from HRSV(Memphis-37)__AIY60640.1__F_DSCav1_mut2 (opt5)
gggagagccucugcuggaguccggggaguggcguuggcugcuagagcgaagcuuaccauggagcugcccauccucaagaccaacgccauuacaacgauccuggcugccgugacccuuugcuucgcgagcucccagaauauuacagaagaguuuuaccaaucuaccuguagcgcugucuccaaaggcuaucugggggcccucagaacaggaugguacaccucuguuaucacaauugaacugagcaacaucaaggagaauaaaugcaacggcaccgacgccaaggugaaacuuaucaagcaggaacuggauaaguauaaaaaugcugugacggaccuccagcugcugaugcaguccaccccugccgcugggucuggaagcgccauuuguuccggcaucgcggucugcaaggugcuccaccuggagggggagguuaacaaaauuaagaaugcccuucugagcacaaacaaagcuguggucucucucuccaauggagugagcguucugaccuucaaggugcuugaucugaagaacuacaucgacaaacaacuccugccgauucugaauaagcagucuuguuccauccccaacauugaaacagucaucgaguuucagcagaaaaauaaccggcuccuggaaaucacccgcgaguucagcgugaaugccggcgugacgacaccugucucuaccuauaugcuuacaaacuccgagcugcucagccugauuaacgauaugcccaucaccaaugaccaaaagaaacuuauguccaacaauguucagauugugagacagcagucuuacagcaucaugugcauuaucaaggaagaggugcuggcuuaugucgugcaacucccucuguacggcguuaucgauacccccuguuggaaacugcauacauccccucucugcacgaccaacacaaaggaagggagcaauauuugucugacccggacagaccgcggaugguacugcgauaacgccggcucuguguccuuuuucccgcaggcggagaccuguaagguccagagcaauagaguguuuugcgacacgaugaacucucuuacacugcccagcgaaguuaaucucugcaacaucgauauuuucaauccuaaauaugacuguaagaucaugaccuccaaaaccgaugugucuagcuccgucauuacaagccugggggccaucgugucuugcuacggaaagaccaaauguacagcuuccaacaagaaucggggcaucauuaagacguuuagcaacgggugcgacuaugucucuaauaaaggaguggacaccguuuccgugggcaacacacuuuacugugucaacaagcaagagggccagagccuguaugugaaaggggagcccaucauuaauuucuacgauccucucguuuuucccuccgacgaguucgaugccucuaucagccaggugaacgaaaagauuaaucagucccuggcuuuuauccgcaaaucugacgaacugcuccacaacgucaaugugggaaagagcaccacaaacauuaugaucaccacgaucauuaucgugauuaucguuauucugcuucugcucaucgccgucggccuguuccuguauugcaaggccagauccaccccggugacacuuagcaaagaucaacucucugggaucaauaacauugcuuucuccaauugaggacuaguguccaccugucccuccugggcugcuggauugucucguuuuccugccaaauaaacaggaucagcgcuuuacagaucuaaaaaaaaaaaaaaaaaaaaaaaaaaaaaaaaaaaaaaaaaaaaaaaaaaaaaaaaaaaaaaaaugcaucccccccccccccccccccccccccccccccaaaggcucuuuucagagccaccagaauu

SEQ ID NO: 14741 - RNA, 1877 nt, Artificial Sequence
  mRNA product Design b-2 comprising derived and/or modified sequence from HRSV(Memphis-37)__AIY60640.1__F_DSCav1_mut2 (opt6)
gggagagccucugcuggaguccggggaguggcguuggcugcuagagcgaagcuuaccauggagcuuccaauauuaaaaacaaacgcuauaacaacuauacucgcagcaguuacacucugcuucgcauccucacaaaacauaacugaagaauuuuaccaauccacuugcucagccguaucaaaaggauaucuaggagcacuuagaaccggaugguauacaucagugauaacaauagaacuaagcaacauaaaagaaaacaagugcaacggaacugacgcaaaagucaaacuaaucaaacaagaacuagacaaauacaaaaacgcaguaacagaccuacaauuacuaaugcaaucaacaccagcagcaggaucagguucagccauaugcucagguaucgcuguaugcaaaguccuucaccuagaaggugaaguaaacaaaauuaaaaacgcccuacucaguacaaauaaagcugucguaaguuuaucaaacggaguaucaguccuuacauucaaaguauuagaccuaaaaaauuauauagacaaacaauuacuaccaauacucaacaaacaaucaugcucaauaccaaauauagaaaccguaauagaauuucagcaaaaaaauaacagauuacuagaaauaaccagagaauuuucagucaacgcaggagucacaacacccgucucaaccuacaugcuaaccaacucagaacuucuaucucuuaucaacgacaugcccauaaccaaugaucaaaaaaaauuaaugucuaauaacguucaaauaguaagacaacaaucauacucaauaaugugcauaaucaaagaagaaguauuagcauacguaguacaacuaccccuauauggaguaauagacacacccugcuggaaacuacacacauccccccucuguacaacaaacacuaaagaaggaucaaacauuugccuaacaagaacagaccgcggaugguacugcgacaacgcaggcuccguaucuuucuuuccacaagccgaaacuuguaaaguucaaucaaacagaguauuuugcgauacaaugaacuccuuaacauuaccuucagaaguaaaccuaugcaacauagacaucuucaacccaaaauacgacugcaaaauaaugaccucaaaaacagacguauccucaucagucauaaccuccuuaggagcaauaguaucauguuacggaaaaacaaaauguacagcaucaaauaaaaauagaggaauaauaaaaaccuucuccaacggaugcgacuacguauccaauaaaggaguagacaccguaucaguaggaaacacacuauacuguguaaacaaacaagaaggccaaucucuauauguaaaaggcgaaccaaucauaaauuuuuacgacccacuugucuuccccuccgacgaauuugacgcaagcauaucacaaguaaacgaaaaaaucaaccaaagccuagccuucauaaggaaaucugacgaauuacuucauaacguaaauguuggaaaaucaaccacaaacauaaugauaaccaccaucauaauuguaauaauaguaauacuacuacuacuaauugcaguaggacucuuccuauauugcaaagcucgcucaacaccaguuaccuuaucaaaagaccaacuaucuggaauaaacaacauagccuuuuccaacuaaggacuaguguccaccugucccuccugggcugcuggauugucucguuuuccugccaaauaaacaggaucagcgcuuuacagaucuaaaaaaaaaaaaaaaaaaaaaaaaaaaaaaaaaaaaaaaaaaaaaaaaaaaaaaaaaaaaaaaaugcaucccccccccccccccccccccccccccccccaaaggcucuuuucagagccaccagaauu

SEQ ID NO: 14742 - RNA, 1877 nt, Artificial Sequence
  mRNA product Design b-2 comprising derived and/or modified sequence from HRSV(Memphis-37)__AIY60640.1__F_DSCav1_mut2 (opt11)
gggagagccucugcuggaguccggggaguggcguuggcugcuagagcgaagcuuaccauggaacucccaauccuaaaaaccaacgccaucaccaccauccucgccgcugucaccuuaugcuuugccagcagccaaaacaucaccgaagaauuuuaccaaucaacaugcuccgccgucucaaaaggauaccucggcgcccuacgcaccggcugguacacaagcgucauaaccaucgagcucuccaacaucaaggaaaacaaaugcaauggaaccgacgccaaagucaaacuaaucaaacaagaacuagacaaguacaagaacgcagucaccgaccuccaacuccucaugcaguccacccccgcagcaggcucuggcucagcaauaugcuccggcaucgcugucugcaaaguccuacaccucgaaggcgaagucaacaaaaucaaaaacgcccuacuguccacaaacaaagccgucgucucccuauccaacggcgucucgguccuaaccuuuaagguucucgaucucaaaaauuacauagacaaacaacuacuccccauccucaacaaacaaucuugcucaauccccaacaucgaaaccgucaucgaguuccaacagaaaaacaacagacuacucgaaaucacccgcgaguucucagucaacgcgggcgucacaacacccgucagcaccuacaugcuaaccaacuccgaacuccucagccucauuaacgacaugcccaucaccaacgaccaaaagaaacuuauguccaacaacguucaaaucguccgccaacaauccuacuccaucaugugcaucaucaaagaagaaguacucgccuacguaguccaacugccccucuacggcgucaucgauaccccaugcuggaaacuacacaccagcccccucugcaccaccaacaccaaagaaggcuccaauaucugcuuaacccgcacagaccguggcugguacugcgauaacgccggcuccgucuccuucuucccccaagcagaaaccugcaaaguacaauccaaccgagucuucugugacaccaugaacucccuaacccuuccaucagaagucaaccucugcaacaucgacaucuucaaccccaaguacgacugcaaaaucaugacauccaaaaccgaugucucaagcagcgucauaaccucacucggcgcuaucguaagcugcuacggcaaaaccaaaugcaccgcaucaaacaaaaaccgcggaaucaucaaaaccuucagcaacggaugcgacuacguuuccaacaaaggcguagacaccgucuccgucggaaacacccucuacugcguaaacaaacaggaaggccaaucccucuacgucaaaggcgaacccaucauaaacuucuacgauccccuugucuucccguccgaugaguucgacgccuccaucucgcaagucaacgaaaagauaaaccaaucacuagcauucauccguaaauccgacgaacuccuccacaacgucaacgucggaaaauccaccaccaacauaaugaucaccaccauaaucaucgucaucaucguaauacuauuacuccucauagccgucggccucuuccuauauugcaaagcccgaucaacccccguaacccuuucuaaagaccaacuguccggaaucaacaacaucgcuuucagcaacugaggacuaguguccaccugucccuccugggcugcuggauugucucguuuuccugccaaauaaacaggaucagcgcuuuacagaucuaaaaaaaaaaaaaaaaaaaaaaaaaaaaaaaaaaaaaaaaaaaaaaaaaaaaaaaaaaaaaaaaugcaucccccccccccccccccccccccccccccccaaaggcucuuuucagagccaccagaauu

SEQ ID NO: 14743 - RNA, 1897 nt, Artificial Sequence
  mRNA product Design b-3 comprising derived and/or modified sequence from HRSV(Memphis-37)__AIY60640.1__F_DSCav1_mut2 (opt1)
gggagagucccgcagucggcguccagcggcucugcuuguucgugugugugucguugcaggccuuauucaagcuuaccauggagcugcccauccucaagaccaacgccaucaccacgauccuggccgcggugacccugugcuucgccagcucccagaacaucaccgaggaguucuaccagagcacgugcuccgccgucagcaagggcuaccucggcgcccugcgcaccgggugguacaccagcgugaucaccaucgagcuguccaacaucaaggagaacaagugcaacggcaccgacgccaaggugaagcucaucaagcaggagcuggacaaguacaagaacgcggucacggaccugcagcuccugaugcagagcaccccggccgccggcuccgggagcgcgaucugcuccggcaucgccgucugcaaggugcugcaccucgagggcgaggugaacaagaucaagaacgcccugcuguccaccaacaaggccgucgugagccucuccaacggggugagcguccugaccuucaaggugcuggaccucaagaacuacaucgacaagcagcugcugcccauccugaacaagcagagcugcuccauccccaacaucgagaccgucaucgaguuccagcagaagaacaaccgccuccuggagaucacgcgggaguucagcgugaacgcgggcgugaccacccccgucuccaccuacaugcugacgaacagcgagcuccugucccugaucaacgacaugccgaucaccaacgaccagaagaagcucaugagcaacaacgugcagaucgugcgccagcaguccuacagcaucaugugcaucaucaaggaggagguccuggccuacguggugcagcugccccucuacggggucaucgacacccccugcuggaagcugcacaccagcccccugugcacgaccaacaccaaggagggcuccaacaucugccucacccggacggaccgcgggugguacugcgacaacgccggcagcguguccuucuucccgcaggccgagaccugcaagguccagagcaaccggguguucugcgacaccaugaacucccugacccugcccagcgaggugaaccucugcaacaucgacaucuucaaccccaaguacgacugcaagaucaugacguccaagaccgacgucagcuccagcgugaucaccucccugggcgccaucgugagcugcuacgggaagaccaagugcacggcgagcaacaagaaccgcggcaucaucaagaccuucuccaacgggugcgacuacgucagcaacaagggcguggacaccguguccgucggcaacacccuguacugcgugaacaagcaggagggccagagccucuacgugaagggggagcccaucaucaacuucuacgacccgcuggucuuccccuccgacgaguucgacgccagcaucucccaggugaacgagaagaucaaccagagccuggccuucauccggaaguccgacgagcuccugcacaacgugaacgucggcaagagcaccacgaacaucaugaucaccaccaucaucaucgugaucaucgugauccugcugcuccugaucgccgucgggcuguuccucuacugcaaggcccgcuccacccccgugacgcugagcaaggaccagcuguccgggaucaacaacaucgcguucagcaacugaggacuaguguccaccugucccuccugggcugcuggauugucucguuuuccugccaaauaaacaggaucagcgcuuuacagaucuaaaaaaaaaaaaaaaaaaaaaaaaaaaaaaaaaaaaaaaaaaaaaaaaaaaaaaaaaaaaaaaaugcaucccccccccccccccccccccccccccccccaaaggcucuuuucagagccaccagaauu

SEQ ID NO: 14744 - RNA, 1897 nt, Artificial Sequence
  mRNA product Design b-3 comprising derived and/or modified sequence from HRSV(Memphis-37)__AIY60640.1__F_DSCav1_mut2 (opt1)
gggagagucccgcagucggcguccagcggcucugcuuguucgugugugugucguugcaggccuuauucaagcuuaccauggagcugcccauccucaagaccaacgccaucaccacgauccuggccgcggugacccugugcuucgccagcucccagaacaucaccgaggaguucuaccagagcacgugcuccgccgucagcaagggcuaccucggggcccugcgcaccggcugguacaccuccgugaucaccaucgagcugagcaacaucaaggagaacaagugcaacgggaccgacgccaaggugaagcucaucaagcaggagcuggacaaguacaagaacgcggucacggaccugcagcuccugaugcaguccaccccggccgccggcagcggguccgccaucugcagcggcaucgcggugugcaaggugcugcaccucgagggcgaggucaacaagaucaagaacgcccugcuguccaccaacaaggccguggugagccucuccaacggggucagcgugcugaccuucaaggugcuggaccucaagaacuacaucgacaagcagcugcugcccauccucaacaagcaguccugcagcauccccaacaucgagacggucaucgaguuccagcagaagaacaaccggcugcuggagaucacccgcgaguucuccgugaacgccggcgugaccacccccgucagcacguacaugcucaccaacuccgagcugcugagccucaucaacgacaugccgaucaccaacgaccagaagaagcugaugagcaacaacgugcagaucgugcggcagcaguccuacagcaucaugugcaucaucaaggaggagguccuggccuacguggugcagcucccccuguacggggucaucgacacccccugcuggaagcugcacacgagcccccucugcaccaccaacaccaaggagggcuccaacaucugccugacgcgcaccgaccgggggugguacugcgacaacgcgggcuccgugagcuucuucccgcaggccgagaccugcaaggugcaguccaaccgcgucuucugcgacaccaugaacagccugacgcuccccuccgaggugaaccugugcaacaucgacaucuucaaccccaaguacgacugcaagaucaugaccagcaagaccgacgucuccagcuccgugaucaccagccugggcgccaucguguccugcuacgggaagacgaagugcaccgccagcaacaagaaccggggcaucaucaagaccuucuccaacgggugcgacuacgucagcaacaagggcguggacaccguguccgucggcaacacgcucuacugcgugaacaagcaggaggggcagagccuguacgugaagggcgagcccaucaucaacuucuacgacccgcuggucuuccccagcgacgaguucgacgccuccaucagccaggugaacgagaagaucaaccagucccucgcguucauccgcaagagcgacgagcugcugcacaacgugaacgucgggaaguccaccaccaacaucaugaucaccaccaucaucaucgugaucaucgugauccuccugcugcucaucgccgucggccuguuccuguacugcaaggcccggagcacgcccgugacccuguccaaggaccagcucagcgggaucaacaacaucgccuucuccaacugaggacuaguguccaccugucccuccugggcugcuggauugucucguuuuccugccaaauaaacaggaucagcgcuuuacagaucuaaaaaaaaaaaaaaaaaaaaaaaaaaaaaaaaaaaaaaaaaaaaaaaaaaaaaaaaaaaaaaaaugcaucccccccccccccccccccccccccccccccaaaggcucuuuucagagccaccagaauu

SEQ ID NO: 14745 - RNA, 1897 nt, Artificial Sequence
  mRNA product Design b-3 comprising derived and/or modified sequence from HRSV(Memphis-37)__AIY60640.1__F_DSCav1_mut2 (opt2)
gggagagucccgcagucggcguccagcggcucugcuuguucgugugugugucguugcaggccuuauucaagcuuaccauggagcuccccauccucaagaccaacgccaucaccaccauccucgccgccgucacccucugcuucgccuccucccagaacaucaccgaggaguucuaccaguccaccugcuccgccgucuccaagggcuaccucggcgcccuccgcaccggcugguacaccuccgucaucaccaucgagcucuccaacaucaaggagaacaagugcaacggcaccgacgccaaggucaagcucaucaagcaggagcucgacaaguacaagaacgccgucaccgaccuccagcuccucaugcaguccacccccgccgccggcuccggcuccgccaucugcuccggcaucgccgucugcaagguccuccaccucgagggcgaggucaacaagaucaagaacgcccuccucuccaccaacaaggccgucgucucccucuccaacggcgucuccguccucaccuucaagguccucgaccucaagaacuacaucgacaagcagcuccuccccauccucaacaagcaguccugcuccauccccaacaucgagaccgucaucgaguuccagcagaagaacaaccgccuccucgagaucacccgcgaguucuccgucaacgccggcgucaccacccccgucuccaccuacaugcucaccaacuccgagcuccucucccucaucaacgacaugcccaucaccaacgaccagaagaagcucauguccaacaacguccagaucguccgccagcaguccuacuccaucaugugcaucaucaaggaggagguccucgccuacgucguccagcucccccucuacggcgucaucgacacccccugcuggaagcuccacaccuccccccucugcaccaccaacaccaaggagggcuccaacaucugccucacccgcaccgaccgcggcugguacugcgacaacgccggcuccgucuccuucuucccccaggccgagaccugcaagguccaguccaaccgcgucuucugcgacaccaugaacucccucacccuccccuccgaggucaaccucugcaacaucgacaucuucaaccccaaguacgacugcaagaucaugaccuccaagaccgacgucuccuccuccgucaucaccucccucggcgccaucgucuccugcuacggcaagaccaagugcaccgccuccaacaagaaccgcggcaucaucaagaccuucuccaacggcugcgacuacgucuccaacaagggcgucgacaccgucuccgucggcaacacccucuacugcgucaacaagcaggagggccagucccucuacgucaagggcgagcccaucaucaacuucuacgacccccucgucuuccccuccgacgaguucgacgccuccaucucccaggucaacgagaagaucaaccagucccucgccuucauccgcaaguccgacgagcuccuccacaacgucaacgucggcaaguccaccaccaacaucaugaucaccaccaucaucaucgucaucaucgucauccuccuccuccucaucgccgucggccucuuccucuacugcaaggcccgcuccacccccgucacccucuccaaggaccagcucuccggcaucaacaacaucgccuucuccaacugaggacuaguguccaccugucccuccugggcugcuggauugucucguuuuccugccaaauaaacaggaucagcgcuuuacagaucuaaaaaaaaaaaaaaaaaaaaaaaaaaaaaaaaaaaaaaaaaaaaaaaaaaaaaaaaaaaaaaaaugcaucccccccccccccccccccccccccccccccaaaggcucuuuucagagccaccagaauu

SEQ ID NO: 14746 - RNA, 1897 nt, Artificial Sequence
  mRNA product Design b-3 comprising derived and/or modified sequence from HRSV(Memphis-37)__AIY60640.1__F_DSCav1_mut2 (opt3)
gggagagucccgcagucggcguccagcggcucugcuuguucgugugugugucguugcaggccuuauucaagcuuaccauggagcugcccauccucaagaccaacgccauuacaacuauacuugcugcagugacgcugugcuucgccagcucccagaauaucaccgaagaguuuuaccaaucuacauguucagcggucaguaaaggcuauuugggggcuuuaagaacuggaugguacaccagcguuauuacaaucgaacuguccaacauuaaggagaauaaaugcaacgguaccgacgccaaggugaaacuaaucaagcaggaacucgauaaguauaaaaaugcaguaacugaccugcagcuucugaugcagucuacuccugccgcuggcucggggucagcaauauguagcggaaucgccgugugcaaggucuugcaccucgagggcgaggugaacaaaauuaagaaugcucugcugaguaccaacaaagccguugugucccucucuaauggugucagcguguuaacguucaagguacuggaucuuaagaacuacaucgacaaacaauugcugccaauucuaaauaagcaguccuguucaaucccgaacauagaaacuguuauugaguuucagcagaaaaauaacaggcuccuggaaaucacccgggaguucagugugaaugcgggggucacaacucccgugagcaccuauaugcuuacaaacucugagcuguugucccucauuaacgauaugccuaucaccaaugaccaaaagaaacugaugucaaacaaugugcagaucguccgccagcagagcuacaguauuaugugcauaaucaaggaagagguuuuagcauaugugguacaacugccacucuacggagugauugauacgcccuguuggaaacuucauacuucuccucugugcacaaccaacacuaaggaaggcuccaauaucuguuugacacgaaccgaccguggcugguacugcgauaacgccgggagcgucucguuuuucccacaggcugagacguguaaggugcagucuaauagaguuuucugcgacaccaugaacucccuaacacugcccucagaagugaaucucugcaacauagauauuuucaauccuaaauaugacuguaagaucaugacaaguaaaaccgaugucagcuccucugugaucacaagccugggagccauuguaucaugcuacgguaagacuaaauguaccgcaaguaacaagaauaggggcaucauuaagacauuuuccaacgggugcgacuauguuagcaauaaaggaguggacaccgucucugugggcaacacucuuuacugugucaacaagcaagagggucagucacuguaugugaaaggggagccaauaaucaauuucuacgauccguugguuuuucccagugacgaauuugaugcuagcauuucccaggugaacgagaagaucaaucagucucucgccuuuauccggaaaucggacgaacuguuacacaacguaaaugucggaaagagcacgacaaacauuaugauaaccacuaucauuaucgugauuaucguuauacugcuacuccugaucgcggugggccuuuucuuguauugcaaggcccgcuccaccccugucacacugucaaaagaucaacucaguggcauuaauaacaucgcauucucuaauugaggacuaguguccaccugucccuccugggcugcuggauugucucguuuuccugccaaauaaacaggaucagcgcuuuacagaucuaaaaaaaaaaaaaaaaaaaaaaaaaaaaaaaaaaaaaaaaaaaaaaaaaaaaaaaaaaaaaaaaugcaucccccccccccccccccccccccccccccccaaaggcucuuuucagagccaccagaauu

SEQ ID NO: 14747 - RNA, 1897 nt, Artificial Sequence
  mRNA product Design b-3 comprising derived and/or modified sequence from HRSV(Memphis-37)__AIY60640.1__F_DSCav1_mut2 (opt4)
gggagagucccgcagucggcguccagcggcucugcuuguucgugugugugucguugcaggccuuauucaagcuuaccauggagcugcccauccugaagaccaacgccaucaccaccauccuggccgccgugacccugugcuucgccagcagccagaacaucaccgaggaguucuaccagagcaccugcagcgccgugagcaagggcuaccugggcgcccugagaaccggcugguacaccagcgugaucaccaucgagcugagcaacaucaaggagaacaagugcaacggcaccgacgccaaggugaagcugaucaagcaggagcuggacaaguacaagaacgccgugaccgaccugcagcugcugaugcagagcacccccgccgccggcagcggcagcgccaucugcagcggcaucgccgugugcaaggugcugcaccuggagggcgaggugaacaagaucaagaacgcccugcugagcaccaacaaggccguggugagccugagcaacggcgugagcgugcugaccuucaaggugcuggaccugaagaacuacaucgacaagcagcugcugcccauccugaacaagcagagcugcagcauccccaacaucgagaccgugaucgaguuccagcagaagaacaacagacugcuggagaucaccagagaguucagcgugaacgccggcgugaccacccccgugagcaccuacaugcugaccaacagcgagcugcugagccugaucaacgacaugcccaucaccaacgaccagaagaagcugaugagcaacaacgugcagaucgugagacagcagagcuacagcaucaugugcaucaucaaggaggaggugcuggccuacguggugcagcugccccuguacggcgugaucgacacccccugcuggaagcugcacaccagcccccugugcaccaccaacaccaaggagggcagcaacaucugccugaccagaaccgacagaggcugguacugcgacaacgccggcagcgugagcuucuucccccaggccgagaccugcaaggugcagagcaacagaguguucugcgacaccaugaacagccugacccugcccagcgaggugaaccugugcaacaucgacaucuucaaccccaaguacgacugcaagaucaugaccagcaagaccgacgugagcagcagcgugaucaccagccugggcgccaucgugagcugcuacggcaagaccaagugcaccgccagcaacaagaacagaggcaucaucaagaccuucagcaacggcugcgacuacgugagcaacaagggcguggacaccgugagcgugggcaacacccuguacugcgugaacaagcaggagggccagagccuguacgugaagggcgagcccaucaucaacuucuacgacccccugguguuccccagcgacgaguucgacgccagcaucagccaggugaacgagaagaucaaccagagccuggccuucaucagaaagagcgacgagcugcugcacaacgugaacgugggcaagagcaccaccaacaucaugaucaccaccaucaucaucgugaucaucgugauccugcugcugcugaucgccgugggccuguuccuguacugcaaggccagaagcacccccgugacccugagcaaggaccagcugagcggcaucaacaacaucgccuucagcaacugaggacuaguguccaccugucccuccugggcugcuggauugucucguuuuccugccaaauaaacaggaucagcgcuuuacagaucuaaaaaaaaaaaaaaaaaaaaaaaaaaaaaaaaaaaaaaaaaaaaaaaaaaaaaaaaaaaaaaaaugcaucccccccccccccccccccccccccccccccaaaggcucuuuucagagccaccagaauu

SEQ ID NO: 14748 - RNA, 1897 nt, Artificial Sequence
  mRNA product Design b-3 comprising derived and/or modified sequence from HRSV(Memphis-37)__AIY60640.1__F_DSCav1_mut2 (opt5)
gggagagucccgcagucggcguccagcggcucugcuuguucgugugugugucguugcaggccuuauucaagcuuaccauggagcugcccauccucaagaccaacgccauuacaacgauccuggcugccgugacccuuugcuucgcgagcucccagaauauuacagaagaguuuuaccaaucuaccuguagcgcugucuccaaaggcuaucugggggcccucagaacaggaugguacaccucuguuaucacaauugaacugagcaacaucaaggagaauaaaugcaacggcaccgacgccaaggugaaacuuaucaagcaggaacuggauaaguauaaaaaugcugugacggaccuccagcugcugaugcaguccaccccugccgcugggucuggaagcgccauuuguuccggcaucgcggucugcaaggugcuccaccuggagggggagguuaacaaaauuaagaaugcccuucugagcacaaacaaagcuguggucucucucuccaauggagugagcguucugaccuucaaggugcuugaucugaagaacuacaucgacaaacaacuccugccgauucugaauaagcagucuuguuccauccccaacauugaaacagucaucgaguuucagcagaaaaauaaccggcuccuggaaaucacccgcgaguucagcgugaaugccggcgugacgacaccugucucuaccuauaugcuuacaaacuccgagcugcucagccugauuaacgauaugcccaucaccaaugaccaaaagaaacuuauguccaacaauguucagauugugagacagcagucuuacagcaucaugugcauuaucaaggaagaggugcuggcuuaugucgugcaacucccucuguacggcguuaucgauacccccuguuggaaacugcauacauccccucucugcacgaccaacacaaaggaagggagcaauauuugucugacccggacagaccgcggaugguacugcgauaacgccggcucuguguccuuuuucccgcaggcggagaccuguaagguccagagcaauagaguguuuugcgacacgaugaacucucuuacacugcccagcgaaguuaaucucugcaacaucgauauuuucaauccuaaauaugacuguaagaucaugaccuccaaaaccgaugugucuagcuccgucauuacaagccugggggccaucgugucuugcuacggaaagaccaaauguacagcuuccaacaagaaucggggcaucauuaagacguuuagcaacgggugcgacuaugucucuaauaaaggaguggacaccguuuccgugggcaacacacuuuacugugucaacaagcaagagggccagagccuguaugugaaaggggagcccaucauuaauuucuacgauccucucguuuuucccuccgacgaguucgaugccucuaucagccaggugaacgaaaagauuaaucagucccuggcuuuuauccgcaaaucugacgaacugcuccacaacgucaaugugggaaagagcaccacaaacauuaugaucaccacgaucauuaucgugauuaucguuauucugcuucugcucaucgccgucggccuguuccuguauugcaaggccagauccaccccggugacacuuagcaaagaucaacucucugggaucaauaacauugcuuucuccaauugaggacuaguguccaccugucccuccugggcugcuggauugucucguuuuccugccaaauaaacaggaucagcgcuuuacagaucuaaaaaaaaaaaaaaaaaaaaaaaaaaaaaaaaaaaaaaaaaaaaaaaaaaaaaaaaaaaaaaaaugcaucccccccccccccccccccccccccccccccaaaggcucuuuucagagccaccagaauu

SEQ ID NO: 14749 - RNA, 1897 nt, Artificial Sequence
  mRNA product Design b-3 comprising derived and/or modified sequence from HRSV(Memphis-37)__AIY60640.1__F_DSCav1_mut2 (opt6)
gggagagucccgcagucggcguccagcggcucugcuuguucgugugugugucguugcaggccuuauucaagcuuaccauggagcuuccaauauuaaaaacaaacgcuauaacaacuauacucgcagcaguuacacucugcuucgcauccucacaaaacauaacugaagaauuuuaccaauccacuugcucagccguaucaaaaggauaucuaggagcacuuagaaccggaugguauacaucagugauaacaauagaacuaagcaacauaaaagaaaacaagugcaacggaacugacgcaaaagucaaacuaaucaaacaagaacuagacaaauacaaaaacgcaguaacagaccuacaauuacuaaugcaaucaacaccagcagcaggaucagguucagccauaugcucagguaucgcuguaugcaaaguccuucaccuagaaggugaaguaaacaaaauuaaaaacgcccuacucaguacaaauaaagcugucguaaguuuaucaaacggaguaucaguccuuacauucaaaguauuagaccuaaaaaauuauauagacaaacaauuacuaccaauacucaacaaacaaucaugcucaauaccaaauauagaaaccguaauagaauuucagcaaaaaaauaacagauuacuagaaauaaccagagaauuuucagucaacgcaggagucacaacacccgucucaaccuacaugcuaaccaacucagaacuucuaucucuuaucaacgacaugcccauaaccaaugaucaaaaaaaauuaaugucuaauaacguucaaauaguaagacaacaaucauacucaauaaugugcauaaucaaagaagaaguauuagcauacguaguacaacuaccccuauauggaguaauagacacacccugcuggaaacuacacacauccccccucuguacaacaaacacuaaagaaggaucaaacauuugccuaacaagaacagaccgcggaugguacugcgacaacgcaggcuccguaucuuucuuuccacaagccgaaacuuguaaaguucaaucaaacagaguauuuugcgauacaaugaacuccuuaacauuaccuucagaaguaaaccuaugcaacauagacaucuucaacccaaaauacgacugcaaaauaaugaccucaaaaacagacguauccucaucagucauaaccuccuuaggagcaauaguaucauguuacggaaaaacaaaauguacagcaucaaauaaaaauagaggaauaauaaaaaccuucuccaacggaugcgacuacguauccaauaaaggaguagacaccguaucaguaggaaacacacuauacuguguaaacaaacaagaaggccaaucucuauauguaaaaggcgaaccaaucauaaauuuuuacgacccacuugucuuccccuccgacgaauuugacgcaagcauaucacaaguaaacgaaaaaaucaaccaaagccuagccuucauaaggaaaucugacgaauuacuucauaacguaaauguuggaaaaucaaccacaaacauaaugauaaccaccaucauaauuguaauaauaguaauacuacuacuacuaauugcaguaggacucuuccuauauugcaaagcucgcucaacaccaguuaccuuaucaaaagaccaacuaucuggaauaaacaacauagccuuuuccaacuaaggacuaguguccaccugucccuccugggcugcuggauugucucguuuuccugccaaauaaacaggaucagcgcuuuacagaucuaaaaaaaaaaaaaaaaaaaaaaaaaaaaaaaaaaaaaaaaaaaaaaaaaaaaaaaaaaaaaaaaugcaucccccccccccccccccccccccccccccccaaaggcucuuuucagagccaccagaauu

SEQ ID NO: 14750 - RNA, 1897 nt, Artificial Sequence
  mRNA product Design b-3 comprising derived and/or modified sequence from HRSV(Memphis-37)__AIY60640.1__F_DSCav1_mut2 (opt11)
gggagagucccgcagucggcguccagcggcucugcuuguucgugugugugucguugcaggccuuauucaagcuuaccauggaacucccaauccuaaaaaccaacgccaucaccaccauccucgccgcugucaccuuaugcuuugccagcagccaaaacaucaccgaagaauuuuaccaaucaacaugcuccgccgucucaaaaggauaccucggcgcccuacgcaccggcugguacacaagcgucauaaccaucgagcucuccaacaucaaggaaaacaaaugcaauggaaccgacgccaaagucaaacuaaucaaacaagaacuagacaaguacaagaacgcagucaccgaccuccaacuccucaugcaguccacccccgcagcaggcucuggcucagcaauaugcuccggcaucgcugucugcaaaguccuacaccucgaaggcgaagucaacaaaaucaaaaacgcccuacuguccacaaacaaagccgucgucucccuauccaacggcgucucgguccuaaccuuuaagguucucgaucucaaaaauuacauagacaaacaacuacuccccauccucaacaaacaaucuugcucaauccccaacaucgaaaccgucaucgaguuccaacagaaaaacaacagacuacucgaaaucacccgcgaguucucagucaacgcgggcgucacaacacccgucagcaccuacaugcuaaccaacuccgaacuccucagccucauuaacgacaugcccaucaccaacgaccaaaagaaacuuauguccaacaacguucaaaucguccgccaacaauccuacuccaucaugugcaucaucaaagaagaaguacucgccuacguaguccaacugccccucuacggcgucaucgauaccccaugcuggaaacuacacaccagcccccucugcaccaccaacaccaaagaaggcuccaauaucugcuuaacccgcacagaccguggcugguacugcgauaacgccggcuccgucuccuucuucccccaagcagaaaccugcaaaguacaauccaaccgagucuucugugacaccaugaacucccuaacccuuccaucagaagucaaccucugcaacaucgacaucuucaaccccaaguacgacugcaaaaucaugacauccaaaaccgaugucucaagcagcgucauaaccucacucggcgcuaucguaagcugcuacggcaaaaccaaaugcaccgcaucaaacaaaaaccgcggaaucaucaaaaccuucagcaacggaugcgacuacguuuccaacaaaggcguagacaccgucuccgucggaaacacccucuacugcguaaacaaacaggaaggccaaucccucuacgucaaaggcgaacccaucauaaacuucuacgauccccuugucuucccguccgaugaguucgacgccuccaucucgcaagucaacgaaaagauaaaccaaucacuagcauucauccguaaauccgacgaacuccuccacaacgucaacgucggaaaauccaccaccaacauaaugaucaccaccauaaucaucgucaucaucguaauacuauuacuccucauagccgucggccucuuccuauauugcaaagcccgaucaacccccguaacccuuucuaaagaccaacuguccggaaucaacaacaucgcuuucagcaacugaggacuaguguccaccugucccuccugggcugcuggauugucucguuuuccugccaaauaaacaggaucagcgcuuuacagaucuaaaaaaaaaaaaaaaaaaaaaaaaaaaaaaaaaaaaaaaaaaaaaaaaaaaaaaaaaaaaaaaaugcaucccccccccccccccccccccccccccccccaaaggcucuuuucagagccaccagaauu

SEQ ID NO: 14751 - RNA, 1948 nt, Artificial Sequence
  mRNA product Design b-4 comprising derived and/or modified sequence from HRSV(Memphis-37)__AIY60640.1__F_DSCav1_mut2 (opt1)
gggagagucccgcagucggcguccagcggcucugcuuguucgugugugugucguugcaggccuuauucaagcuuaccauggagcugcccauccucaagaccaacgccaucaccacgauccuggccgcggugacccugugcuucgccagcucccagaacaucaccgaggaguucuaccagagcacgugcuccgccgucagcaagggcuaccucggcgcccugcgcaccgggugguacaccagcgugaucaccaucgagcuguccaacaucaaggagaacaagugcaacggcaccgacgccaaggugaagcucaucaagcaggagcuggacaaguacaagaacgcggucacggaccugcagcuccugaugcagagcaccccggccgccggcuccgggagcgcgaucugcuccggcaucgccgucugcaaggugcugcaccucgagggcgaggugaacaagaucaagaacgcccugcuguccaccaacaaggccgucgugagccucuccaacggggugagcguccugaccuucaaggugcuggaccucaagaacuacaucgacaagcagcugcugcccauccugaacaagcagagcugcuccauccccaacaucgagaccgucaucgaguuccagcagaagaacaaccgccuccuggagaucacgcgggaguucagcgugaacgcgggcgugaccacccccgucuccaccuacaugcugacgaacagcgagcuccugucccugaucaacgacaugccgaucaccaacgaccagaagaagcucaugagcaacaacgugcagaucgugcgccagcaguccuacagcaucaugugcaucaucaaggaggagguccuggccuacguggugcagcugccccucuacggggucaucgacacccccugcuggaagcugcacaccagcccccugugcacgaccaacaccaaggagggcuccaacaucugccucacccggacggaccgcgggugguacugcgacaacgccggcagcguguccuucuucccgcaggccgagaccugcaagguccagagcaaccggguguucugcgacaccaugaacucccugacccugcccagcgaggugaaccucugcaacaucgacaucuucaaccccaaguacgacugcaagaucaugacguccaagaccgacgucagcuccagcgugaucaccucccugggcgccaucgugagcugcuacgggaagaccaagugcacggcgagcaacaagaaccgcggcaucaucaagaccuucuccaacgggugcgacuacgucagcaacaagggcguggacaccguguccgucggcaacacccuguacugcgugaacaagcaggagggccagagccucuacgugaagggggagcccaucaucaacuucuacgacccgcuggucuuccccuccgacgaguucgacgccagcaucucccaggugaacgagaagaucaaccagagccuggccuucauccggaaguccgacgagcuccugcacaacgugaacgucggcaagagcaccacgaacaucaugaucaccaccaucaucaucgugaucaucgugauccugcugcuccugaucgccgucgggcuguuccucuacugcaaggcccgcuccacccccgugacgcugagcaaggaccagcuguccgggaucaacaacaucgcguucagcaacugaggacuaguaauaaggaaacuguaugaaugucugugggcaggaagugaagagauccuucuguaaagguuuuuggaauuaugucugcugaauaauaaacuuuuuugaaauaauaaaucugguagaaaaaugagaucuaaaaaaaaaaaaaaaaaaaaaaaaaaaaaaaaaaaaaaaaaaaaaaaaaaaaaaaaaaaaaaaaugcaucccccccccccccccccccccccccccccccaaaggcucuuuucagagccaccagaauu

SEQ ID NO: 14752 - RNA, 1948 nt, Artificial Sequence
  mRNA product Design b-4 comprising derived and/or modified sequence from HRSV(Memphis-37)__AIY60640.1__F_DSCav1_mut2 (opt1)
gggagagucccgcagucggcguccagcggcucugcuuguucgugugugugucguugcaggccuuauucaagcuuaccauggagcugcccauccucaagaccaacgccaucaccacgauccuggccgcggugacccugugcuucgccagcucccagaacaucaccgaggaguucuaccagagcacgugcuccgccgucagcaagggcuaccucggggcccugcgcaccggcugguacaccuccgugaucaccaucgagcugagcaacaucaaggagaacaagugcaacgggaccgacgccaaggugaagcucaucaagcaggagcuggacaaguacaagaacgcggucacggaccugcagcuccugaugcaguccaccccggccgccggcagcggguccgccaucugcagcggcaucgcggugugcaaggugcugcaccucgagggcgaggucaacaagaucaagaacgcccugcuguccaccaacaaggccguggugagccucuccaacggggucagcgugcugaccuucaaggugcuggaccucaagaacuacaucgacaagcagcugcugcccauccucaacaagcaguccugcagcauccccaacaucgagacggucaucgaguuccagcagaagaacaaccggcugcuggagaucacccgcgaguucuccgugaacgccggcgugaccacccccgucagcacguacaugcucaccaacuccgagcugcugagccucaucaacgacaugccgaucaccaacgaccagaagaagcugaugagcaacaacgugcagaucgugcggcagcaguccuacagcaucaugugcaucaucaaggaggagguccuggccuacguggugcagcucccccuguacggggucaucgacacccccugcuggaagcugcacacgagcccccucugcaccaccaacaccaaggagggcuccaacaucugccugacgcgcaccgaccgggggugguacugcgacaacgcgggcuccgugagcuucuucccgcaggccgagaccugcaaggugcaguccaaccgcgucuucugcgacaccaugaacagccugacgcuccccuccgaggugaaccugugcaacaucgacaucuucaaccccaaguacgacugcaagaucaugaccagcaagaccgacgucuccagcuccgugaucaccagccugggcgccaucguguccugcuacgggaagacgaagugcaccgccagcaacaagaaccggggcaucaucaagaccuucuccaacgggugcgacuacgucagcaacaagggcguggacaccguguccgucggcaacacgcucuacugcgugaacaagcaggaggggcagagccuguacgugaagggcgagcccaucaucaacuucuacgacccgcuggucuuccccagcgacgaguucgacgccuccaucagccaggugaacgagaagaucaaccagucccucgcguucauccgcaagagcgacgagcugcugcacaacgugaacgucgggaaguccaccaccaacaucaugaucaccaccaucaucaucgugaucaucgugauccuccugcugcucaucgccgucggccuguuccuguacugcaaggcccggagcacgcccgugacccuguccaaggaccagcucagcgggaucaacaacaucgccuucuccaacugaggacuaguaauaaggaaacuguaugaaugucugugggcaggaagugaagagauccuucuguaaagguuuuuggaauuaugucugcugaauaauaaacuuuuuugaaauaauaaaucugguagaaaaaugagaucuaaaaaaaaaaaaaaaaaaaaaaaaaaaaaaaaaaaaaaaaaaaaaaaaaaaaaaaaaaaaaaaaugcaucccccccccccccccccccccccccccccccaaaggcucuuuucagagccaccagaauu

SEQ ID NO: 14753 - RNA, 1948 nt, Artificial Sequence
  mRNA product Design b-4 comprising derived and/or modified sequence from HRSV(Memphis-37)__AIY60640.1__F_DSCav1_mut2 (opt2)
gggagagucccgcagucggcguccagcggcucugcuuguucgugugugugucguugcaggccuuauucaagcuuaccauggagcuccccauccucaagaccaacgccaucaccaccauccucgccgccgucacccucugcuucgccuccucccagaacaucaccgaggaguucuaccaguccaccugcuccgccgucuccaagggcuaccucggcgcccuccgcaccggcugguacaccuccgucaucaccaucgagcucuccaacaucaaggagaacaagugcaacggcaccgacgccaaggucaagcucaucaagcaggagcucgacaaguacaagaacgccgucaccgaccuccagcuccucaugcaguccacccccgccgccggcuccggcuccgccaucugcuccggcaucgccgucugcaagguccuccaccucgagggcgaggucaacaagaucaagaacgcccuccucuccaccaacaaggccgucgucucccucuccaacggcgucuccguccucaccuucaagguccucgaccucaagaacuacaucgacaagcagcuccuccccauccucaacaagcaguccugcuccauccccaacaucgagaccgucaucgaguuccagcagaagaacaaccgccuccucgagaucacccgcgaguucuccgucaacgccggcgucaccacccccgucuccaccuacaugcucaccaacuccgagcuccucucccucaucaacgacaugcccaucaccaacgaccagaagaagcucauguccaacaacguccagaucguccgccagcaguccuacuccaucaugugcaucaucaaggaggagguccucgccuacgucguccagcucccccucuacggcgucaucgacacccccugcuggaagcuccacaccuccccccucugcaccaccaacaccaaggagggcuccaacaucugccucacccgcaccgaccgcggcugguacugcgacaacgccggcuccgucuccuucuucccccaggccgagaccugcaagguccaguccaaccgcgucuucugcgacaccaugaacucccucacccuccccuccgaggucaaccucugcaacaucgacaucuucaaccccaaguacgacugcaagaucaugaccuccaagaccgacgucuccuccuccgucaucaccucccucggcgccaucgucuccugcuacggcaagaccaagugcaccgccuccaacaagaaccgcggcaucaucaagaccuucuccaacggcugcgacuacgucuccaacaagggcgucgacaccgucuccgucggcaacacccucuacugcgucaacaagcaggagggccagucccucuacgucaagggcgagcccaucaucaacuucuacgacccccucgucuuccccuccgacgaguucgacgccuccaucucccaggucaacgagaagaucaaccagucccucgccuucauccgcaaguccgacgagcuccuccacaacgucaacgucggcaaguccaccaccaacaucaugaucaccaccaucaucaucgucaucaucgucauccuccuccuccucaucgccgucggccucuuccucuacugcaaggcccgcuccacccccgucacccucuccaaggaccagcucuccggcaucaacaacaucgccuucuccaacugaggacuaguaauaaggaaacuguaugaaugucugugggcaggaagugaagagauccuucuguaaagguuuuuggaauuaugucugcugaauaauaaacuuuuuugaaauaauaaaucugguagaaaaaugagaucuaaaaaaaaaaaaaaaaaaaaaaaaaaaaaaaaaaaaaaaaaaaaaaaaaaaaaaaaaaaaaaaaugcaucccccccccccccccccccccccccccccccaaaggcucuuuucagagccaccagaauu

SEQ ID NO: 14754 - RNA, 1948 nt, Artificial Sequence
  mRNA product Design b-4 comprising derived and/or modified sequence from HRSV(Memphis-37)__AIY60640.1__F_DSCav1_mut2 (opt3)
gggagagucccgcagucggcguccagcggcucugcuuguucgugugugugucguugcaggccuuauucaagcuuaccauggagcugcccauccucaagaccaacgccauuacaacuauacuugcugcagugacgcugugcuucgccagcucccagaauaucaccgaagaguuuuaccaaucuacauguucagcggucaguaaaggcuauuugggggcuuuaagaacuggaugguacaccagcguuauuacaaucgaacuguccaacauuaaggagaauaaaugcaacgguaccgacgccaaggugaaacuaaucaagcaggaacucgauaaguauaaaaaugcaguaacugaccugcagcuucugaugcagucuacuccugccgcuggcucggggucagcaauauguagcggaaucgccgugugcaaggucuugcaccucgagggcgaggugaacaaaauuaagaaugcucugcugaguaccaacaaagccguugugucccucucuaauggugucagcguguuaacguucaagguacuggaucuuaagaacuacaucgacaaacaauugcugccaauucuaaauaagcaguccuguucaaucccgaacauagaaacuguuauugaguuucagcagaaaaauaacaggcuccuggaaaucacccgggaguucagugugaaugcgggggucacaacucccgugagcaccuauaugcuuacaaacucugagcuguugucccucauuaacgauaugccuaucaccaaugaccaaaagaaacugaugucaaacaaugugcagaucguccgccagcagagcuacaguauuaugugcauaaucaaggaagagguuuuagcauaugugguacaacugccacucuacggagugauugauacgcccuguuggaaacuucauacuucuccucugugcacaaccaacacuaaggaaggcuccaauaucuguuugacacgaaccgaccguggcugguacugcgauaacgccgggagcgucucguuuuucccacaggcugagacguguaaggugcagucuaauagaguuuucugcgacaccaugaacucccuaacacugcccucagaagugaaucucugcaacauagauauuuucaauccuaaauaugacuguaagaucaugacaaguaaaaccgaugucagcuccucugugaucacaagccugggagccauuguaucaugcuacgguaagacuaaauguaccgcaaguaacaagaauaggggcaucauuaagacauuuuccaacgggugcgacuauguuagcaauaaaggaguggacaccgucucugugggcaacacucuuuacugugucaacaagcaagagggucagucacuguaugugaaaggggagccaauaaucaauuucuacgauccguugguuuuucccagugacgaauuugaugcuagcauuucccaggugaacgagaagaucaaucagucucucgccuuuauccggaaaucggacgaacuguuacacaacguaaaugucggaaagagcacgacaaacauuaugauaaccacuaucauuaucgugauuaucguuauacugcuacuccugaucgcggugggccuuuucuuguauugcaaggcccgcuccaccccugucacacugucaaaagaucaacucaguggcauuaauaacaucgcauucucuaauugaggacuaguaauaaggaaacuguaugaaugucugugggcaggaagugaagagauccuucuguaaagguuuuuggaauuaugucugcugaauaauaaacuuuuuugaaauaauaaaucugguagaaaaaugagaucuaaaaaaaaaaaaaaaaaaaaaaaaaaaaaaaaaaaaaaaaaaaaaaaaaaaaaaaaaaaaaaaaugcaucccccccccccccccccccccccccccccccaaaggcucuuuucagagccaccagaauu

SEQ ID NO: 14755 - RNA, 1948 nt, Artificial Sequence
  mRNA product Design b-4 comprising derived and/or modified sequence from HRSV(Memphis-37)__AIY60640.1__F_DSCav1_mut2 (opt4)
gggagagucccgcagucggcguccagcggcucugcuuguucgugugugugucguugcaggccuuauucaagcuuaccauggagcugcccauccugaagaccaacgccaucaccaccauccuggccgccgugacccugugcuucgccagcagccagaacaucaccgaggaguucuaccagagcaccugcagcgccgugagcaagggcuaccugggcgcccugagaaccggcugguacaccagcgugaucaccaucgagcugagcaacaucaaggagaacaagugcaacggcaccgacgccaaggugaagcugaucaagcaggagcuggacaaguacaagaacgccgugaccgaccugcagcugcugaugcagagcacccccgccgccggcagcggcagcgccaucugcagcggcaucgccgugugcaaggugcugcaccuggagggcgaggugaacaagaucaagaacgcccugcugagcaccaacaaggccguggugagccugagcaacggcgugagcgugcugaccuucaaggugcuggaccugaagaacuacaucgacaagcagcugcugcccauccugaacaagcagagcugcagcauccccaacaucgagaccgugaucgaguuccagcagaagaacaacagacugcuggagaucaccagagaguucagcgugaacgccggcgugaccacccccgugagcaccuacaugcugaccaacagcgagcugcugagccugaucaacgacaugcccaucaccaacgaccagaagaagcugaugagcaacaacgugcagaucgugagacagcagagcuacagcaucaugugcaucaucaaggaggaggugcuggccuacguggugcagcugccccuguacggcgugaucgacacccccugcuggaagcugcacaccagcccccugugcaccaccaacaccaaggagggcagcaacaucugccugaccagaaccgacagaggcugguacugcgacaacgccggcagcgugagcuucuucccccaggccgagaccugcaaggugcagagcaacagaguguucugcgacaccaugaacagccugacccugcccagcgaggugaaccugugcaacaucgacaucuucaaccccaaguacgacugcaagaucaugaccagcaagaccgacgugagcagcagcgugaucaccagccugggcgccaucgugagcugcuacggcaagaccaagugcaccgccagcaacaagaacagaggcaucaucaagaccuucagcaacggcugcgacuacgugagcaacaagggcguggacaccgugagcgugggcaacacccuguacugcgugaacaagcaggagggccagagccuguacgugaagggcgagcccaucaucaacuucuacgacccccugguguuccccagcgacgaguucgacgccagcaucagccaggugaacgagaagaucaaccagagccuggccuucaucagaaagagcgacgagcugcugcacaacgugaacgugggcaagagcaccaccaacaucaugaucaccaccaucaucaucgugaucaucgugauccugcugcugcugaucgccgugggccuguuccuguacugcaaggccagaagcacccccgugacccugagcaaggaccagcugagcggcaucaacaacaucgccuucagcaacugaggacuaguaauaaggaaacuguaugaaugucugugggcaggaagugaagagauccuucuguaaagguuuuuggaauuaugucugcugaauaauaaacuuuuuugaaauaauaaaucugguagaaaaaugagaucuaaaaaaaaaaaaaaaaaaaaaaaaaaaaaaaaaaaaaaaaaaaaaaaaaaaaaaaaaaaaaaaaugcaucccccccccccccccccccccccccccccccaaaggcucuuuucagagccaccagaauu

SEQ ID NO: 14756 - RNA, 1948 nt, Artificial Sequence
  mRNA product Design b-4 comprising derived and/or modified sequence from HRSV(Memphis-37)__AIY60640.1__F_DSCav1_mut2 (opt5)
gggagagucccgcagucggcguccagcggcucugcuuguucgugugugugucguugcaggccuuauucaagcuuaccauggagcugcccauccucaagaccaacgccauuacaacgauccuggcugccgugacccuuugcuucgcgagcucccagaauauuacagaagaguuuuaccaaucuaccuguagcgcugucuccaaaggcuaucugggggcccucagaacaggaugguacaccucuguuaucacaauugaacugagcaacaucaaggagaauaaaugcaacggcaccgacgccaaggugaaacuuaucaagcaggaacuggauaaguauaaaaaugcugugacggaccuccagcugcugaugcaguccaccccugccgcugggucuggaagcgccauuuguuccggcaucgcggucugcaaggugcuccaccuggagggggagguuaacaaaauuaagaaugcccuucugagcacaaacaaagcuguggucucucucuccaauggagugagcguucugaccuucaaggugcuugaucugaagaacuacaucgacaaacaacuccugccgauucugaauaagcagucuuguuccauccccaacauugaaacagucaucgaguuucagcagaaaaauaaccggcuccuggaaaucacccgcgaguucagcgugaaugccggcgugacgacaccugucucuaccuauaugcuuacaaacuccgagcugcucagccugauuaacgauaugcccaucaccaaugaccaaaagaaacuuauguccaacaauguucagauugugagacagcagucuuacagcaucaugugcauuaucaaggaagaggugcuggcuuaugucgugcaacucccucuguacggcguuaucgauacccccuguuggaaacugcauacauccccucucugcacgaccaacacaaaggaagggagcaauauuugucugacccggacagaccgcggaugguacugcgauaacgccggcucuguguccuuuuucccgcaggcggagaccuguaagguccagagcaauagaguguuuugcgacacgaugaacucucuuacacugcccagcgaaguuaaucucugcaacaucgauauuuucaauccuaaauaugacuguaagaucaugaccuccaaaaccgaugugucuagcuccgucauuacaagccugggggccaucgugucuugcuacggaaagaccaaauguacagcuuccaacaagaaucggggcaucauuaagacguuuagcaacgggugcgacuaugucucuaauaaaggaguggacaccguuuccgugggcaacacacuuuacugugucaacaagcaagagggccagagccuguaugugaaaggggagcccaucauuaauuucuacgauccucucguuuuucccuccgacgaguucgaugccucuaucagccaggugaacgaaaagauuaaucagucccuggcuuuuauccgcaaaucugacgaacugcuccacaacgucaaugugggaaagagcaccacaaacauuaugaucaccacgaucauuaucgugauuaucguuauucugcuucugcucaucgccgucggccuguuccuguauugcaaggccagauccaccccggugacacuuagcaaagaucaacucucugggaucaauaacauugcuuucuccaauugaggacuaguaauaaggaaacuguaugaaugucugugggcaggaagugaagagauccuucuguaaagguuuuuggaauuaugucugcugaauaauaaacuuuuuugaaauaauaaaucugguagaaaaaugagaucuaaaaaaaaaaaaaaaaaaaaaaaaaaaaaaaaaaaaaaaaaaaaaaaaaaaaaaaaaaaaaaaaugcaucccccccccccccccccccccccccccccccaaaggcucuuuucagagccaccagaauu

SEQ ID NO: 14757 - RNA, 1948 nt, Artificial Sequence
  mRNA product Design b-4 comprising derived and/or modified sequence from HRSV(Memphis-37)__AIY60640.1__F_DSCav1_mut2 (opt6)
gggagagucccgcagucggcguccagcggcucugcuuguucgugugugugucguugcaggccuuauucaagcuuaccauggagcuuccaauauuaaaaacaaacgcuauaacaacuauacucgcagcaguuacacucugcuucgcauccucacaaaacauaacugaagaauuuuaccaauccacuugcucagccguaucaaaaggauaucuaggagcacuuagaaccggaugguauacaucagugauaacaauagaacuaagcaacauaaaagaaaacaagugcaacggaacugacgcaaaagucaaacuaaucaaacaagaacuagacaaauacaaaaacgcaguaacagaccuacaauuacuaaugcaaucaacaccagcagcaggaucagguucagccauaugcucagguaucgcuguaugcaaaguccuucaccuagaaggugaaguaaacaaaauuaaaaacgcccuacucaguacaaauaaagcugucguaaguuuaucaaacggaguaucaguccuuacauucaaaguauuagaccuaaaaaauuauauagacaaacaauuacuaccaauacucaacaaacaaucaugcucaauaccaaauauagaaaccguaauagaauuucagcaaaaaaauaacagauuacuagaaauaaccagagaauuuucagucaacgcaggagucacaacacccgucucaaccuacaugcuaaccaacucagaacuucuaucucuuaucaacgacaugcccauaaccaaugaucaaaaaaaauuaaugucuaauaacguucaaauaguaagacaacaaucauacucaauaaugugcauaaucaaagaagaaguauuagcauacguaguacaacuaccccuauauggaguaauagacacacccugcuggaaacuacacacauccccccucuguacaacaaacacuaaagaaggaucaaacauuugccuaacaagaacagaccgcggaugguacugcgacaacgcaggcuccguaucuuucuuuccacaagccgaaacuuguaaaguucaaucaaacagaguauuuugcgauacaaugaacuccuuaacauuaccuucagaaguaaaccuaugcaacauagacaucuucaacccaaaauacgacugcaaaauaaugaccucaaaaacagacguauccucaucagucauaaccuccuuaggagcaauaguaucauguuacggaaaaacaaaauguacagcaucaaauaaaaauagaggaauaauaaaaaccuucuccaacggaugcgacuacguauccaauaaaggaguagacaccguaucaguaggaaacacacuauacuguguaaacaaacaagaaggccaaucucuauauguaaaaggcgaaccaaucauaaauuuuuacgacccacuugucuuccccuccgacgaauuugacgcaagcauaucacaaguaaacgaaaaaaucaaccaaagccuagccuucauaaggaaaucugacgaauuacuucauaacguaaauguuggaaaaucaaccacaaacauaaugauaaccaccaucauaauuguaauaauaguaauacuacuacuacuaauugcaguaggacucuuccuauauugcaaagcucgcucaacaccaguuaccuuaucaaaagaccaacuaucuggaauaaacaacauagccuuuuccaacuaaggacuaguaauaaggaaacuguaugaaugucugugggcaggaagugaagagauccuucuguaaagguuuuuggaauuaugucugcugaauaauaaacuuuuuugaaauaauaaaucugguagaaaaaugagaucuaaaaaaaaaaaaaaaaaaaaaaaaaaaaaaaaaaaaaaaaaaaaaaaaaaaaaaaaaaaaaaaaugcaucccccccccccccccccccccccccccccccaaaggcucuuuucagagccaccagaauu

SEQ ID NO: 14758 - RNA, 1948 nt, Artificial Sequence
  mRNA product Design b-4 comprising derived and/or modified sequence from HRSV(Memphis-37)__AIY60640.1__F_DSCav1_mut2 (opt11)
gggagagucccgcagucggcguccagcggcucugcuuguucgugugugugucguugcaggccuuauucaagcuuaccauggaacucccaauccuaaaaaccaacgccaucaccaccauccucgccgcugucaccuuaugcuuugccagcagccaaaacaucaccgaagaauuuuaccaaucaacaugcuccgccgucucaaaaggauaccucggcgcccuacgcaccggcugguacacaagcgucauaaccaucgagcucuccaacaucaaggaaaacaaaugcaauggaaccgacgccaaagucaaacuaaucaaacaagaacuagacaaguacaagaacgcagucaccgaccuccaacuccucaugcaguccacccccgcagcaggcucuggcucagcaauaugcuccggcaucgcugucugcaaaguccuacaccucgaaggcgaagucaacaaaaucaaaaacgcccuacuguccacaaacaaagccgucgucucccuauccaacggcgucucgguccuaaccuuuaagguucucgaucucaaaaauuacauagacaaacaacuacuccccauccucaacaaacaaucuugcucaauccccaacaucgaaaccgucaucgaguuccaacagaaaaacaacagacuacucgaaaucacccgcgaguucucagucaacgcgggcgucacaacacccgucagcaccuacaugcuaaccaacuccgaacuccucagccucauuaacgacaugcccaucaccaacgaccaaaagaaacuuauguccaacaacguucaaaucguccgccaacaauccuacuccaucaugugcaucaucaaagaagaaguacucgccuacguaguccaacugccccucuacggcgucaucgauaccccaugcuggaaacuacacaccagcccccucugcaccaccaacaccaaagaaggcuccaauaucugcuuaacccgcacagaccguggcugguacugcgauaacgccggcuccgucuccuucuucccccaagcagaaaccugcaaaguacaauccaaccgagucuucugugacaccaugaacucccuaacccuuccaucagaagucaaccucugcaacaucgacaucuucaaccccaaguacgacugcaaaaucaugacauccaaaaccgaugucucaagcagcgucauaaccucacucggcgcuaucguaagcugcuacggcaaaaccaaaugcaccgcaucaaacaaaaaccgcggaaucaucaaaaccuucagcaacggaugcgacuacguuuccaacaaaggcguagacaccgucuccgucggaaacacccucuacugcguaaacaaacaggaaggccaaucccucuacgucaaaggcgaacccaucauaaacuucuacgauccccuugucuucccguccgaugaguucgacgccuccaucucgcaagucaacgaaaagauaaaccaaucacuagcauucauccguaaauccgacgaacuccuccacaacgucaacgucggaaaauccaccaccaacauaaugaucaccaccauaaucaucgucaucaucguaauacuauuacuccucauagccgucggccucuuccuauauugcaaagcccgaucaacccccguaacccuuucuaaagaccaacuguccggaaucaacaacaucgcuuucagcaacugaggacuaguaauaaggaaacuguaugaaugucugugggcaggaagugaagagauccuucuguaaagguuuuuggaauuaugucugcugaauaauaaacuuuuuugaaauaauaaaucugguagaaaaaugagaucuaaaaaaaaaaaaaaaaaaaaaaaaaaaaaaaaaaaaaaaaaaaaaaaaaaaaaaaaaaaaaaaaugcaucccccccccccccccccccccccccccccccaaaggcucuuuucagagccaccagaauu

SEQ ID NO: 14759 - RNA, 2010 nt, Artificial Sequence
  mRNA product Design b-5 comprising derived and/or modified sequence from HRSV(Memphis-37)__AIY60640.1__F_DSCav1_mut2 (opt1)
gggagacuccugucgggcggaaguaggaggaguagaguuuaaaaacaguacucuuuuuccgguucgggacguaguugaagcaacgacaagccggauaaccgcucuugagacaggaagcuuaccauggagcugcccauccucaagaccaacgccaucaccacgauccuggccgcggugacccugugcuucgccagcucccagaacaucaccgaggaguucuaccagagcacgugcuccgccgucagcaagggcuaccucggcgcccugcgcaccgggugguacaccagcgugaucaccaucgagcuguccaacaucaaggagaacaagugcaacggcaccgacgccaaggugaagcucaucaagcaggagcuggacaaguacaagaacgcggucacggaccugcagcuccugaugcagagcaccccggccgccggcuccgggagcgcgaucugcuccggcaucgccgucugcaaggugcugcaccucgagggcgaggugaacaagaucaagaacgcccugcuguccaccaacaaggccgucgugagccucuccaacggggugagcguccugaccuucaaggugcuggaccucaagaacuacaucgacaagcagcugcugcccauccugaacaagcagagcugcuccauccccaacaucgagaccgucaucgaguuccagcagaagaacaaccgccuccuggagaucacgcgggaguucagcgugaacgcgggcgugaccacccccgucuccaccuacaugcugacgaacagcgagcuccugucccugaucaacgacaugccgaucaccaacgaccagaagaagcucaugagcaacaacgugcagaucgugcgccagcaguccuacagcaucaugugcaucaucaaggaggagguccuggccuacguggugcagcugccccucuacggggucaucgacacccccugcuggaagcugcacaccagcccccugugcacgaccaacaccaaggagggcuccaacaucugccucacccggacggaccgcgggugguacugcgacaacgccggcagcguguccuucuucccgcaggccgagaccugcaagguccagagcaaccggguguucugcgacaccaugaacucccugacccugcccagcgaggugaaccucugcaacaucgacaucuucaaccccaaguacgacugcaagaucaugacguccaagaccgacgucagcuccagcgugaucaccucccugggcgccaucgugagcugcuacgggaagaccaagugcacggcgagcaacaagaaccgcggcaucaucaagaccuucuccaacgggugcgacuacgucagcaacaagggcguggacaccguguccgucggcaacacccuguacugcgugaacaagcaggagggccagagccucuacgugaagggggagcccaucaucaacuucuacgacccgcuggucuuccccuccgacgaguucgacgccagcaucucccaggugaacgagaagaucaaccagagccuggccuucauccggaaguccgacgagcuccugcacaacgugaacgucggcaagagcaccacgaacaucaugaucaccaccaucaucaucgugaucaucgugauccugcugcuccugaucgccgucgggcuguuccucuacugcaaggcccgcuccacccccgugacgcugagcaaggaccagcuguccgggaucaacaacaucgcguucagcaacugaggacuaguacuggcugcaucucccuuuccucuguccuccauccuucucccaggauggugaagggggaccugguacccagugauccccaccccaggauccuaaaucaugacuuaccugcuaauaaaaacucauuggaaaagugagaagaucuaaaaaaaaaaaaaaaaaaaaaaaaaaaaaaaaaaaaaaaaaaaaaaaaaaaaaaaaaaaaaaaaugcaucccccccccccccccccccccccccccccccaaaggcucuuuucagagccaccagaauu

SEQ ID NO: 14760 - RNA, 2010 nt, Artificial Sequence
  mRNA product Design b-5 comprising derived and/or modified sequence from HRSV(Memphis-37)__AIY60640.1__F_DSCav1_mut2 (opt1)
gggagacuccugucgggcggaaguaggaggaguagaguuuaaaaacaguacucuuuuuccgguucgggacguaguugaagcaacgacaagccggauaaccgcucuugagacaggaagcuuaccauggagcugcccauccucaagaccaacgccaucaccacgauccuggccgcggugacccugugcuucgccagcucccagaacaucaccgaggaguucuaccagagcacgugcuccgccgucagcaagggcuaccucggggcccugcgcaccggcugguacaccuccgugaucaccaucgagcugagcaacaucaaggagaacaagugcaacgggaccgacgccaaggugaagcucaucaagcaggagcuggacaaguacaagaacgcggucacggaccugcagcuccugaugcaguccaccccggccgccggcagcggguccgccaucugcagcggcaucgcggugugcaaggugcugcaccucgagggcgaggucaacaagaucaagaacgcccugcuguccaccaacaaggccguggugagccucuccaacggggucagcgugcugaccuucaaggugcuggaccucaagaacuacaucgacaagcagcugcugcccauccucaacaagcaguccugcagcauccccaacaucgagacggucaucgaguuccagcagaagaacaaccggcugcuggagaucacccgcgaguucuccgugaacgccggcgugaccacccccgucagcacguacaugcucaccaacuccgagcugcugagccucaucaacgacaugccgaucaccaacgaccagaagaagcugaugagcaacaacgugcagaucgugcggcagcaguccuacagcaucaugugcaucaucaaggaggagguccuggccuacguggugcagcucccccuguacggggucaucgacacccccugcuggaagcugcacacgagcccccucugcaccaccaacaccaaggagggcuccaacaucugccugacgcgcaccgaccgggggugguacugcgacaacgcgggcuccgugagcuucuucccgcaggccgagaccugcaaggugcaguccaaccgcgucuucugcgacaccaugaacagccugacgcuccccuccgaggugaaccugugcaacaucgacaucuucaaccccaaguacgacugcaagaucaugaccagcaagaccgacgucuccagcuccgugaucaccagccugggcgccaucguguccugcuacgggaagacgaagugcaccgccagcaacaagaaccggggcaucaucaagaccuucuccaacgggugcgacuacgucagcaacaagggcguggacaccguguccgucggcaacacgcucuacugcgugaacaagcaggaggggcagagccuguacgugaagggcgagcccaucaucaacuucuacgacccgcuggucuuccccagcgacgaguucgacgccuccaucagccaggugaacgagaagaucaaccagucccucgcguucauccgcaagagcgacgagcugcugcacaacgugaacgucgggaaguccaccaccaacaucaugaucaccaccaucaucaucgugaucaucgugauccuccugcugcucaucgccgucggccuguuccuguacugcaaggcccggagcacgcccgugacccuguccaaggaccagcucagcgggaucaacaacaucgccuucuccaacugaggacuaguacuggcugcaucucccuuuccucuguccuccauccuucucccaggauggugaagggggaccugguacccagugauccccaccccaggauccuaaaucaugacuuaccugcuaauaaaaacucauuggaaaagugagaagaucuaaaaaaaaaaaaaaaaaaaaaaaaaaaaaaaaaaaaaaaaaaaaaaaaaaaaaaaaaaaaaaaaugcaucccccccccccccccccccccccccccccccaaaggcucuuuucagagccaccagaauu

SEQ ID NO: 14761 - RNA, 2010 nt, Artificial Sequence
  mRNA product Design b-5 comprising derived and/or modified sequence from HRSV(Memphis-37)__AIY60640.1__F_DSCav1_mut2 (opt2)
gggagacuccugucgggcggaaguaggaggaguagaguuuaaaaacaguacucuuuuuccgguucgggacguaguugaagcaacgacaagccggauaaccgcucuugagacaggaagcuuaccauggagcuccccauccucaagaccaacgccaucaccaccauccucgccgccgucacccucugcuucgccuccucccagaacaucaccgaggaguucuaccaguccaccugcuccgccgucuccaagggcuaccucggcgcccuccgcaccggcugguacaccuccgucaucaccaucgagcucuccaacaucaaggagaacaagugcaacggcaccgacgccaaggucaagcucaucaagcaggagcucgacaaguacaagaacgccgucaccgaccuccagcuccucaugcaguccacccccgccgccggcuccggcuccgccaucugcuccggcaucgccgucugcaagguccuccaccucgagggcgaggucaacaagaucaagaacgcccuccucuccaccaacaaggccgucgucucccucuccaacggcgucuccguccucaccuucaagguccucgaccucaagaacuacaucgacaagcagcuccuccccauccucaacaagcaguccugcuccauccccaacaucgagaccgucaucgaguuccagcagaagaacaaccgccuccucgagaucacccgcgaguucuccgucaacgccggcgucaccacccccgucuccaccuacaugcucaccaacuccgagcuccucucccucaucaacgacaugcccaucaccaacgaccagaagaagcucauguccaacaacguccagaucguccgccagcaguccuacuccaucaugugcaucaucaaggaggagguccucgccuacgucguccagcucccccucuacggcgucaucgacacccccugcuggaagcuccacaccuccccccucugcaccaccaacaccaaggagggcuccaacaucugccucacccgcaccgaccgcggcugguacugcgacaacgccggcuccgucuccuucuucccccaggccgagaccugcaagguccaguccaaccgcgucuucugcgacaccaugaacucccucacccuccccuccgaggucaaccucugcaacaucgacaucuucaaccccaaguacgacugcaagaucaugaccuccaagaccgacgucuccuccuccgucaucaccucccucggcgccaucgucuccugcuacggcaagaccaagugcaccgccuccaacaagaaccgcggcaucaucaagaccuucuccaacggcugcgacuacgucuccaacaagggcgucgacaccgucuccgucggcaacacccucuacugcgucaacaagcaggagggccagucccucuacgucaagggcgagcccaucaucaacuucuacgacccccucgucuuccccuccgacgaguucgacgccuccaucucccaggucaacgagaagaucaaccagucccucgccuucauccgcaaguccgacgagcuccuccacaacgucaacgucggcaaguccaccaccaacaucaugaucaccaccaucaucaucgucaucaucgucauccuccuccuccucaucgccgucggccucuuccucuacugcaaggcccgcuccacccccgucacccucuccaaggaccagcucuccggcaucaacaacaucgccuucuccaacugaggacuaguacuggcugcaucucccuuuccucuguccuccauccuucucccaggauggugaagggggaccugguacccagugauccccaccccaggauccuaaaucaugacuuaccugcuaauaaaaacucauuggaaaagugagaagaucuaaaaaaaaaaaaaaaaaaaaaaaaaaaaaaaaaaaaaaaaaaaaaaaaaaaaaaaaaaaaaaaaugcaucccccccccccccccccccccccccccccccaaaggcucuuuucagagccaccagaauu

SEQ ID NO: 14762 - RNA, 2010 nt, Artificial Sequence
  mRNA product Design b-5 comprising derived and/or modified sequence from HRSV(Memphis-37)__AIY60640.1__F_DSCav1_mut2 (opt3)
gggagacuccugucgggcggaaguaggaggaguagaguuuaaaaacaguacucuuuuuccgguucgggacguaguugaagcaacgacaagccggauaaccgcucuugagacaggaagcuuaccauggagcugcccauccucaagaccaacgccauuacaacuauacuugcugcagugacgcugugcuucgccagcucccagaauaucaccgaagaguuuuaccaaucuacauguucagcggucaguaaaggcuauuugggggcuuuaagaacuggaugguacaccagcguuauuacaaucgaacuguccaacauuaaggagaauaaaugcaacgguaccgacgccaaggugaaacuaaucaagcaggaacucgauaaguauaaaaaugcaguaacugaccugcagcuucugaugcagucuacuccugccgcuggcucggggucagcaauauguagcggaaucgccgugugcaaggucuugcaccucgagggcgaggugaacaaaauuaagaaugcucugcugaguaccaacaaagccguugugucccucucuaauggugucagcguguuaacguucaagguacuggaucuuaagaacuacaucgacaaacaauugcugccaauucuaaauaagcaguccuguucaaucccgaacauagaaacuguuauugaguuucagcagaaaaauaacaggcuccuggaaaucacccgggaguucagugugaaugcgggggucacaacucccgugagcaccuauaugcuuacaaacucugagcuguugucccucauuaacgauaugccuaucaccaaugaccaaaagaaacugaugucaaacaaugugcagaucguccgccagcagagcuacaguauuaugugcauaaucaaggaagagguuuuagcauaugugguacaacugccacucuacggagugauugauacgcccuguuggaaacuucauacuucuccucugugcacaaccaacacuaaggaaggcuccaauaucuguuugacacgaaccgaccguggcugguacugcgauaacgccgggagcgucucguuuuucccacaggcugagacguguaaggugcagucuaauagaguuuucugcgacaccaugaacucccuaacacugcccucagaagugaaucucugcaacauagauauuuucaauccuaaauaugacuguaagaucaugacaaguaaaaccgaugucagcuccucugugaucacaagccugggagccauuguaucaugcuacgguaagacuaaauguaccgcaaguaacaagaauaggggcaucauuaagacauuuuccaacgggugcgacuauguuagcaauaaaggaguggacaccgucucugugggcaacacucuuuacugugucaacaagcaagagggucagucacuguaugugaaaggggagccaauaaucaauuucuacgauccguugguuuuucccagugacgaauuugaugcuagcauuucccaggugaacgagaagaucaaucagucucucgccuuuauccggaaaucggacgaacuguuacacaacguaaaugucggaaagagcacgacaaacauuaugauaaccacuaucauuaucgugauuaucguuauacugcuacuccugaucgcggugggccuuuucuuguauugcaaggcccgcuccaccccugucacacugucaaaagaucaacucaguggcauuaauaacaucgcauucucuaauugaggacuaguacuggcugcaucucccuuuccucuguccuccauccuucucccaggauggugaagggggaccugguacccagugauccccaccccaggauccuaaaucaugacuuaccugcuaauaaaaacucauuggaaaagugagaagaucuaaaaaaaaaaaaaaaaaaaaaaaaaaaaaaaaaaaaaaaaaaaaaaaaaaaaaaaaaaaaaaaaugcaucccccccccccccccccccccccccccccccaaaggcucuuuucagagccaccagaauu

SEQ ID NO: 14763 - RNA, 2010 nt, Artificial Sequence
  mRNA product Design b-5 comprising derived and/or modified sequence from HRSV(Memphis-37)__AIY60640.1__F_DSCav1_mut2 (opt4)
gggagacuccugucgggcggaaguaggaggaguagaguuuaaaaacaguacucuuuuuccgguucgggacguaguugaagcaacgacaagccggauaaccgcucuugagacaggaagcuuaccauggagcugcccauccugaagaccaacgccaucaccaccauccuggccgccgugacccugugcuucgccagcagccagaacaucaccgaggaguucuaccagagcaccugcagcgccgugagcaagggcuaccugggcgcccugagaaccggcugguacaccagcgugaucaccaucgagcugagcaacaucaaggagaacaagugcaacggcaccgacgccaaggugaagcugaucaagcaggagcuggacaaguacaagaacgccgugaccgaccugcagcugcugaugcagagcacccccgccgccggcagcggcagcgccaucugcagcggcaucgccgugugcaaggugcugcaccuggagggcgaggugaacaagaucaagaacgcccugcugagcaccaacaaggccguggugagccugagcaacggcgugagcgugcugaccuucaaggugcuggaccugaagaacuacaucgacaagcagcugcugcccauccugaacaagcagagcugcagcauccccaacaucgagaccgugaucgaguuccagcagaagaacaacagacugcuggagaucaccagagaguucagcgugaacgccggcgugaccacccccgugagcaccuacaugcugaccaacagcgagcugcugagccugaucaacgacaugcccaucaccaacgaccagaagaagcugaugagcaacaacgugcagaucgugagacagcagagcuacagcaucaugugcaucaucaaggaggaggugcuggccuacguggugcagcugccccuguacggcgugaucgacacccccugcuggaagcugcacaccagcccccugugcaccaccaacaccaaggagggcagcaacaucugccugaccagaaccgacagaggcugguacugcgacaacgccggcagcgugagcuucuucccccaggccgagaccugcaaggugcagagcaacagaguguucugcgacaccaugaacagccugacccugcccagcgaggugaaccugugcaacaucgacaucuucaaccccaaguacgacugcaagaucaugaccagcaagaccgacgugagcagcagcgugaucaccagccugggcgccaucgugagcugcuacggcaagaccaagugcaccgccagcaacaagaacagaggcaucaucaagaccuucagcaacggcugcgacuacgugagcaacaagggcguggacaccgugagcgugggcaacacccuguacugcgugaacaagcaggagggccagagccuguacgugaagggcgagcccaucaucaacuucuacgacccccugguguuccccagcgacgaguucgacgccagcaucagccaggugaacgagaagaucaaccagagccuggccuucaucagaaagagcgacgagcugcugcacaacgugaacgugggcaagagcaccaccaacaucaugaucaccaccaucaucaucgugaucaucgugauccugcugcugcugaucgccgugggccuguuccuguacugcaaggccagaagcacccccgugacccugagcaaggaccagcugagcggcaucaacaacaucgccuucagcaacugaggacuaguacuggcugcaucucccuuuccucuguccuccauccuucucccaggauggugaagggggaccugguacccagugauccccaccccaggauccuaaaucaugacuuaccugcuaauaaaaacucauuggaaaagugagaagaucuaaaaaaaaaaaaaaaaaaaaaaaaaaaaaaaaaaaaaaaaaaaaaaaaaaaaaaaaaaaaaaaaugcaucccccccccccccccccccccccccccccccaaaggcucuuuucagagccaccagaauu

SEQ ID NO: 14764 - RNA, 2010 nt, Artificial Sequence
  mRNA product Design b-5 comprising derived and/or modified sequence from HRSV(Memphis-37)__AIY60640.1__F_DSCav1_mut2 (opt5)
gggagacuccugucgggcggaaguaggaggaguagaguuuaaaaacaguacucuuuuuccgguucgggacguaguugaagcaacgacaagccggauaaccgcucuugagacaggaagcuuaccauggagcugcccauccucaagaccaacgccauuacaacgauccuggcugccgugacccuuugcuucgcgagcucccagaauauuacagaagaguuuuaccaaucuaccuguagcgcugucuccaaaggcuaucugggggcccucagaacaggaugguacaccucuguuaucacaauugaacugagcaacaucaaggagaauaaaugcaacggcaccgacgccaaggugaaacuuaucaagcaggaacuggauaaguauaaaaaugcugugacggaccuccagcugcugaugcaguccaccccugccgcugggucuggaagcgccauuuguuccggcaucgcggucugcaaggugcuccaccuggagggggagguuaacaaaauuaagaaugcccuucugagcacaaacaaagcuguggucucucucuccaauggagugagcguucugaccuucaaggugcuugaucugaagaacuacaucgacaaacaacuccugccgauucugaauaagcagucuuguuccauccccaacauugaaacagucaucgaguuucagcagaaaaauaaccggcuccuggaaaucacccgcgaguucagcgugaaugccggcgugacgacaccugucucuaccuauaugcuuacaaacuccgagcugcucagccugauuaacgauaugcccaucaccaaugaccaaaagaaacuuauguccaacaauguucagauugugagacagcagucuuacagcaucaugugcauuaucaaggaagaggugcuggcuuaugucgugcaacucccucuguacggcguuaucgauacccccuguuggaaacugcauacauccccucucugcacgaccaacacaaaggaagggagcaauauuugucugacccggacagaccgcggaugguacugcgauaacgccggcucuguguccuuuuucccgcaggcggagaccuguaagguccagagcaauagaguguuuugcgacacgaugaacucucuuacacugcccagcgaaguuaaucucugcaacaucgauauuuucaauccuaaauaugacuguaagaucaugaccuccaaaaccgaugugucuagcuccgucauuacaagccugggggccaucgugucuugcuacggaaagaccaaauguacagcuuccaacaagaaucggggcaucauuaagacguuuagcaacgggugcgacuaugucucuaauaaaggaguggacaccguuuccgugggcaacacacuuuacugugucaacaagcaagagggccagagccuguaugugaaaggggagcccaucauuaauuucuacgauccucucguuuuucccuccgacgaguucgaugccucuaucagccaggugaacgaaaagauuaaucagucccuggcuuuuauccgcaaaucugacgaacugcuccacaacgucaaugugggaaagagcaccacaaacauuaugaucaccacgaucauuaucgugauuaucguuauucugcuucugcucaucgccgucggccuguuccuguauugcaaggccagauccaccccggugacacuuagcaaagaucaacucucugggaucaauaacauugcuuucuccaauugaggacuaguacuggcugcaucucccuuuccucuguccuccauccuucucccaggauggugaagggggaccugguacccagugauccccaccccaggauccuaaaucaugacuuaccugcuaauaaaaacucauuggaaaagugagaagaucuaaaaaaaaaaaaaaaaaaaaaaaaaaaaaaaaaaaaaaaaaaaaaaaaaaaaaaaaaaaaaaaaugcaucccccccccccccccccccccccccccccccaaaggcucuuuucagagccaccagaauu

SEQ ID NO: 14765 - RNA, 2010 nt, Artificial Sequence
  mRNA product Design b-5 comprising derived and/or modified sequence from HRSV(Memphis-37)__AIY60640.1__F_DSCav1_mut2 (opt6)
gggagacuccugucgggcggaaguaggaggaguagaguuuaaaaacaguacucuuuuuccgguucgggacguaguugaagcaacgacaagccggauaaccgcucuugagacaggaagcuuaccauggagcuuccaauauuaaaaacaaacgcuauaacaacuauacucgcagcaguuacacucugcuucgcauccucacaaaacauaacugaagaauuuuaccaauccacuugcucagccguaucaaaaggauaucuaggagcacuuagaaccggaugguauacaucagugauaacaauagaacuaagcaacauaaaagaaaacaagugcaacggaacugacgcaaaagucaaacuaaucaaacaagaacuagacaaauacaaaaacgcaguaacagaccuacaauuacuaaugcaaucaacaccagcagcaggaucagguucagccauaugcucagguaucgcuguaugcaaaguccuucaccuagaaggugaaguaaacaaaauuaaaaacgcccuacucaguacaaauaaagcugucguaaguuuaucaaacggaguaucaguccuuacauucaaaguauuagaccuaaaaaauuauauagacaaacaauuacuaccaauacucaacaaacaaucaugcucaauaccaaauauagaaaccguaauagaauuucagcaaaaaaauaacagauuacuagaaauaaccagagaauuuucagucaacgcaggagucacaacacccgucucaaccuacaugcuaaccaacucagaacuucuaucucuuaucaacgacaugcccauaaccaaugaucaaaaaaaauuaaugucuaauaacguucaaauaguaagacaacaaucauacucaauaaugugcauaaucaaagaagaaguauuagcauacguaguacaacuaccccuauauggaguaauagacacacccugcuggaaacuacacacauccccccucuguacaacaaacacuaaagaaggaucaaacauuugccuaacaagaacagaccgcggaugguacugcgacaacgcaggcuccguaucuuucuuuccacaagccgaaacuuguaaaguucaaucaaacagaguauuuugcgauacaaugaacuccuuaacauuaccuucagaaguaaaccuaugcaacauagacaucuucaacccaaaauacgacugcaaaauaaugaccucaaaaacagacguauccucaucagucauaaccuccuuaggagcaauaguaucauguuacggaaaaacaaaauguacagcaucaaauaaaaauagaggaauaauaaaaaccuucuccaacggaugcgacuacguauccaauaaaggaguagacaccguaucaguaggaaacacacuauacuguguaaacaaacaagaaggccaaucucuauauguaaaaggcgaaccaaucauaaauuuuuacgacccacuugucuuccccuccgacgaauuugacgcaagcauaucacaaguaaacgaaaaaaucaaccaaagccuagccuucauaaggaaaucugacgaauuacuucauaacguaaauguuggaaaaucaaccacaaacauaaugauaaccaccaucauaauuguaauaauaguaauacuacuacuacuaauugcaguaggacucuuccuauauugcaaagcucgcucaacaccaguuaccuuaucaaaagaccaacuaucuggaauaaacaacauagccuuuuccaacuaaggacuaguacuggcugcaucucccuuuccucuguccuccauccuucucccaggauggugaagggggaccugguacccagugauccccaccccaggauccuaaaucaugacuuaccugcuaauaaaaacucauuggaaaagugagaagaucuaaaaaaaaaaaaaaaaaaaaaaaaaaaaaaaaaaaaaaaaaaaaaaaaaaaaaaaaaaaaaaaaugcaucccccccccccccccccccccccccccccccaaaggcucuuuucagagccaccagaauu

SEQ ID NO: 14766 - RNA, 2010 nt, Artificial Sequence
  mRNA product Design b-5 comprising derived and/or modified sequence from HRSV(Memphis-37)__AIY60640.1__F_DSCav1_mut2 (opt11)
gggagacuccugucgggcggaaguaggaggaguagaguuuaaaaacaguacucuuuuuccgguucgggacguaguugaagcaacgacaagccggauaaccgcucuugagacaggaagcuuaccauggaacucccaauccuaaaaaccaacgccaucaccaccauccucgccgcugucaccuuaugcuuugccagcagccaaaacaucaccgaagaauuuuaccaaucaacaugcuccgccgucucaaaaggauaccucggcgcccuacgcaccggcugguacacaagcgucauaaccaucgagcucuccaacaucaaggaaaacaaaugcaauggaaccgacgccaaagucaaacuaaucaaacaagaacuagacaaguacaagaacgcagucaccgaccuccaacuccucaugcaguccacccccgcagcaggcucuggcucagcaauaugcuccggcaucgcugucugcaaaguccuacaccucgaaggcgaagucaacaaaaucaaaaacgcccuacuguccacaaacaaagccgucgucucccuauccaacggcgucucgguccuaaccuuuaagguucucgaucucaaaaauuacauagacaaacaacuacuccccauccucaacaaacaaucuugcucaauccccaacaucgaaaccgucaucgaguuccaacagaaaaacaacagacuacucgaaaucacccgcgaguucucagucaacgcgggcgucacaacacccgucagcaccuacaugcuaaccaacuccgaacuccucagccucauuaacgacaugcccaucaccaacgaccaaaagaaacuuauguccaacaacguucaaaucguccgccaacaauccuacuccaucaugugcaucaucaaagaagaaguacucgccuacguaguccaacugccccucuacggcgucaucgauaccccaugcuggaaacuacacaccagcccccucugcaccaccaacaccaaagaaggcuccaauaucugcuuaacccgcacagaccguggcugguacugcgauaacgccggcuccgucuccuucuucccccaagcagaaaccugcaaaguacaauccaaccgagucuucugugacaccaugaacucccuaacccuuccaucagaagucaaccucugcaacaucgacaucuucaaccccaaguacgacugcaaaaucaugacauccaaaaccgaugucucaagcagcgucauaaccucacucggcgcuaucguaagcugcuacggcaaaaccaaaugcaccgcaucaaacaaaaaccgcggaaucaucaaaaccuucagcaacggaugcgacuacguuuccaacaaaggcguagacaccgucuccgucggaaacacccucuacugcguaaacaaacaggaaggccaaucccucuacgucaaaggcgaacccaucauaaacuucuacgauccccuugucuucccguccgaugaguucgacgccuccaucucgcaagucaacgaaaagauaaaccaaucacuagcauucauccguaaauccgacgaacuccuccacaacgucaacgucggaaaauccaccaccaacauaaugaucaccaccauaaucaucgucaucaucguaauacuauuacuccucauagccgucggccucuuccuauauugcaaagcccgaucaacccccguaacccuuucuaaagaccaacuguccggaaucaacaacaucgcuuucagcaacugaggacuaguacuggcugcaucucccuuuccucuguccuccauccuucucccaggauggugaagggggaccugguacccagugauccccaccccaggauccuaaaucaugacuuaccugcuaauaaaaacucauuggaaaagugagaagaucuaaaaaaaaaaaaaaaaaaaaaaaaaaaaaaaaaaaaaaaaaaaaaaaaaaaaaaaaaaaaaaaaugcaucccccccccccccccccccccccccccccccaaaggcucuuuucagagccaccagaauu

SEQ ID NO: 14767 - RNA, 1916 nt, Artificial Sequence
  mRNA product Design c-1 comprising derived and/or modified sequence from HRSV(Memphis-37)__AIY60640.1__F_DSCav1_mut2 (opt1)
gggagaguccgcucagccagguugcagaagcggcuuagcguguguccuaaucuucucucugcguguagguaggccugugccgcaaacaagcuuaccauggagcugcccauccucaagaccaacgccaucaccacgauccuggccgcggugacccugugcuucgccagcucccagaacaucaccgaggaguucuaccagagcacgugcuccgccgucagcaagggcuaccucggcgcccugcgcaccgggugguacaccagcgugaucaccaucgagcuguccaacaucaaggagaacaagugcaacggcaccgacgccaaggugaagcucaucaagcaggagcuggacaaguacaagaacgcggucacggaccugcagcuccugaugcagagcaccccggccgccggcuccgggagcgcgaucugcuccggcaucgccgucugcaaggugcugcaccucgagggcgaggugaacaagaucaagaacgcccugcuguccaccaacaaggccgucgugagccucuccaacggggugagcguccugaccuucaaggugcuggaccucaagaacuacaucgacaagcagcugcugcccauccugaacaagcagagcugcuccauccccaacaucgagaccgucaucgaguuccagcagaagaacaaccgccuccuggagaucacgcgggaguucagcgugaacgcgggcgugaccacccccgucuccaccuacaugcugacgaacagcgagcuccugucccugaucaacgacaugccgaucaccaacgaccagaagaagcucaugagcaacaacgugcagaucgugcgccagcaguccuacagcaucaugugcaucaucaaggaggagguccuggccuacguggugcagcugccccucuacggggucaucgacacccccugcuggaagcugcacaccagcccccugugcacgaccaacaccaaggagggcuccaacaucugccucacccggacggaccgcgggugguacugcgacaacgccggcagcguguccuucuucccgcaggccgagaccugcaagguccagagcaaccggguguucugcgacaccaugaacucccugacccugcccagcgaggugaaccucugcaacaucgacaucuucaaccccaaguacgacugcaagaucaugacguccaagaccgacgucagcuccagcgugaucaccucccugggcgccaucgugagcugcuacgggaagaccaagugcacggcgagcaacaagaaccgcggcaucaucaagaccuucuccaacgggugcgacuacgucagcaacaagggcguggacaccguguccgucggcaacacccuguacugcgugaacaagcaggagggccagagccucuacgugaagggggagcccaucaucaacuucuacgacccgcuggucuuccccuccgacgaguucgacgccagcaucucccaggugaacgagaagaucaaccagagccuggccuucauccggaaguccgacgagcuccugcacaacgugaacgucggcaagagcaccacgaacaucaugaucaccaccaucaucaucgugaucaucgugauccugcugcuccugaucgccgucgggcuguuccucuacugcaaggcccgcuccacccccgugacgcugagcaaggaccagcuguccgggaucaacaacaucgcguucagcaacugaggacuaguguccaccugucccuccugggcugcuggauugucucguuuuccugccaaauaaacaggaucagcgcuuuacagaucuaaaaaaaaaaaaaaaaaaaaaaaaaaaaaaaaaaaaaaaaaaaaaaaaaaaaaaaaaaaaaaaaugcaucccccccccccccccccccccccccccccccaaaggcucuuuucagagccaccagaauu

SEQ ID NO: 14768 - RNA, 1916 nt, Artificial Sequence
  mRNA product Design c-1 comprising derived and/or modified sequence from HRSV(Memphis-37)__AIY60640.1__F_DSCav1_mut2 (opt1)
gggagaguccgcucagccagguugcagaagcggcuuagcguguguccuaaucuucucucugcguguagguaggccugugccgcaaacaagcuuaccauggagcugcccauccucaagaccaacgccaucaccacgauccuggccgcggugacccugugcuucgccagcucccagaacaucaccgaggaguucuaccagagcacgugcuccgccgucagcaagggcuaccucggggcccugcgcaccggcugguacaccuccgugaucaccaucgagcugagcaacaucaaggagaacaagugcaacgggaccgacgccaaggugaagcucaucaagcaggagcuggacaaguacaagaacgcggucacggaccugcagcuccugaugcaguccaccccggccgccggcagcggguccgccaucugcagcggcaucgcggugugcaaggugcugcaccucgagggcgaggucaacaagaucaagaacgcccugcuguccaccaacaaggccguggugagccucuccaacggggucagcgugcugaccuucaaggugcuggaccucaagaacuacaucgacaagcagcugcugcccauccucaacaagcaguccugcagcauccccaacaucgagacggucaucgaguuccagcagaagaacaaccggcugcuggagaucacccgcgaguucuccgugaacgccggcgugaccacccccgucagcacguacaugcucaccaacuccgagcugcugagccucaucaacgacaugccgaucaccaacgaccagaagaagcugaugagcaacaacgugcagaucgugcggcagcaguccuacagcaucaugugcaucaucaaggaggagguccuggccuacguggugcagcucccccuguacggggucaucgacacccccugcuggaagcugcacacgagcccccucugcaccaccaacaccaaggagggcuccaacaucugccugacgcgcaccgaccgggggugguacugcgacaacgcgggcuccgugagcuucuucccgcaggccgagaccugcaaggugcaguccaaccgcgucuucugcgacaccaugaacagccugacgcuccccuccgaggugaaccugugcaacaucgacaucuucaaccccaaguacgacugcaagaucaugaccagcaagaccgacgucuccagcuccgugaucaccagccugggcgccaucguguccugcuacgggaagacgaagugcaccgccagcaacaagaaccggggcaucaucaagaccuucuccaacgggugcgacuacgucagcaacaagggcguggacaccguguccgucggcaacacgcucuacugcgugaacaagcaggaggggcagagccuguacgugaagggcgagcccaucaucaacuucuacgacccgcuggucuuccccagcgacgaguucgacgccuccaucagccaggugaacgagaagaucaaccagucccucgcguucauccgcaagagcgacgagcugcugcacaacgugaacgucgggaaguccaccaccaacaucaugaucaccaccaucaucaucgugaucaucgugauccuccugcugcucaucgccgucggccuguuccuguacugcaaggcccggagcacgcccgugacccuguccaaggaccagcucagcgggaucaacaacaucgccuucuccaacugaggacuaguguccaccugucccuccugggcugcuggauugucucguuuuccugccaaauaaacaggaucagcgcuuuacagaucuaaaaaaaaaaaaaaaaaaaaaaaaaaaaaaaaaaaaaaaaaaaaaaaaaaaaaaaaaaaaaaaaugcaucccccccccccccccccccccccccccccccaaaggcucuuuucagagccaccagaauu

SEQ ID NO: 14769 - RNA, 1916 nt, Artificial Sequence
  mRNA product Design c-1 comprising derived and/or modified sequence from HRSV(Memphis-37)__AIY60640.1__F_DSCav1_mut2 (opt2)
gggagaguccgcucagccagguugcagaagcggcuuagcguguguccuaaucuucucucugcguguagguaggccugugccgcaaacaagcuuaccauggagcuccccauccucaagaccaacgccaucaccaccauccucgccgccgucacccucugcuucgccuccucccagaacaucaccgaggaguucuaccaguccaccugcuccgccgucuccaagggcuaccucggcgcccuccgcaccggcugguacaccuccgucaucaccaucgagcucuccaacaucaaggagaacaagugcaacggcaccgacgccaaggucaagcucaucaagcaggagcucgacaaguacaagaacgccgucaccgaccuccagcuccucaugcaguccacccccgccgccggcuccggcuccgccaucugcuccggcaucgccgucugcaagguccuccaccucgagggcgaggucaacaagaucaagaacgcccuccucuccaccaacaaggccgucgucucccucuccaacggcgucuccguccucaccuucaagguccucgaccucaagaacuacaucgacaagcagcuccuccccauccucaacaagcaguccugcuccauccccaacaucgagaccgucaucgaguuccagcagaagaacaaccgccuccucgagaucacccgcgaguucuccgucaacgccggcgucaccacccccgucuccaccuacaugcucaccaacuccgagcuccucucccucaucaacgacaugcccaucaccaacgaccagaagaagcucauguccaacaacguccagaucguccgccagcaguccuacuccaucaugugcaucaucaaggaggagguccucgccuacgucguccagcucccccucuacggcgucaucgacacccccugcuggaagcuccacaccuccccccucugcaccaccaacaccaaggagggcuccaacaucugccucacccgcaccgaccgcggcugguacugcgacaacgccggcuccgucuccuucuucccccaggccgagaccugcaagguccaguccaaccgcgucuucugcgacaccaugaacucccucacccuccccuccgaggucaaccucugcaacaucgacaucuucaaccccaaguacgacugcaagaucaugaccuccaagaccgacgucuccuccuccgucaucaccucccucggcgccaucgucuccugcuacggcaagaccaagugcaccgccuccaacaagaaccgcggcaucaucaagaccuucuccaacggcugcgacuacgucuccaacaagggcgucgacaccgucuccgucggcaacacccucuacugcgucaacaagcaggagggccagucccucuacgucaagggcgagcccaucaucaacuucuacgacccccucgucuuccccuccgacgaguucgacgccuccaucucccaggucaacgagaagaucaaccagucccucgccuucauccgcaaguccgacgagcuccuccacaacgucaacgucggcaaguccaccaccaacaucaugaucaccaccaucaucaucgucaucaucgucauccuccuccuccucaucgccgucggccucuuccucuacugcaaggcccgcuccacccccgucacccucuccaaggaccagcucuccggcaucaacaacaucgccuucuccaacugaggacuaguguccaccugucccuccugggcugcuggauugucucguuuuccugccaaauaaacaggaucagcgcuuuacagaucuaaaaaaaaaaaaaaaaaaaaaaaaaaaaaaaaaaaaaaaaaaaaaaaaaaaaaaaaaaaaaaaaugcaucccccccccccccccccccccccccccccccaaaggcucuuuucagagccaccagaauu

SEQ ID NO: 14770 - RNA, 1916 nt, Artificial Sequence
  mRNA product Design c-1 comprising derived and/or modified sequence from HRSV(Memphis-37)__AIY60640.1__F_DSCav1_mut2 (opt3)
gggagaguccgcucagccagguugcagaagcggcuuagcguguguccuaaucuucucucugcguguagguaggccugugccgcaaacaagcuuaccauggagcugcccauccucaagaccaacgccauuacaacuauacuugcugcagugacgcugugcuucgccagcucccagaauaucaccgaagaguuuuaccaaucuacauguucagcggucaguaaaggcuauuugggggcuuuaagaacuggaugguacaccagcguuauuacaaucgaacuguccaacauuaaggagaauaaaugcaacgguaccgacgccaaggugaaacuaaucaagcaggaacucgauaaguauaaaaaugcaguaacugaccugcagcuucugaugcagucuacuccugccgcuggcucggggucagcaauauguagcggaaucgccgugugcaaggucuugcaccucgagggcgaggugaacaaaauuaagaaugcucugcugaguaccaacaaagccguugugucccucucuaauggugucagcguguuaacguucaagguacuggaucuuaagaacuacaucgacaaacaauugcugccaauucuaaauaagcaguccuguucaaucccgaacauagaaacuguuauugaguuucagcagaaaaauaacaggcuccuggaaaucacccgggaguucagugugaaugcgggggucacaacucccgugagcaccuauaugcuuacaaacucugagcuguugucccucauuaacgauaugccuaucaccaaugaccaaaagaaacugaugucaaacaaugugcagaucguccgccagcagagcuacaguauuaugugcauaaucaaggaagagguuuuagcauaugugguacaacugccacucuacggagugauugauacgcccuguuggaaacuucauacuucuccucugugcacaaccaacacuaaggaaggcuccaauaucuguuugacacgaaccgaccguggcugguacugcgauaacgccgggagcgucucguuuuucccacaggcugagacguguaaggugcagucuaauagaguuuucugcgacaccaugaacucccuaacacugcccucagaagugaaucucugcaacauagauauuuucaauccuaaauaugacuguaagaucaugacaaguaaaaccgaugucagcuccucugugaucacaagccugggagccauuguaucaugcuacgguaagacuaaauguaccgcaaguaacaagaauaggggcaucauuaagacauuuuccaacgggugcgacuauguuagcaauaaaggaguggacaccgucucugugggcaacacucuuuacugugucaacaagcaagagggucagucacuguaugugaaaggggagccaauaaucaauuucuacgauccguugguuuuucccagugacgaauuugaugcuagcauuucccaggugaacgagaagaucaaucagucucucgccuuuauccggaaaucggacgaacuguuacacaacguaaaugucggaaagagcacgacaaacauuaugauaaccacuaucauuaucgugauuaucguuauacugcuacuccugaucgcggugggccuuuucuuguauugcaaggcccgcuccaccccugucacacugucaaaagaucaacucaguggcauuaauaacaucgcauucucuaauugaggacuaguguccaccugucccuccugggcugcuggauugucucguuuuccugccaaauaaacaggaucagcgcuuuacagaucuaaaaaaaaaaaaaaaaaaaaaaaaaaaaaaaaaaaaaaaaaaaaaaaaaaaaaaaaaaaaaaaaugcaucccccccccccccccccccccccccccccccaaaggcucuuuucagagccaccagaauu

SEQ ID NO: 14771 - RNA, 1916 nt, Artificial Sequence
  mRNA product Design c-1 comprising derived and/or modified sequence from HRSV(Memphis-37)__AIY60640.1__F_DSCav1_mut2 (opt4)
gggagaguccgcucagccagguugcagaagcggcuuagcguguguccuaaucuucucucugcguguagguaggccugugccgcaaacaagcuuaccauggagcugcccauccugaagaccaacgccaucaccaccauccuggccgccgugacccugugcuucgccagcagccagaacaucaccgaggaguucuaccagagcaccugcagcgccgugagcaagggcuaccugggcgcccugagaaccggcugguacaccagcgugaucaccaucgagcugagcaacaucaaggagaacaagugcaacggcaccgacgccaaggugaagcugaucaagcaggagcuggacaaguacaagaacgccgugaccgaccugcagcugcugaugcagagcacccccgccgccggcagcggcagcgccaucugcagcggcaucgccgugugcaaggugcugcaccuggagggcgaggugaacaagaucaagaacgcccugcugagcaccaacaaggccguggugagccugagcaacggcgugagcgugcugaccuucaaggugcuggaccugaagaacuacaucgacaagcagcugcugcccauccugaacaagcagagcugcagcauccccaacaucgagaccgugaucgaguuccagcagaagaacaacagacugcuggagaucaccagagaguucagcgugaacgccggcgugaccacccccgugagcaccuacaugcugaccaacagcgagcugcugagccugaucaacgacaugcccaucaccaacgaccagaagaagcugaugagcaacaacgugcagaucgugagacagcagagcuacagcaucaugugcaucaucaaggaggaggugcuggccuacguggugcagcugccccuguacggcgugaucgacacccccugcuggaagcugcacaccagcccccugugcaccaccaacaccaaggagggcagcaacaucugccugaccagaaccgacagaggcugguacugcgacaacgccggcagcgugagcuucuucccccaggccgagaccugcaaggugcagagcaacagaguguucugcgacaccaugaacagccugacccugcccagcgaggugaaccugugcaacaucgacaucuucaaccccaaguacgacugcaagaucaugaccagcaagaccgacgugagcagcagcgugaucaccagccugggcgccaucgugagcugcuacggcaagaccaagugcaccgccagcaacaagaacagaggcaucaucaagaccuucagcaacggcugcgacuacgugagcaacaagggcguggacaccgugagcgugggcaacacccuguacugcgugaacaagcaggagggccagagccuguacgugaagggcgagcccaucaucaacuucuacgacccccugguguuccccagcgacgaguucgacgccagcaucagccaggugaacgagaagaucaaccagagccuggccuucaucagaaagagcgacgagcugcugcacaacgugaacgugggcaagagcaccaccaacaucaugaucaccaccaucaucaucgugaucaucgugauccugcugcugcugaucgccgugggccuguuccuguacugcaaggccagaagcacccccgugacccugagcaaggaccagcugagcggcaucaacaacaucgccuucagcaacugaggacuaguguccaccugucccuccugggcugcuggauugucucguuuuccugccaaauaaacaggaucagcgcuuuacagaucuaaaaaaaaaaaaaaaaaaaaaaaaaaaaaaaaaaaaaaaaaaaaaaaaaaaaaaaaaaaaaaaaugcaucccccccccccccccccccccccccccccccaaaggcucuuuucagagccaccagaauu

SEQ ID NO: 14772 - RNA, 1916 nt, Artificial Sequence
  mRNA product Design c-1 comprising derived and/or modified sequence from HRSV(Memphis-37)__AIY60640.1__F_DSCav1_mut2 (opt5)
gggagaguccgcucagccagguugcagaagcggcuuagcguguguccuaaucuucucucugcguguagguaggccugugccgcaaacaagcuuaccauggagcugcccauccucaagaccaacgccauuacaacgauccuggcugccgugacccuuugcuucgcgagcucccagaauauuacagaagaguuuuaccaaucuaccuguagcgcugucuccaaaggcuaucugggggcccucagaacaggaugguacaccucuguuaucacaauugaacugagcaacaucaaggagaauaaaugcaacggcaccgacgccaaggugaaacuuaucaagcaggaacuggauaaguauaaaaaugcugugacggaccuccagcugcugaugcaguccaccccugccgcugggucuggaagcgccauuuguuccggcaucgcggucugcaaggugcuccaccuggagggggagguuaacaaaauuaagaaugcccuucugagcacaaacaaagcuguggucucucucuccaauggagugagcguucugaccuucaaggugcuugaucugaagaacuacaucgacaaacaacuccugccgauucugaauaagcagucuuguuccauccccaacauugaaacagucaucgaguuucagcagaaaaauaaccggcuccuggaaaucacccgcgaguucagcgugaaugccggcgugacgacaccugucucuaccuauaugcuuacaaacuccgagcugcucagccugauuaacgauaugcccaucaccaaugaccaaaagaaacuuauguccaacaauguucagauugugagacagcagucuuacagcaucaugugcauuaucaaggaagaggugcuggcuuaugucgugcaacucccucuguacggcguuaucgauacccccuguuggaaacugcauacauccccucucugcacgaccaacacaaaggaagggagcaauauuugucugacccggacagaccgcggaugguacugcgauaacgccggcucuguguccuuuuucccgcaggcggagaccuguaagguccagagcaauagaguguuuugcgacacgaugaacucucuuacacugcccagcgaaguuaaucucugcaacaucgauauuuucaauccuaaauaugacuguaagaucaugaccuccaaaaccgaugugucuagcuccgucauuacaagccugggggccaucgugucuugcuacggaaagaccaaauguacagcuuccaacaagaaucggggcaucauuaagacguuuagcaacgggugcgacuaugucucuaauaaaggaguggacaccguuuccgugggcaacacacuuuacugugucaacaagcaagagggccagagccuguaugugaaaggggagcccaucauuaauuucuacgauccucucguuuuucccuccgacgaguucgaugccucuaucagccaggugaacgaaaagauuaaucagucccuggcuuuuauccgcaaaucugacgaacugcuccacaacgucaaugugggaaagagcaccacaaacauuaugaucaccacgaucauuaucgugauuaucguuauucugcuucugcucaucgccgucggccuguuccuguauugcaaggccagauccaccccggugacacuuagcaaagaucaacucucugggaucaauaacauugcuuucuccaauugaggacuaguguccaccugucccuccugggcugcuggauugucucguuuuccugccaaauaaacaggaucagcgcuuuacagaucuaaaaaaaaaaaaaaaaaaaaaaaaaaaaaaaaaaaaaaaaaaaaaaaaaaaaaaaaaaaaaaaaugcaucccccccccccccccccccccccccccccccaaaggcucuuuucagagccaccagaauu

SEQ ID NO: 14773 - RNA, 1916 nt, Artificial Sequence
  mRNA product Design c-1 comprising derived and/or modified sequence from HRSV(Memphis-37)__AIY60640.1__F_DSCav1_mut2 (opt6)
gggagaguccgcucagccagguugcagaagcggcuuagcguguguccuaaucuucucucugcguguagguaggccugugccgcaaacaagcuuaccauggagcuuccaauauuaaaaacaaacgcuauaacaacuauacucgcagcaguuacacucugcuucgcauccucacaaaacauaacugaagaauuuuaccaauccacuugcucagccguaucaaaaggauaucuaggagcacuuagaaccggaugguauacaucagugauaacaauagaacuaagcaacauaaaagaaaacaagugcaacggaacugacgcaaaagucaaacuaaucaaacaagaacuagacaaauacaaaaacgcaguaacagaccuacaauuacuaaugcaaucaacaccagcagcaggaucagguucagccauaugcucagguaucgcuguaugcaaaguccuucaccuagaaggugaaguaaacaaaauuaaaaacgcccuacucaguacaaauaaagcugucguaaguuuaucaaacggaguaucaguccuuacauucaaaguauuagaccuaaaaaauuauauagacaaacaauuacuaccaauacucaacaaacaaucaugcucaauaccaaauauagaaaccguaauagaauuucagcaaaaaaauaacagauuacuagaaauaaccagagaauuuucagucaacgcaggagucacaacacccgucucaaccuacaugcuaaccaacucagaacuucuaucucuuaucaacgacaugcccauaaccaaugaucaaaaaaaauuaaugucuaauaacguucaaauaguaagacaacaaucauacucaauaaugugcauaaucaaagaagaaguauuagcauacguaguacaacuaccccuauauggaguaauagacacacccugcuggaaacuacacacauccccccucuguacaacaaacacuaaagaaggaucaaacauuugccuaacaagaacagaccgcggaugguacugcgacaacgcaggcuccguaucuuucuuuccacaagccgaaacuuguaaaguucaaucaaacagaguauuuugcgauacaaugaacuccuuaacauuaccuucagaaguaaaccuaugcaacauagacaucuucaacccaaaauacgacugcaaaauaaugaccucaaaaacagacguauccucaucagucauaaccuccuuaggagcaauaguaucauguuacggaaaaacaaaauguacagcaucaaauaaaaauagaggaauaauaaaaaccuucuccaacggaugcgacuacguauccaauaaaggaguagacaccguaucaguaggaaacacacuauacuguguaaacaaacaagaaggccaaucucuauauguaaaaggcgaaccaaucauaaauuuuuacgacccacuugucuuccccuccgacgaauuugacgcaagcauaucacaaguaaacgaaaaaaucaaccaaagccuagccuucauaaggaaaucugacgaauuacuucauaacguaaauguuggaaaaucaaccacaaacauaaugauaaccaccaucauaauuguaauaauaguaauacuacuacuacuaauugcaguaggacucuuccuauauugcaaagcucgcucaacaccaguuaccuuaucaaaagaccaacuaucuggaauaaacaacauagccuuuuccaacuaaggacuaguguccaccugucccuccugggcugcuggauugucucguuuuccugccaaauaaacaggaucagcgcuuuacagaucuaaaaaaaaaaaaaaaaaaaaaaaaaaaaaaaaaaaaaaaaaaaaaaaaaaaaaaaaaaaaaaaaugcaucccccccccccccccccccccccccccccccaaaggcucuuuucagagccaccagaauu

SEQ ID NO: 14774 - RNA, 1916 nt, Artificial Sequence
  mRNA product Design c-1 comprising derived and/or modified sequence from HRSV(Memphis-37)__AIY60640.1__F_DSCav1_mut2 (opt11)
gggagaguccgcucagccagguugcagaagcggcuuagcguguguccuaaucuucucucugcguguagguaggccugugccgcaaacaagcuuaccauggaacucccaauccuaaaaaccaacgccaucaccaccauccucgccgcugucaccuuaugcuuugccagcagccaaaacaucaccgaagaauuuuaccaaucaacaugcuccgccgucucaaaaggauaccucggcgcccuacgcaccggcugguacacaagcgucauaaccaucgagcucuccaacaucaaggaaaacaaaugcaauggaaccgacgccaaagucaaacuaaucaaacaagaacuagacaaguacaagaacgcagucaccgaccuccaacuccucaugcaguccacccccgcagcaggcucuggcucagcaauaugcuccggcaucgcugucugcaaaguccuacaccucgaaggcgaagucaacaaaaucaaaaacgcccuacuguccacaaacaaagccgucgucucccuauccaacggcgucucgguccuaaccuuuaagguucucgaucucaaaaauuacauagacaaacaacuacuccccauccucaacaaacaaucuugcucaauccccaacaucgaaaccgucaucgaguuccaacagaaaaacaacagacuacucgaaaucacccgcgaguucucagucaacgcgggcgucacaacacccgucagcaccuacaugcuaaccaacuccgaacuccucagccucauuaacgacaugcccaucaccaacgaccaaaagaaacuuauguccaacaacguucaaaucguccgccaacaauccuacuccaucaugugcaucaucaaagaagaaguacucgccuacguaguccaacugccccucuacggcgucaucgauaccccaugcuggaaacuacacaccagcccccucugcaccaccaacaccaaagaaggcuccaauaucugcuuaacccgcacagaccguggcugguacugcgauaacgccggcuccgucuccuucuucccccaagcagaaaccugcaaaguacaauccaaccgagucuucugugacaccaugaacucccuaacccuuccaucagaagucaaccucugcaacaucgacaucuucaaccccaaguacgacugcaaaaucaugacauccaaaaccgaugucucaagcagcgucauaaccucacucggcgcuaucguaagcugcuacggcaaaaccaaaugcaccgcaucaaacaaaaaccgcggaaucaucaaaaccuucagcaacggaugcgacuacguuuccaacaaaggcguagacaccgucuccgucggaaacacccucuacugcguaaacaaacaggaaggccaaucccucuacgucaaaggcgaacccaucauaaacuucuacgauccccuugucuucccguccgaugaguucgacgccuccaucucgcaagucaacgaaaagauaaaccaaucacuagcauucauccguaaauccgacgaacuccuccacaacgucaacgucggaaaauccaccaccaacauaaugaucaccaccauaaucaucgucaucaucguaauacuauuacuccucauagccgucggccucuuccuauauugcaaagcccgaucaacccccguaacccuuucuaaagaccaacuguccggaaucaacaacaucgcuuucagcaacugaggacuaguguccaccugucccuccugggcugcuggauugucucguuuuccugccaaauaaacaggaucagcgcuuuacagaucuaaaaaaaaaaaaaaaaaaaaaaaaaaaaaaaaaaaaaaaaaaaaaaaaaaaaaaaaaaaaaaaaugcaucccccccccccccccccccccccccccccccaaaggcucuuuucagagccaccagaauu

SEQ ID NO: 14775 - RNA, 2006 nt, Artificial Sequence
  mRNA product Design c-2 comprising derived and/or modified sequence from HRSV(Memphis-37)__AIY60640.1__F_DSCav1_mut2 (opt1)
gggagacuccugucgggcggaaguaggaggaguagaguuuaaaaacaguacucuuuuuccgguucgggacguaguugaagcaacgacaagccggauaaccgcucuugagacaggaagcuuaccauggagcugcccauccucaagaccaacgccaucaccacgauccuggccgcggugacccugugcuucgccagcucccagaacaucaccgaggaguucuaccagagcacgugcuccgccgucagcaagggcuaccucggcgcccugcgcaccgggugguacaccagcgugaucaccaucgagcuguccaacaucaaggagaacaagugcaacggcaccgacgccaaggugaagcucaucaagcaggagcuggacaaguacaagaacgcggucacggaccugcagcuccugaugcagagcaccccggccgccggcuccgggagcgcgaucugcuccggcaucgccgucugcaaggugcugcaccucgagggcgaggugaacaagaucaagaacgcccugcuguccaccaacaaggccgucgugagccucuccaacggggugagcguccugaccuucaaggugcuggaccucaagaacuacaucgacaagcagcugcugcccauccugaacaagcagagcugcuccauccccaacaucgagaccgucaucgaguuccagcagaagaacaaccgccuccuggagaucacgcgggaguucagcgugaacgcgggcgugaccacccccgucuccaccuacaugcugacgaacagcgagcuccugucccugaucaacgacaugccgaucaccaacgaccagaagaagcucaugagcaacaacgugcagaucgugcgccagcaguccuacagcaucaugugcaucaucaaggaggagguccuggccuacguggugcagcugccccucuacggggucaucgacacccccugcuggaagcugcacaccagcccccugugcacgaccaacaccaaggagggcuccaacaucugccucacccggacggaccgcgggugguacugcgacaacgccggcagcguguccuucuucccgcaggccgagaccugcaagguccagagcaaccggguguucugcgacaccaugaacucccugacccugcccagcgaggugaaccucugcaacaucgacaucuucaaccccaaguacgacugcaagaucaugacguccaagaccgacgucagcuccagcgugaucaccucccugggcgccaucgugagcugcuacgggaagaccaagugcacggcgagcaacaagaaccgcggcaucaucaagaccuucuccaacgggugcgacuacgucagcaacaagggcguggacaccguguccgucggcaacacccuguacugcgugaacaagcaggagggccagagccucuacgugaagggggagcccaucaucaacuucuacgacccgcuggucuuccccuccgacgaguucgacgccagcaucucccaggugaacgagaagaucaaccagagccuggccuucauccggaaguccgacgagcuccugcacaacgugaacgucggcaagagcaccacgaacaucaugaucaccaccaucaucaucgugaucaucgugauccugcugcuccugaucgccgucgggcuguuccucuacugcaaggcccgcuccacccccgugacgcugagcaaggaccagcuguccgggaucaacaacaucgcguucagcaacugaggacuaguggaagcauuuuccuggcugauuaaaagaaauuacucagcuauggucaucuguuccuguuagaaggcuaugcagcauauuauauacuaugcgcauguuaugaaaugcauaauaaaaaauuuuaaaaaaucuaaaagaucuaaaaaaaaaaaaaaaaaaaaaaaaaaaaaaaaaaaaaaaaaaaaaaaaaaaaaaaaaaaaaaaaugcaucccccccccccccccccccccccccccccccaaaggcucuuuucagagccaccagaauu

SEQ ID NO: 14776 - RNA, 2006 nt, Artificial Sequence
  mRNA product Design c-2 comprising derived and/or modified sequence from HRSV(Memphis-37)__AIY60640.1__F_DSCav1_mut2 (opt1)
gggagacuccugucgggcggaaguaggaggaguagaguuuaaaaacaguacucuuuuuccgguucgggacguaguugaagcaacgacaagccggauaaccgcucuugagacaggaagcuuaccauggagcugcccauccucaagaccaacgccaucaccacgauccuggccgcggugacccugugcuucgccagcucccagaacaucaccgaggaguucuaccagagcacgugcuccgccgucagcaagggcuaccucggggcccugcgcaccggcugguacaccuccgugaucaccaucgagcugagcaacaucaaggagaacaagugcaacgggaccgacgccaaggugaagcucaucaagcaggagcuggacaaguacaagaacgcggucacggaccugcagcuccugaugcaguccaccccggccgccggcagcggguccgccaucugcagcggcaucgcggugugcaaggugcugcaccucgagggcgaggucaacaagaucaagaacgcccugcuguccaccaacaaggccguggugagccucuccaacggggucagcgugcugaccuucaaggugcuggaccucaagaacuacaucgacaagcagcugcugcccauccucaacaagcaguccugcagcauccccaacaucgagacggucaucgaguuccagcagaagaacaaccggcugcuggagaucacccgcgaguucuccgugaacgccggcgugaccacccccgucagcacguacaugcucaccaacuccgagcugcugagccucaucaacgacaugccgaucaccaacgaccagaagaagcugaugagcaacaacgugcagaucgugcggcagcaguccuacagcaucaugugcaucaucaaggaggagguccuggccuacguggugcagcucccccuguacggggucaucgacacccccugcuggaagcugcacacgagcccccucugcaccaccaacaccaaggagggcuccaacaucugccugacgcgcaccgaccgggggugguacugcgacaacgcgggcuccgugagcuucuucccgcaggccgagaccugcaaggugcaguccaaccgcgucuucugcgacaccaugaacagccugacgcuccccuccgaggugaaccugugcaacaucgacaucuucaaccccaaguacgacugcaagaucaugaccagcaagaccgacgucuccagcuccgugaucaccagccugggcgccaucguguccugcuacgggaagacgaagugcaccgccagcaacaagaaccggggcaucaucaagaccuucuccaacgggugcgacuacgucagcaacaagggcguggacaccguguccgucggcaacacgcucuacugcgugaacaagcaggaggggcagagccuguacgugaagggcgagcccaucaucaacuucuacgacccgcuggucuuccccagcgacgaguucgacgccuccaucagccaggugaacgagaagaucaaccagucccucgcguucauccgcaagagcgacgagcugcugcacaacgugaacgucgggaaguccaccaccaacaucaugaucaccaccaucaucaucgugaucaucgugauccuccugcugcucaucgccgucggccuguuccuguacugcaaggcccggagcacgcccgugacccuguccaaggaccagcucagcgggaucaacaacaucgccuucuccaacugaggacuaguggaagcauuuuccuggcugauuaaaagaaauuacucagcuauggucaucuguuccuguuagaaggcuaugcagcauauuauauacuaugcgcauguuaugaaaugcauaauaaaaaauuuuaaaaaaucuaaaagaucuaaaaaaaaaaaaaaaaaaaaaaaaaaaaaaaaaaaaaaaaaaaaaaaaaaaaaaaaaaaaaaaaugcaucccccccccccccccccccccccccccccccaaaggcucuuuucagagccaccagaauu

SEQ ID NO: 14777 - RNA, 2006 nt, Artificial Sequence
  mRNA product Design c-2 comprising derived and/or modified sequence from HRSV(Memphis-37)__AIY60640.1__F_DSCav1_mut2 (opt2)
gggagacuccugucgggcggaaguaggaggaguagaguuuaaaaacaguacucuuuuuccgguucgggacguaguugaagcaacgacaagccggauaaccgcucuugagacaggaagcuuaccauggagcuccccauccucaagaccaacgccaucaccaccauccucgccgccgucacccucugcuucgccuccucccagaacaucaccgaggaguucuaccaguccaccugcuccgccgucuccaagggcuaccucggcgcccuccgcaccggcugguacaccuccgucaucaccaucgagcucuccaacaucaaggagaacaagugcaacggcaccgacgccaaggucaagcucaucaagcaggagcucgacaaguacaagaacgccgucaccgaccuccagcuccucaugcaguccacccccgccgccggcuccggcuccgccaucugcuccggcaucgccgucugcaagguccuccaccucgagggcgaggucaacaagaucaagaacgcccuccucuccaccaacaaggccgucgucucccucuccaacggcgucuccguccucaccuucaagguccucgaccucaagaacuacaucgacaagcagcuccuccccauccucaacaagcaguccugcuccauccccaacaucgagaccgucaucgaguuccagcagaagaacaaccgccuccucgagaucacccgcgaguucuccgucaacgccggcgucaccacccccgucuccaccuacaugcucaccaacuccgagcuccucucccucaucaacgacaugcccaucaccaacgaccagaagaagcucauguccaacaacguccagaucguccgccagcaguccuacuccaucaugugcaucaucaaggaggagguccucgccuacgucguccagcucccccucuacggcgucaucgacacccccugcuggaagcuccacaccuccccccucugcaccaccaacaccaaggagggcuccaacaucugccucacccgcaccgaccgcggcugguacugcgacaacgccggcuccgucuccuucuucccccaggccgagaccugcaagguccaguccaaccgcgucuucugcgacaccaugaacucccucacccuccccuccgaggucaaccucugcaacaucgacaucuucaaccccaaguacgacugcaagaucaugaccuccaagaccgacgucuccuccuccgucaucaccucccucggcgccaucgucuccugcuacggcaagaccaagugcaccgccuccaacaagaaccgcggcaucaucaagaccuucuccaacggcugcgacuacgucuccaacaagggcgucgacaccgucuccgucggcaacacccucuacugcgucaacaagcaggagggccagucccucuacgucaagggcgagcccaucaucaacuucuacgacccccucgucuuccccuccgacgaguucgacgccuccaucucccaggucaacgagaagaucaaccagucccucgccuucauccgcaaguccgacgagcuccuccacaacgucaacgucggcaaguccaccaccaacaucaugaucaccaccaucaucaucgucaucaucgucauccuccuccuccucaucgccgucggccucuuccucuacugcaaggcccgcuccacccccgucacccucuccaaggaccagcucuccggcaucaacaacaucgccuucuccaacugaggacuaguggaagcauuuuccuggcugauuaaaagaaauuacucagcuauggucaucuguuccuguuagaaggcuaugcagcauauuauauacuaugcgcauguuaugaaaugcauaauaaaaaauuuuaaaaaaucuaaaagaucuaaaaaaaaaaaaaaaaaaaaaaaaaaaaaaaaaaaaaaaaaaaaaaaaaaaaaaaaaaaaaaaaugcaucccccccccccccccccccccccccccccccaaaggcucuuuucagagccaccagaauu

SEQ ID NO: 14778 - RNA, 2006 nt, Artificial Sequence
  mRNA product Design c-2 comprising derived and/or modified sequence from HRSV(Memphis-37)__AIY60640.1__F_DSCav1_mut2 (opt3)
gggagacuccugucgggcggaaguaggaggaguagaguuuaaaaacaguacucuuuuuccgguucgggacguaguugaagcaacgacaagccggauaaccgcucuugagacaggaagcuuaccauggagcugcccauccucaagaccaacgccauuacaacuauacuugcugcagugacgcugugcuucgccagcucccagaauaucaccgaagaguuuuaccaaucuacauguucagcggucaguaaaggcuauuugggggcuuuaagaacuggaugguacaccagcguuauuacaaucgaacuguccaacauuaaggagaauaaaugcaacgguaccgacgccaaggugaaacuaaucaagcaggaacucgauaaguauaaaaaugcaguaacugaccugcagcuucugaugcagucuacuccugccgcuggcucggggucagcaauauguagcggaaucgccgugugcaaggucuugcaccucgagggcgaggugaacaaaauuaagaaugcucugcugaguaccaacaaagccguugugucccucucuaauggugucagcguguuaacguucaagguacuggaucuuaagaacuacaucgacaaacaauugcugccaauucuaaauaagcaguccuguucaaucccgaacauagaaacuguuauugaguuucagcagaaaaauaacaggcuccuggaaaucacccgggaguucagugugaaugcgggggucacaacucccgugagcaccuauaugcuuacaaacucugagcuguugucccucauuaacgauaugccuaucaccaaugaccaaaagaaacugaugucaaacaaugugcagaucguccgccagcagagcuacaguauuaugugcauaaucaaggaagagguuuuagcauaugugguacaacugccacucuacggagugauugauacgcccuguuggaaacuucauacuucuccucugugcacaaccaacacuaaggaaggcuccaauaucuguuugacacgaaccgaccguggcugguacugcgauaacgccgggagcgucucguuuuucccacaggcugagacguguaaggugcagucuaauagaguuuucugcgacaccaugaacucccuaacacugcccucagaagugaaucucugcaacauagauauuuucaauccuaaauaugacuguaagaucaugacaaguaaaaccgaugucagcuccucugugaucacaagccugggagccauuguaucaugcuacgguaagacuaaauguaccgcaaguaacaagaauaggggcaucauuaagacauuuuccaacgggugcgacuauguuagcaauaaaggaguggacaccgucucugugggcaacacucuuuacugugucaacaagcaagagggucagucacuguaugugaaaggggagccaauaaucaauuucuacgauccguugguuuuucccagugacgaauuugaugcuagcauuucccaggugaacgagaagaucaaucagucucucgccuuuauccggaaaucggacgaacuguuacacaacguaaaugucggaaagagcacgacaaacauuaugauaaccacuaucauuaucgugauuaucguuauacugcuacuccugaucgcggugggccuuuucuuguauugcaaggcccgcuccaccccugucacacugucaaaagaucaacucaguggcauuaauaacaucgcauucucuaauugaggacuaguggaagcauuuuccuggcugauuaaaagaaauuacucagcuauggucaucuguuccuguuagaaggcuaugcagcauauuauauacuaugcgcauguuaugaaaugcauaauaaaaaauuuuaaaaaaucuaaaagaucuaaaaaaaaaaaaaaaaaaaaaaaaaaaaaaaaaaaaaaaaaaaaaaaaaaaaaaaaaaaaaaaaugcaucccccccccccccccccccccccccccccccaaaggcucuuuucagagccaccagaauu

SEQ ID NO: 14779 - RNA, 2006 nt, Artificial Sequence
  mRNA product Design c-2 comprising derived and/or modified sequence from HRSV(Memphis-37)__AIY60640.1__F_DSCav1_mut2 (opt4)
gggagacuccugucgggcggaaguaggaggaguagaguuuaaaaacaguacucuuuuuccgguucgggacguaguugaagcaacgacaagccggauaaccgcucuugagacaggaagcuuaccauggagcugcccauccugaagaccaacgccaucaccaccauccuggccgccgugacccugugcuucgccagcagccagaacaucaccgaggaguucuaccagagcaccugcagcgccgugagcaagggcuaccugggcgcccugagaaccggcugguacaccagcgugaucaccaucgagcugagcaacaucaaggagaacaagugcaacggcaccgacgccaaggugaagcugaucaagcaggagcuggacaaguacaagaacgccgugaccgaccugcagcugcugaugcagagcacccccgccgccggcagcggcagcgccaucugcagcggcaucgccgugugcaaggugcugcaccuggagggcgaggugaacaagaucaagaacgcccugcugagcaccaacaaggccguggugagccugagcaacggcgugagcgugcugaccuucaaggugcuggaccugaagaacuacaucgacaagcagcugcugcccauccugaacaagcagagcugcagcauccccaacaucgagaccgugaucgaguuccagcagaagaacaacagacugcuggagaucaccagagaguucagcgugaacgccggcgugaccacccccgugagcaccuacaugcugaccaacagcgagcugcugagccugaucaacgacaugcccaucaccaacgaccagaagaagcugaugagcaacaacgugcagaucgugagacagcagagcuacagcaucaugugcaucaucaaggaggaggugcuggccuacguggugcagcugccccuguacggcgugaucgacacccccugcuggaagcugcacaccagcccccugugcaccaccaacaccaaggagggcagcaacaucugccugaccagaaccgacagaggcugguacugcgacaacgccggcagcgugagcuucuucccccaggccgagaccugcaaggugcagagcaacagaguguucugcgacaccaugaacagccugacccugcccagcgaggugaaccugugcaacaucgacaucuucaaccccaaguacgacugcaagaucaugaccagcaagaccgacgugagcagcagcgugaucaccagccugggcgccaucgugagcugcuacggcaagaccaagugcaccgccagcaacaagaacagaggcaucaucaagaccuucagcaacggcugcgacuacgugagcaacaagggcguggacaccgugagcgugggcaacacccuguacugcgugaacaagcaggagggccagagccuguacgugaagggcgagcccaucaucaacuucuacgacccccugguguuccccagcgacgaguucgacgccagcaucagccaggugaacgagaagaucaaccagagccuggccuucaucagaaagagcgacgagcugcugcacaacgugaacgugggcaagagcaccaccaacaucaugaucaccaccaucaucaucgugaucaucgugauccugcugcugcugaucgccgugggccuguuccuguacugcaaggccagaagcacccccgugacccugagcaaggaccagcugagcggcaucaacaacaucgccuucagcaacugaggacuaguggaagcauuuuccuggcugauuaaaagaaauuacucagcuauggucaucuguuccuguuagaaggcuaugcagcauauuauauacuaugcgcauguuaugaaaugcauaauaaaaaauuuuaaaaaaucuaaaagaucuaaaaaaaaaaaaaaaaaaaaaaaaaaaaaaaaaaaaaaaaaaaaaaaaaaaaaaaaaaaaaaaaugcaucccccccccccccccccccccccccccccccaaaggcucuuuucagagccaccagaauu

SEQ ID NO: 14780 - RNA, 2006 nt, Artificial Sequence
  mRNA product Design c-2 comprising derived and/or modified sequence from HRSV(Memphis-37)__AIY60640.1__F_DSCav1_mut2 (opt5)
gggagacuccugucgggcggaaguaggaggaguagaguuuaaaaacaguacucuuuuuccgguucgggacguaguugaagcaacgacaagccggauaaccgcucuugagacaggaagcuuaccauggagcugcccauccucaagaccaacgccauuacaacgauccuggcugccgugacccuuugcuucgcgagcucccagaauauuacagaagaguuuuaccaaucuaccuguagcgcugucuccaaaggcuaucugggggcccucagaacaggaugguacaccucuguuaucacaauugaacugagcaacaucaaggagaauaaaugcaacggcaccgacgccaaggugaaacuuaucaagcaggaacuggauaaguauaaaaaugcugugacggaccuccagcugcugaugcaguccaccccugccgcugggucuggaagcgccauuuguuccggcaucgcggucugcaaggugcuccaccuggagggggagguuaacaaaauuaagaaugcccuucugagcacaaacaaagcuguggucucucucuccaauggagugagcguucugaccuucaaggugcuugaucugaagaacuacaucgacaaacaacuccugccgauucugaauaagcagucuuguuccauccccaacauugaaacagucaucgaguuucagcagaaaaauaaccggcuccuggaaaucacccgcgaguucagcgugaaugccggcgugacgacaccugucucuaccuauaugcuuacaaacuccgagcugcucagccugauuaacgauaugcccaucaccaaugaccaaaagaaacuuauguccaacaauguucagauugugagacagcagucuuacagcaucaugugcauuaucaaggaagaggugcuggcuuaugucgugcaacucccucuguacggcguuaucgauacccccuguuggaaacugcauacauccccucucugcacgaccaacacaaaggaagggagcaauauuugucugacccggacagaccgcggaugguacugcgauaacgccggcucuguguccuuuuucccgcaggcggagaccuguaagguccagagcaauagaguguuuugcgacacgaugaacucucuuacacugcccagcgaaguuaaucucugcaacaucgauauuuucaauccuaaauaugacuguaagaucaugaccuccaaaaccgaugugucuagcuccgucauuacaagccugggggccaucgugucuugcuacggaaagaccaaauguacagcuuccaacaagaaucggggcaucauuaagacguuuagcaacgggugcgacuaugucucuaauaaaggaguggacaccguuuccgugggcaacacacuuuacugugucaacaagcaagagggccagagccuguaugugaaaggggagcccaucauuaauuucuacgauccucucguuuuucccuccgacgaguucgaugccucuaucagccaggugaacgaaaagauuaaucagucccuggcuuuuauccgcaaaucugacgaacugcuccacaacgucaaugugggaaagagcaccacaaacauuaugaucaccacgaucauuaucgugauuaucguuauucugcuucugcucaucgccgucggccuguuccuguauugcaaggccagauccaccccggugacacuuagcaaagaucaacucucugggaucaauaacauugcuuucuccaauugaggacuaguggaagcauuuuccuggcugauuaaaagaaauuacucagcuauggucaucuguuccuguuagaaggcuaugcagcauauuauauacuaugcgcauguuaugaaaugcauaauaaaaaauuuuaaaaaaucuaaaagaucuaaaaaaaaaaaaaaaaaaaaaaaaaaaaaaaaaaaaaaaaaaaaaaaaaaaaaaaaaaaaaaaaugcaucccccccccccccccccccccccccccccccaaaggcucuuuucagagccaccagaauu

SEQ ID NO: 14781 - RNA, 2006 nt, Artificial Sequence
  mRNA product Design c-2 comprising derived and/or modified sequence from HRSV(Memphis-37)__AIY60640.1__F_DSCav1_mut2 (opt6)
gggagacuccugucgggcggaaguaggaggaguagaguuuaaaaacaguacucuuuuuccgguucgggacguaguugaagcaacgacaagccggauaaccgcucuugagacaggaagcuuaccauggagcuuccaauauuaaaaacaaacgcuauaacaacuauacucgcagcaguuacacucugcuucgcauccucacaaaacauaacugaagaauuuuaccaauccacuugcucagccguaucaaaaggauaucuaggagcacuuagaaccggaugguauacaucagugauaacaauagaacuaagcaacauaaaagaaaacaagugcaacggaacugacgcaaaagucaaacuaaucaaacaagaacuagacaaauacaaaaacgcaguaacagaccuacaauuacuaaugcaaucaacaccagcagcaggaucagguucagccauaugcucagguaucgcuguaugcaaaguccuucaccuagaaggugaaguaaacaaaauuaaaaacgcccuacucaguacaaauaaagcugucguaaguuuaucaaacggaguaucaguccuuacauucaaaguauuagaccuaaaaaauuauauagacaaacaauuacuaccaauacucaacaaacaaucaugcucaauaccaaauauagaaaccguaauagaauuucagcaaaaaaauaacagauuacuagaaauaaccagagaauuuucagucaacgcaggagucacaacacccgucucaaccuacaugcuaaccaacucagaacuucuaucucuuaucaacgacaugcccauaaccaaugaucaaaaaaaauuaaugucuaauaacguucaaauaguaagacaacaaucauacucaauaaugugcauaaucaaagaagaaguauuagcauacguaguacaacuaccccuauauggaguaauagacacacccugcuggaaacuacacacauccccccucuguacaacaaacacuaaagaaggaucaaacauuugccuaacaagaacagaccgcggaugguacugcgacaacgcaggcuccguaucuuucuuuccacaagccgaaacuuguaaaguucaaucaaacagaguauuuugcgauacaaugaacuccuuaacauuaccuucagaaguaaaccuaugcaacauagacaucuucaacccaaaauacgacugcaaaauaaugaccucaaaaacagacguauccucaucagucauaaccuccuuaggagcaauaguaucauguuacggaaaaacaaaauguacagcaucaaauaaaaauagaggaauaauaaaaaccuucuccaacggaugcgacuacguauccaauaaaggaguagacaccguaucaguaggaaacacacuauacuguguaaacaaacaagaaggccaaucucuauauguaaaaggcgaaccaaucauaaauuuuuacgacccacuugucuuccccuccgacgaauuugacgcaagcauaucacaaguaaacgaaaaaaucaaccaaagccuagccuucauaaggaaaucugacgaauuacuucauaacguaaauguuggaaaaucaaccacaaacauaaugauaaccaccaucauaauuguaauaauaguaauacuacuacuacuaauugcaguaggacucuuccuauauugcaaagcucgcucaacaccaguuaccuuaucaaaagaccaacuaucuggaauaaacaacauagccuuuuccaacuaaggacuaguggaagcauuuuccuggcugauuaaaagaaauuacucagcuauggucaucuguuccuguuagaaggcuaugcagcauauuauauacuaugcgcauguuaugaaaugcauaauaaaaaauuuuaaaaaaucuaaaagaucuaaaaaaaaaaaaaaaaaaaaaaaaaaaaaaaaaaaaaaaaaaaaaaaaaaaaaaaaaaaaaaaaugcaucccccccccccccccccccccccccccccccaaaggcucuuuucagagccaccagaauu

SEQ ID NO: 14782 - RNA, 2006 nt, Artificial Sequence
  mRNA product Design c-2 comprising derived and/or modified sequence from HRSV(Memphis-37)__AIY60640.1__F_DSCav1_mut2 (opt11)
gggagacuccugucgggcggaaguaggaggaguagaguuuaaaaacaguacucuuuuuccgguucgggacguaguugaagcaacgacaagccggauaaccgcucuugagacaggaagcuuaccauggaacucccaauccuaaaaaccaacgccaucaccaccauccucgccgcugucaccuuaugcuuugccagcagccaaaacaucaccgaagaauuuuaccaaucaacaugcuccgccgucucaaaaggauaccucggcgcccuacgcaccggcugguacacaagcgucauaaccaucgagcucuccaacaucaaggaaaacaaaugcaauggaaccgacgccaaagucaaacuaaucaaacaagaacuagacaaguacaagaacgcagucaccgaccuccaacuccucaugcaguccacccccgcagcaggcucuggcucagcaauaugcuccggcaucgcugucugcaaaguccuacaccucgaaggcgaagucaacaaaaucaaaaacgcccuacuguccacaaacaaagccgucgucucccuauccaacggcgucucgguccuaaccuuuaagguucucgaucucaaaaauuacauagacaaacaacuacuccccauccucaacaaacaaucuugcucaauccccaacaucgaaaccgucaucgaguuccaacagaaaaacaacagacuacucgaaaucacccgcgaguucucagucaacgcgggcgucacaacacccgucagcaccuacaugcuaaccaacuccgaacuccucagccucauuaacgacaugcccaucaccaacgaccaaaagaaacuuauguccaacaacguucaaaucguccgccaacaauccuacuccaucaugugcaucaucaaagaagaaguacucgccuacguaguccaacugccccucuacggcgucaucgauaccccaugcuggaaacuacacaccagcccccucugcaccaccaacaccaaagaaggcuccaauaucugcuuaacccgcacagaccguggcugguacugcgauaacgccggcuccgucuccuucuucccccaagcagaaaccugcaaaguacaauccaaccgagucuucugugacaccaugaacucccuaacccuuccaucagaagucaaccucugcaacaucgacaucuucaaccccaaguacgacugcaaaaucaugacauccaaaaccgaugucucaagcagcgucauaaccucacucggcgcuaucguaagcugcuacggcaaaaccaaaugcaccgcaucaaacaaaaaccgcggaaucaucaaaaccuucagcaacggaugcgacuacguuuccaacaaaggcguagacaccgucuccgucggaaacacccucuacugcguaaacaaacaggaaggccaaucccucuacgucaaaggcgaacccaucauaaacuucuacgauccccuugucuucccguccgaugaguucgacgccuccaucucgcaagucaacgaaaagauaaaccaaucacuagcauucauccguaaauccgacgaacuccuccacaacgucaacgucggaaaauccaccaccaacauaaugaucaccaccauaaucaucgucaucaucguaauacuauuacuccucauagccgucggccucuuccuauauugcaaagcccgaucaacccccguaacccuuucuaaagaccaacuguccggaaucaacaacaucgcuuucagcaacugaggacuaguggaagcauuuuccuggcugauuaaaagaaauuacucagcuauggucaucuguuccuguuagaaggcuaugcagcauauuauauacuaugcgcauguuaugaaaugcauaauaaaaaauuuuaaaaaaucuaaaagaucuaaaaaaaaaaaaaaaaaaaaaaaaaaaaaaaaaaaaaaaaaaaaaaaaaaaaaaaaaaaaaaaaugcaucccccccccccccccccccccccccccccccaaaggcucuuuucagagccaccagaauu

SEQ ID NO: 14783 - RNA, 1983 nt, Artificial Sequence
  mRNA product Design c-3 comprising derived and/or modified sequence from HRSV(Memphis-37)__AIY60640.1__F_DSCav1_mut2 (opt1)
gggagaguccgcucagccagguugcagaagcggcuuagcguguguccuaaucuucucucugcguguagguaggccugugccgcaaacaagcuuaccauggagcugcccauccucaagaccaacgccaucaccacgauccuggccgcggugacccugugcuucgccagcucccagaacaucaccgaggaguucuaccagagcacgugcuccgccgucagcaagggcuaccucggcgcccugcgcaccgggugguacaccagcgugaucaccaucgagcuguccaacaucaaggagaacaagugcaacggcaccgacgccaaggugaagcucaucaagcaggagcuggacaaguacaagaacgcggucacggaccugcagcuccugaugcagagcaccccggccgccggcuccgggagcgcgaucugcuccggcaucgccgucugcaaggugcugcaccucgagggcgaggugaacaagaucaagaacgcccugcuguccaccaacaaggccgucgugagccucuccaacggggugagcguccugaccuucaaggugcuggaccucaagaacuacaucgacaagcagcugcugcccauccugaacaagcagagcugcuccauccccaacaucgagaccgucaucgaguuccagcagaagaacaaccgccuccuggagaucacgcgggaguucagcgugaacgcgggcgugaccacccccgucuccaccuacaugcugacgaacagcgagcuccugucccugaucaacgacaugccgaucaccaacgaccagaagaagcucaugagcaacaacgugcagaucgugcgccagcaguccuacagcaucaugugcaucaucaaggaggagguccuggccuacguggugcagcugccccucuacggggucaucgacacccccugcuggaagcugcacaccagcccccugugcacgaccaacaccaaggagggcuccaacaucugccucacccggacggaccgcgggugguacugcgacaacgccggcagcguguccuucuucccgcaggccgagaccugcaagguccagagcaaccggguguucugcgacaccaugaacucccugacccugcccagcgaggugaaccucugcaacaucgacaucuucaaccccaaguacgacugcaagaucaugacguccaagaccgacgucagcuccagcgugaucaccucccugggcgccaucgugagcugcuacgggaagaccaagugcacggcgagcaacaagaaccgcggcaucaucaagaccuucuccaacgggugcgacuacgucagcaacaagggcguggacaccguguccgucggcaacacccuguacugcgugaacaagcaggagggccagagccucuacgugaagggggagcccaucaucaacuucuacgacccgcuggucuuccccuccgacgaguucgacgccagcaucucccaggugaacgagaagaucaaccagagccuggccuucauccggaaguccgacgagcuccugcacaacgugaacgucggcaagagcaccacgaacaucaugaucaccaccaucaucaucgugaucaucgugauccugcugcuccugaucgccgucgggcuguuccucuacugcaaggcccgcuccacccccgugacgcugagcaaggaccagcuguccgggaucaacaacaucgcguucagcaacugaggacuaguacuggcugcaucucccuuuccucuguccuccauccuucucccaggauggugaagggggaccugguacccagugauccccaccccaggauccuaaaucaugacuuaccugcuaauaaaaacucauuggaaaagugagaagaucuaaaaaaaaaaaaaaaaaaaaaaaaaaaaaaaaaaaaaaaaaaaaaaaaaaaaaaaaaaaaaaaaugcaucccccccccccccccccccccccccccccccaaaggcucuuuucagagccaccagaauu

SEQ ID NO: 14784 - RNA, 1983 nt, Artificial Sequence
  mRNA product Design c-3 comprising derived and/or modified sequence from HRSV(Memphis-37)__AIY60640.1__F_DSCav1_mut2 (opt1)
gggagaguccgcucagccagguugcagaagcggcuuagcguguguccuaaucuucucucugcguguagguaggccugugccgcaaacaagcuuaccauggagcugcccauccucaagaccaacgccaucaccacgauccuggccgcggugacccugugcuucgccagcucccagaacaucaccgaggaguucuaccagagcacgugcuccgccgucagcaagggcuaccucggggcccugcgcaccggcugguacaccuccgugaucaccaucgagcugagcaacaucaaggagaacaagugcaacgggaccgacgccaaggugaagcucaucaagcaggagcuggacaaguacaagaacgcggucacggaccugcagcuccugaugcaguccaccccggccgccggcagcggguccgccaucugcagcggcaucgcggugugcaaggugcugcaccucgagggcgaggucaacaagaucaagaacgcccugcuguccaccaacaaggccguggugagccucuccaacggggucagcgugcugaccuucaaggugcuggaccucaagaacuacaucgacaagcagcugcugcccauccucaacaagcaguccugcagcauccccaacaucgagacggucaucgaguuccagcagaagaacaaccggcugcuggagaucacccgcgaguucuccgugaacgccggcgugaccacccccgucagcacguacaugcucaccaacuccgagcugcugagccucaucaacgacaugccgaucaccaacgaccagaagaagcugaugagcaacaacgugcagaucgugcggcagcaguccuacagcaucaugugcaucaucaaggaggagguccuggccuacguggugcagcucccccuguacggggucaucgacacccccugcuggaagcugcacacgagcccccucugcaccaccaacaccaaggagggcuccaacaucugccugacgcgcaccgaccgggggugguacugcgacaacgcgggcuccgugagcuucuucccgcaggccgagaccugcaaggugcaguccaaccgcgucuucugcgacaccaugaacagccugacgcuccccuccgaggugaaccugugcaacaucgacaucuucaaccccaaguacgacugcaagaucaugaccagcaagaccgacgucuccagcuccgugaucaccagccugggcgccaucguguccugcuacgggaagacgaagugcaccgccagcaacaagaaccggggcaucaucaagaccuucuccaacgggugcgacuacgucagcaacaagggcguggacaccguguccgucggcaacacgcucuacugcgugaacaagcaggaggggcagagccuguacgugaagggcgagcccaucaucaacuucuacgacccgcuggucuuccccagcgacgaguucgacgccuccaucagccaggugaacgagaagaucaaccagucccucgcguucauccgcaagagcgacgagcugcugcacaacgugaacgucgggaaguccaccaccaacaucaugaucaccaccaucaucaucgugaucaucgugauccuccugcugcucaucgccgucggccuguuccuguacugcaaggcccggagcacgcccgugacccuguccaaggaccagcucagcgggaucaacaacaucgccuucuccaacugaggacuaguacuggcugcaucucccuuuccucuguccuccauccuucucccaggauggugaagggggaccugguacccagugauccccaccccaggauccuaaaucaugacuuaccugcuaauaaaaacucauuggaaaagugagaagaucuaaaaaaaaaaaaaaaaaaaaaaaaaaaaaaaaaaaaaaaaaaaaaaaaaaaaaaaaaaaaaaaaugcaucccccccccccccccccccccccccccccccaaaggcucuuuucagagccaccagaauu

SEQ ID NO: 14785 - RNA, 1983 nt, Artificial Sequence
  mRNA product Design c-3 comprising derived and/or modified sequence from HRSV(Memphis-37)__AIY60640.1__F_DSCav1_mut2 (opt2)
gggagaguccgcucagccagguugcagaagcggcuuagcguguguccuaaucuucucucugcguguagguaggccugugccgcaaacaagcuuaccauggagcuccccauccucaagaccaacgccaucaccaccauccucgccgccgucacccucugcuucgccuccucccagaacaucaccgaggaguucuaccaguccaccugcuccgccgucuccaagggcuaccucggcgcccuccgcaccggcugguacaccuccgucaucaccaucgagcucuccaacaucaaggagaacaagugcaacggcaccgacgccaaggucaagcucaucaagcaggagcucgacaaguacaagaacgccgucaccgaccuccagcuccucaugcaguccacccccgccgccggcuccggcuccgccaucugcuccggcaucgccgucugcaagguccuccaccucgagggcgaggucaacaagaucaagaacgcccuccucuccaccaacaaggccgucgucucccucuccaacggcgucuccguccucaccuucaagguccucgaccucaagaacuacaucgacaagcagcuccuccccauccucaacaagcaguccugcuccauccccaacaucgagaccgucaucgaguuccagcagaagaacaaccgccuccucgagaucacccgcgaguucuccgucaacgccggcgucaccacccccgucuccaccuacaugcucaccaacuccgagcuccucucccucaucaacgacaugcccaucaccaacgaccagaagaagcucauguccaacaacguccagaucguccgccagcaguccuacuccaucaugugcaucaucaaggaggagguccucgccuacgucguccagcucccccucuacggcgucaucgacacccccugcuggaagcuccacaccuccccccucugcaccaccaacaccaaggagggcuccaacaucugccucacccgcaccgaccgcggcugguacugcgacaacgccggcuccgucuccuucuucccccaggccgagaccugcaagguccaguccaaccgcgucuucugcgacaccaugaacucccucacccuccccuccgaggucaaccucugcaacaucgacaucuucaaccccaaguacgacugcaagaucaugaccuccaagaccgacgucuccuccuccgucaucaccucccucggcgccaucgucuccugcuacggcaagaccaagugcaccgccuccaacaagaaccgcggcaucaucaagaccuucuccaacggcugcgacuacgucuccaacaagggcgucgacaccgucuccgucggcaacacccucuacugcgucaacaagcaggagggccagucccucuacgucaagggcgagcccaucaucaacuucuacgacccccucgucuuccccuccgacgaguucgacgccuccaucucccaggucaacgagaagaucaaccagucccucgccuucauccgcaaguccgacgagcuccuccacaacgucaacgucggcaaguccaccaccaacaucaugaucaccaccaucaucaucgucaucaucgucauccuccuccuccucaucgccgucggccucuuccucuacugcaaggcccgcuccacccccgucacccucuccaaggaccagcucuccggcaucaacaacaucgccuucuccaacugaggacuaguacuggcugcaucucccuuuccucuguccuccauccuucucccaggauggugaagggggaccugguacccagugauccccaccccaggauccuaaaucaugacuuaccugcuaauaaaaacucauuggaaaagugagaagaucuaaaaaaaaaaaaaaaaaaaaaaaaaaaaaaaaaaaaaaaaaaaaaaaaaaaaaaaaaaaaaaaaugcaucccccccccccccccccccccccccccccccaaaggcucuuuucagagccaccagaauu

SEQ ID NO: 14786 - RNA, 1983 nt, Artificial Sequence
  mRNA product Design c-3 comprising derived and/or modified sequence from HRSV(Memphis-37)__AIY60640.1__F_DSCav1_mut2 (opt3)
gggagaguccgcucagccagguugcagaagcggcuuagcguguguccuaaucuucucucugcguguagguaggccugugccgcaaacaagcuuaccauggagcugcccauccucaagaccaacgccauuacaacuauacuugcugcagugacgcugugcuucgccagcucccagaauaucaccgaagaguuuuaccaaucuacauguucagcggucaguaaaggcuauuugggggcuuuaagaacuggaugguacaccagcguuauuacaaucgaacuguccaacauuaaggagaauaaaugcaacgguaccgacgccaaggugaaacuaaucaagcaggaacucgauaaguauaaaaaugcaguaacugaccugcagcuucugaugcagucuacuccugccgcuggcucggggucagcaauauguagcggaaucgccgugugcaaggucuugcaccucgagggcgaggugaacaaaauuaagaaugcucugcugaguaccaacaaagccguugugucccucucuaauggugucagcguguuaacguucaagguacuggaucuuaagaacuacaucgacaaacaauugcugccaauucuaaauaagcaguccuguucaaucccgaacauagaaacuguuauugaguuucagcagaaaaauaacaggcuccuggaaaucacccgggaguucagugugaaugcgggggucacaacucccgugagcaccuauaugcuuacaaacucugagcuguugucccucauuaacgauaugccuaucaccaaugaccaaaagaaacugaugucaaacaaugugcagaucguccgccagcagagcuacaguauuaugugcauaaucaaggaagagguuuuagcauaugugguacaacugccacucuacggagugauugauacgcccuguuggaaacuucauacuucuccucugugcacaaccaacacuaaggaaggcuccaauaucuguuugacacgaaccgaccguggcugguacugcgauaacgccgggagcgucucguuuuucccacaggcugagacguguaaggugcagucuaauagaguuuucugcgacaccaugaacucccuaacacugcccucagaagugaaucucugcaacauagauauuuucaauccuaaauaugacuguaagaucaugacaaguaaaaccgaugucagcuccucugugaucacaagccugggagccauuguaucaugcuacgguaagacuaaauguaccgcaaguaacaagaauaggggcaucauuaagacauuuuccaacgggugcgacuauguuagcaauaaaggaguggacaccgucucugugggcaacacucuuuacugugucaacaagcaagagggucagucacuguaugugaaaggggagccaauaaucaauuucuacgauccguugguuuuucccagugacgaauuugaugcuagcauuucccaggugaacgagaagaucaaucagucucucgccuuuauccggaaaucggacgaacuguuacacaacguaaaugucggaaagagcacgacaaacauuaugauaaccacuaucauuaucgugauuaucguuauacugcuacuccugaucgcggugggccuuuucuuguauugcaaggcccgcuccaccccugucacacugucaaaagaucaacucaguggcauuaauaacaucgcauucucuaauugaggacuaguacuggcugcaucucccuuuccucuguccuccauccuucucccaggauggugaagggggaccugguacccagugauccccaccccaggauccuaaaucaugacuuaccugcuaauaaaaacucauuggaaaagugagaagaucuaaaaaaaaaaaaaaaaaaaaaaaaaaaaaaaaaaaaaaaaaaaaaaaaaaaaaaaaaaaaaaaaugcaucccccccccccccccccccccccccccccccaaaggcucuuuucagagccaccagaauu

SEQ ID NO: 14787 - RNA, 1983 nt, Artificial Sequence
  mRNA product Design c-3 comprising derived and/or modified sequence from HRSV(Memphis-37)__AIY60640.1__F_DSCav1_mut2 (opt4)
gggagaguccgcucagccagguugcagaagcggcuuagcguguguccuaaucuucucucugcguguagguaggccugugccgcaaacaagcuuaccauggagcugcccauccugaagaccaacgccaucaccaccauccuggccgccgugacccugugcuucgccagcagccagaacaucaccgaggaguucuaccagagcaccugcagcgccgugagcaagggcuaccugggcgcccugagaaccggcugguacaccagcgugaucaccaucgagcugagcaacaucaaggagaacaagugcaacggcaccgacgccaaggugaagcugaucaagcaggagcuggacaaguacaagaacgccgugaccgaccugcagcugcugaugcagagcacccccgccgccggcagcggcagcgccaucugcagcggcaucgccgugugcaaggugcugcaccuggagggcgaggugaacaagaucaagaacgcccugcugagcaccaacaaggccguggugagccugagcaacggcgugagcgugcugaccuucaaggugcuggaccugaagaacuacaucgacaagcagcugcugcccauccugaacaagcagagcugcagcauccccaacaucgagaccgugaucgaguuccagcagaagaacaacagacugcuggagaucaccagagaguucagcgugaacgccggcgugaccacccccgugagcaccuacaugcugaccaacagcgagcugcugagccugaucaacgacaugcccaucaccaacgaccagaagaagcugaugagcaacaacgugcagaucgugagacagcagagcuacagcaucaugugcaucaucaaggaggaggugcuggccuacguggugcagcugccccuguacggcgugaucgacacccccugcuggaagcugcacaccagcccccugugcaccaccaacaccaaggagggcagcaacaucugccugaccagaaccgacagaggcugguacugcgacaacgccggcagcgugagcuucuucccccaggccgagaccugcaaggugcagagcaacagaguguucugcgacaccaugaacagccugacccugcccagcgaggugaaccugugcaacaucgacaucuucaaccccaaguacgacugcaagaucaugaccagcaagaccgacgugagcagcagcgugaucaccagccugggcgccaucgugagcugcuacggcaagaccaagugcaccgccagcaacaagaacagaggcaucaucaagaccuucagcaacggcugcgacuacgugagcaacaagggcguggacaccgugagcgugggcaacacccuguacugcgugaacaagcaggagggccagagccuguacgugaagggcgagcccaucaucaacuucuacgacccccugguguuccccagcgacgaguucgacgccagcaucagccaggugaacgagaagaucaaccagagccuggccuucaucagaaagagcgacgagcugcugcacaacgugaacgugggcaagagcaccaccaacaucaugaucaccaccaucaucaucgugaucaucgugauccugcugcugcugaucgccgugggccuguuccuguacugcaaggccagaagcacccccgugacccugagcaaggaccagcugagcggcaucaacaacaucgccuucagcaacugaggacuaguacuggcugcaucucccuuuccucuguccuccauccuucucccaggauggugaagggggaccugguacccagugauccccaccccaggauccuaaaucaugacuuaccugcuaauaaaaacucauuggaaaagugagaagaucuaaaaaaaaaaaaaaaaaaaaaaaaaaaaaaaaaaaaaaaaaaaaaaaaaaaaaaaaaaaaaaaaugcaucccccccccccccccccccccccccccccccaaaggcucuuuucagagccaccagaauu

SEQ ID NO: 14788 - RNA, 1983 nt, Artificial Sequence
  mRNA product Design c-3 comprising derived and/or modified sequence from HRSV(Memphis-37)__AIY60640.1__F_DSCav1_mut2 (opt5)
gggagaguccgcucagccagguugcagaagcggcuuagcguguguccuaaucuucucucugcguguagguaggccugugccgcaaacaagcuuaccauggagcugcccauccucaagaccaacgccauuacaacgauccuggcugccgugacccuuugcuucgcgagcucccagaauauuacagaagaguuuuaccaaucuaccuguagcgcugucuccaaaggcuaucugggggcccucagaacaggaugguacaccucuguuaucacaauugaacugagcaacaucaaggagaauaaaugcaacggcaccgacgccaaggugaaacuuaucaagcaggaacuggauaaguauaaaaaugcugugacggaccuccagcugcugaugcaguccaccccugccgcugggucuggaagcgccauuuguuccggcaucgcggucugcaaggugcuccaccuggagggggagguuaacaaaauuaagaaugcccuucugagcacaaacaaagcuguggucucucucuccaauggagugagcguucugaccuucaaggugcuugaucugaagaacuacaucgacaaacaacuccugccgauucugaauaagcagucuuguuccauccccaacauugaaacagucaucgaguuucagcagaaaaauaaccggcuccuggaaaucacccgcgaguucagcgugaaugccggcgugacgacaccugucucuaccuauaugcuuacaaacuccgagcugcucagccugauuaacgauaugcccaucaccaaugaccaaaagaaacuuauguccaacaauguucagauugugagacagcagucuuacagcaucaugugcauuaucaaggaagaggugcuggcuuaugucgugcaacucccucuguacggcguuaucgauacccccuguuggaaacugcauacauccccucucugcacgaccaacacaaaggaagggagcaauauuugucugacccggacagaccgcggaugguacugcgauaacgccggcucuguguccuuuuucccgcaggcggagaccuguaagguccagagcaauagaguguuuugcgacacgaugaacucucuuacacugcccagcgaaguuaaucucugcaacaucgauauuuucaauccuaaauaugacuguaagaucaugaccuccaaaaccgaugugucuagcuccgucauuacaagccugggggccaucgugucuugcuacggaaagaccaaauguacagcuuccaacaagaaucggggcaucauuaagacguuuagcaacgggugcgacuaugucucuaauaaaggaguggacaccguuuccgugggcaacacacuuuacugugucaacaagcaagagggccagagccuguaugugaaaggggagcccaucauuaauuucuacgauccucucguuuuucccuccgacgaguucgaugccucuaucagccaggugaacgaaaagauuaaucagucccuggcuuuuauccgcaaaucugacgaacugcuccacaacgucaaugugggaaagagcaccacaaacauuaugaucaccacgaucauuaucgugauuaucguuauucugcuucugcucaucgccgucggccuguuccuguauugcaaggccagauccaccccggugacacuuagcaaagaucaacucucugggaucaauaacauugcuuucuccaauugaggacuaguacuggcugcaucucccuuuccucuguccuccauccuucucccaggauggugaagggggaccugguacccagugauccccaccccaggauccuaaaucaugacuuaccugcuaauaaaaacucauuggaaaagugagaagaucuaaaaaaaaaaaaaaaaaaaaaaaaaaaaaaaaaaaaaaaaaaaaaaaaaaaaaaaaaaaaaaaaugcaucccccccccccccccccccccccccccccccaaaggcucuuuucagagccaccagaauu

SEQ ID NO: 14789 - RNA, 1983 nt, Artificial Sequence
  mRNA product Design c-3 comprising derived and/or modified sequence from HRSV(Memphis-37)__AIY60640.1__F_DSCav1_mut2 (opt6)
gggagaguccgcucagccagguugcagaagcggcuuagcguguguccuaaucuucucucugcguguagguaggccugugccgcaaacaagcuuaccauggagcuuccaauauuaaaaacaaacgcuauaacaacuauacucgcagcaguuacacucugcuucgcauccucacaaaacauaacugaagaauuuuaccaauccacuugcucagccguaucaaaaggauaucuaggagcacuuagaaccggaugguauacaucagugauaacaauagaacuaagcaacauaaaagaaaacaagugcaacggaacugacgcaaaagucaaacuaaucaaacaagaacuagacaaauacaaaaacgcaguaacagaccuacaauuacuaaugcaaucaacaccagcagcaggaucagguucagccauaugcucagguaucgcuguaugcaaaguccuucaccuagaaggugaaguaaacaaaauuaaaaacgcccuacucaguacaaauaaagcugucguaaguuuaucaaacggaguaucaguccuuacauucaaaguauuagaccuaaaaaauuauauagacaaacaauuacuaccaauacucaacaaacaaucaugcucaauaccaaauauagaaaccguaauagaauuucagcaaaaaaauaacagauuacuagaaauaaccagagaauuuucagucaacgcaggagucacaacacccgucucaaccuacaugcuaaccaacucagaacuucuaucucuuaucaacgacaugcccauaaccaaugaucaaaaaaaauuaaugucuaauaacguucaaauaguaagacaacaaucauacucaauaaugugcauaaucaaagaagaaguauuagcauacguaguacaacuaccccuauauggaguaauagacacacccugcuggaaacuacacacauccccccucuguacaacaaacacuaaagaaggaucaaacauuugccuaacaagaacagaccgcggaugguacugcgacaacgcaggcuccguaucuuucuuuccacaagccgaaacuuguaaaguucaaucaaacagaguauuuugcgauacaaugaacuccuuaacauuaccuucagaaguaaaccuaugcaacauagacaucuucaacccaaaauacgacugcaaaauaaugaccucaaaaacagacguauccucaucagucauaaccuccuuaggagcaauaguaucauguuacggaaaaacaaaauguacagcaucaaauaaaaauagaggaauaauaaaaaccuucuccaacggaugcgacuacguauccaauaaaggaguagacaccguaucaguaggaaacacacuauacuguguaaacaaacaagaaggccaaucucuauauguaaaaggcgaaccaaucauaaauuuuuacgacccacuugucuuccccuccgacgaauuugacgcaagcauaucacaaguaaacgaaaaaaucaaccaaagccuagccuucauaaggaaaucugacgaauuacuucauaacguaaauguuggaaaaucaaccacaaacauaaugauaaccaccaucauaauuguaauaauaguaauacuacuacuacuaauugcaguaggacucuuccuauauugcaaagcucgcucaacaccaguuaccuuaucaaaagaccaacuaucuggaauaaacaacauagccuuuuccaacuaaggacuaguacuggcugcaucucccuuuccucuguccuccauccuucucccaggauggugaagggggaccugguacccagugauccccaccccaggauccuaaaucaugacuuaccugcuaauaaaaacucauuggaaaagugagaagaucuaaaaaaaaaaaaaaaaaaaaaaaaaaaaaaaaaaaaaaaaaaaaaaaaaaaaaaaaaaaaaaaaugcaucccccccccccccccccccccccccccccccaaaggcucuuuucagagccaccagaauu

SEQ ID NO: 14790 - RNA, 1983 nt, Artificial Sequence
  mRNA product Design c-3 comprising derived and/or modified sequence from HRSV(Memphis-37)__AIY60640.1__F_DSCav1_mut2 (opt11)
gggagaguccgcucagccagguugcagaagcggcuuagcguguguccuaaucuucucucugcguguagguaggccugugccgcaaacaagcuuaccauggaacucccaauccuaaaaaccaacgccaucaccaccauccucgccgcugucaccuuaugcuuugccagcagccaaaacaucaccgaagaauuuuaccaaucaacaugcuccgccgucucaaaaggauaccucggcgcccuacgcaccggcugguacacaagcgucauaaccaucgagcucuccaacaucaaggaaaacaaaugcaauggaaccgacgccaaagucaaacuaaucaaacaagaacuagacaaguacaagaacgcagucaccgaccuccaacuccucaugcaguccacccccgcagcaggcucuggcucagcaauaugcuccggcaucgcugucugcaaaguccuacaccucgaaggcgaagucaacaaaaucaaaaacgcccuacuguccacaaacaaagccgucgucucccuauccaacggcgucucgguccuaaccuuuaagguucucgaucucaaaaauuacauagacaaacaacuacuccccauccucaacaaacaaucuugcucaauccccaacaucgaaaccgucaucgaguuccaacagaaaaacaacagacuacucgaaaucacccgcgaguucucagucaacgcgggcgucacaacacccgucagcaccuacaugcuaaccaacuccgaacuccucagccucauuaacgacaugcccaucaccaacgaccaaaagaaacuuauguccaacaacguucaaaucguccgccaacaauccuacuccaucaugugcaucaucaaagaagaaguacucgccuacguaguccaacugccccucuacggcgucaucgauaccccaugcuggaaacuacacaccagcccccucugcaccaccaacaccaaagaaggcuccaauaucugcuuaacccgcacagaccguggcugguacugcgauaacgccggcuccgucuccuucuucccccaagcagaaaccugcaaaguacaauccaaccgagucuucugugacaccaugaacucccuaacccuuccaucagaagucaaccucugcaacaucgacaucuucaaccccaaguacgacugcaaaaucaugacauccaaaaccgaugucucaagcagcgucauaaccucacucggcgcuaucguaagcugcuacggcaaaaccaaaugcaccgcaucaaacaaaaaccgcggaaucaucaaaaccuucagcaacggaugcgacuacguuuccaacaaaggcguagacaccgucuccgucggaaacacccucuacugcguaaacaaacaggaaggccaaucccucuacgucaaaggcgaacccaucauaaacuucuacgauccccuugucuucccguccgaugaguucgacgccuccaucucgcaagucaacgaaaagauaaaccaaucacuagcauucauccguaaauccgacgaacuccuccacaacgucaacgucggaaaauccaccaccaacauaaugaucaccaccauaaucaucgucaucaucguaauacuauuacuccucauagccgucggccucuuccuauauugcaaagcccgaucaacccccguaacccuuucuaaagaccaacuguccggaaucaacaacaucgcuuucagcaacugaggacuaguacuggcugcaucucccuuuccucuguccuccauccuucucccaggauggugaagggggaccugguacccagugauccccaccccaggauccuaaaucaugacuuaccugcuaauaaaaacucauuggaaaagugagaagaucuaaaaaaaaaaaaaaaaaaaaaaaaaaaaaaaaaaaaaaaaaaaaaaaaaaaaaaaaaaaaaaaaugcaucccccccccccccccccccccccccccccccaaaggcucuuuucagagccaccagaauu

SEQ ID NO: 14791 - RNA, 1979 nt, Artificial Sequence
  mRNA product Design c-4 comprising derived and/or modified sequence from HRSV(Memphis-37)__AIY60640.1__F_DSCav1_mut2 (opt1)
gggagaguccgcucagccagguugcagaagcggcuuagcguguguccuaaucuucucucugcguguagguaggccugugccgcaaacaagcuuaccauggagcugcccauccucaagaccaacgccaucaccacgauccuggccgcggugacccugugcuucgccagcucccagaacaucaccgaggaguucuaccagagcacgugcuccgccgucagcaagggcuaccucggcgcccugcgcaccgggugguacaccagcgugaucaccaucgagcuguccaacaucaaggagaacaagugcaacggcaccgacgccaaggugaagcucaucaagcaggagcuggacaaguacaagaacgcggucacggaccugcagcuccugaugcagagcaccccggccgccggcuccgggagcgcgaucugcuccggcaucgccgucugcaaggugcugcaccucgagggcgaggugaacaagaucaagaacgcccugcuguccaccaacaaggccgucgugagccucuccaacggggugagcguccugaccuucaaggugcuggaccucaagaacuacaucgacaagcagcugcugcccauccugaacaagcagagcugcuccauccccaacaucgagaccgucaucgaguuccagcagaagaacaaccgccuccuggagaucacgcgggaguucagcgugaacgcgggcgugaccacccccgucuccaccuacaugcugacgaacagcgagcuccugucccugaucaacgacaugccgaucaccaacgaccagaagaagcucaugagcaacaacgugcagaucgugcgccagcaguccuacagcaucaugugcaucaucaaggaggagguccuggccuacguggugcagcugccccucuacggggucaucgacacccccugcuggaagcugcacaccagcccccugugcacgaccaacaccaaggagggcuccaacaucugccucacccggacggaccgcgggugguacugcgacaacgccggcagcguguccuucuucccgcaggccgagaccugcaagguccagagcaaccggguguucugcgacaccaugaacucccugacccugcccagcgaggugaaccucugcaacaucgacaucuucaaccccaaguacgacugcaagaucaugacguccaagaccgacgucagcuccagcgugaucaccucccugggcgccaucgugagcugcuacgggaagaccaagugcacggcgagcaacaagaaccgcggcaucaucaagaccuucuccaacgggugcgacuacgucagcaacaagggcguggacaccguguccgucggcaacacccuguacugcgugaacaagcaggagggccagagccucuacgugaagggggagcccaucaucaacuucuacgacccgcuggucuuccccuccgacgaguucgacgccagcaucucccaggugaacgagaagaucaaccagagccuggccuucauccggaaguccgacgagcuccugcacaacgugaacgucggcaagagcaccacgaacaucaugaucaccaccaucaucaucgugaucaucgugauccugcugcuccugaucgccgucgggcuguuccucuacugcaaggcccgcuccacccccgugacgcugagcaaggaccagcuguccgggaucaacaacaucgcguucagcaacugaggacuaguggaagcauuuuccuggcugauuaaaagaaauuacucagcuauggucaucuguuccuguuagaaggcuaugcagcauauuauauacuaugcgcauguuaugaaaugcauaauaaaaaauuuuaaaaaaucuaaaagaucuaaaaaaaaaaaaaaaaaaaaaaaaaaaaaaaaaaaaaaaaaaaaaaaaaaaaaaaaaaaaaaaaugcaucccccccccccccccccccccccccccccccaaaggcucuuuucagagccaccagaauu

SEQ ID NO: 14792 - RNA, 1979 nt, Artificial Sequence
  mRNA product Design c-4 comprising derived and/or modified sequence from HRSV(Memphis-37)__AIY60640.1__F_DSCav1_mut2 (opt1)
gggagaguccgcucagccagguugcagaagcggcuuagcguguguccuaaucuucucucugcguguagguaggccugugccgcaaacaagcuuaccauggagcugcccauccucaagaccaacgccaucaccacgauccuggccgcggugacccugugcuucgccagcucccagaacaucaccgaggaguucuaccagagcacgugcuccgccgucagcaagggcuaccucggggcccugcgcaccggcugguacaccuccgugaucaccaucgagcugagcaacaucaaggagaacaagugcaacgggaccgacgccaaggugaagcucaucaagcaggagcuggacaaguacaagaacgcggucacggaccugcagcuccugaugcaguccaccccggccgccggcagcggguccgccaucugcagcggcaucgcggugugcaaggugcugcaccucgagggcgaggucaacaagaucaagaacgcccugcuguccaccaacaaggccguggugagccucuccaacggggucagcgugcugaccuucaaggugcuggaccucaagaacuacaucgacaagcagcugcugcccauccucaacaagcaguccugcagcauccccaacaucgagacggucaucgaguuccagcagaagaacaaccggcugcuggagaucacccgcgaguucuccgugaacgccggcgugaccacccccgucagcacguacaugcucaccaacuccgagcugcugagccucaucaacgacaugccgaucaccaacgaccagaagaagcugaugagcaacaacgugcagaucgugcggcagcaguccuacagcaucaugugcaucaucaaggaggagguccuggccuacguggugcagcucccccuguacggggucaucgacacccccugcuggaagcugcacacgagcccccucugcaccaccaacaccaaggagggcuccaacaucugccugacgcgcaccgaccgggggugguacugcgacaacgcgggcuccgugagcuucuucccgcaggccgagaccugcaaggugcaguccaaccgcgucuucugcgacaccaugaacagccugacgcuccccuccgaggugaaccugugcaacaucgacaucuucaaccccaaguacgacugcaagaucaugaccagcaagaccgacgucuccagcuccgugaucaccagccugggcgccaucguguccugcuacgggaagacgaagugcaccgccagcaacaagaaccggggcaucaucaagaccuucuccaacgggugcgacuacgucagcaacaagggcguggacaccguguccgucggcaacacgcucuacugcgugaacaagcaggaggggcagagccuguacgugaagggcgagcccaucaucaacuucuacgacccgcuggucuuccccagcgacgaguucgacgccuccaucagccaggugaacgagaagaucaaccagucccucgcguucauccgcaagagcgacgagcugcugcacaacgugaacgucgggaaguccaccaccaacaucaugaucaccaccaucaucaucgugaucaucgugauccuccugcugcucaucgccgucggccuguuccuguacugcaaggcccggagcacgcccgugacccuguccaaggaccagcucagcgggaucaacaacaucgccuucuccaacugaggacuaguggaagcauuuuccuggcugauuaaaagaaauuacucagcuauggucaucuguuccuguuagaaggcuaugcagcauauuauauacuaugcgcauguuaugaaaugcauaauaaaaaauuuuaaaaaaucuaaaagaucuaaaaaaaaaaaaaaaaaaaaaaaaaaaaaaaaaaaaaaaaaaaaaaaaaaaaaaaaaaaaaaaaugcaucccccccccccccccccccccccccccccccaaaggcucuuuucagagccaccagaauu

SEQ ID NO: 14793 - RNA, 1979 nt, Artificial Sequence
  mRNA product Design c-4 comprising derived and/or modified sequence from HRSV(Memphis-37)__AIY60640.1__F_DSCav1_mut2 (opt2)
gggagaguccgcucagccagguugcagaagcggcuuagcguguguccuaaucuucucucugcguguagguaggccugugccgcaaacaagcuuaccauggagcuccccauccucaagaccaacgccaucaccaccauccucgccgccgucacccucugcuucgccuccucccagaacaucaccgaggaguucuaccaguccaccugcuccgccgucuccaagggcuaccucggcgcccuccgcaccggcugguacaccuccgucaucaccaucgagcucuccaacaucaaggagaacaagugcaacggcaccgacgccaaggucaagcucaucaagcaggagcucgacaaguacaagaacgccgucaccgaccuccagcuccucaugcaguccacccccgccgccggcuccggcuccgccaucugcuccggcaucgccgucugcaagguccuccaccucgagggcgaggucaacaagaucaagaacgcccuccucuccaccaacaaggccgucgucucccucuccaacggcgucuccguccucaccuucaagguccucgaccucaagaacuacaucgacaagcagcuccuccccauccucaacaagcaguccugcuccauccccaacaucgagaccgucaucgaguuccagcagaagaacaaccgccuccucgagaucacccgcgaguucuccgucaacgccggcgucaccacccccgucuccaccuacaugcucaccaacuccgagcuccucucccucaucaacgacaugcccaucaccaacgaccagaagaagcucauguccaacaacguccagaucguccgccagcaguccuacuccaucaugugcaucaucaaggaggagguccucgccuacgucguccagcucccccucuacggcgucaucgacacccccugcuggaagcuccacaccuccccccucugcaccaccaacaccaaggagggcuccaacaucugccucacccgcaccgaccgcggcugguacugcgacaacgccggcuccgucuccuucuucccccaggccgagaccugcaagguccaguccaaccgcgucuucugcgacaccaugaacucccucacccuccccuccgaggucaaccucugcaacaucgacaucuucaaccccaaguacgacugcaagaucaugaccuccaagaccgacgucuccuccuccgucaucaccucccucggcgccaucgucuccugcuacggcaagaccaagugcaccgccuccaacaagaaccgcggcaucaucaagaccuucuccaacggcugcgacuacgucuccaacaagggcgucgacaccgucuccgucggcaacacccucuacugcgucaacaagcaggagggccagucccucuacgucaagggcgagcccaucaucaacuucuacgacccccucgucuuccccuccgacgaguucgacgccuccaucucccaggucaacgagaagaucaaccagucccucgccuucauccgcaaguccgacgagcuccuccacaacgucaacgucggcaaguccaccaccaacaucaugaucaccaccaucaucaucgucaucaucgucauccuccuccuccucaucgccgucggccucuuccucuacugcaaggcccgcuccacccccgucacccucuccaaggaccagcucuccggcaucaacaacaucgccuucuccaacugaggacuaguggaagcauuuuccuggcugauuaaaagaaauuacucagcuauggucaucuguuccuguuagaaggcuaugcagcauauuauauacuaugcgcauguuaugaaaugcauaauaaaaaauuuuaaaaaaucuaaaagaucuaaaaaaaaaaaaaaaaaaaaaaaaaaaaaaaaaaaaaaaaaaaaaaaaaaaaaaaaaaaaaaaaugcaucccccccccccccccccccccccccccccccaaaggcucuuuucagagccaccagaauu

SEQ ID NO: 14794 - RNA, 1979 nt, Artificial Sequence
  mRNA product Design c-4 comprising derived and/or modified sequence from HRSV(Memphis-37)__AIY60640.1__F_DSCav1_mut2 (opt3)
gggagaguccgcucagccagguugcagaagcggcuuagcguguguccuaaucuucucucugcguguagguaggccugugccgcaaacaagcuuaccauggagcugcccauccucaagaccaacgccauuacaacuauacuugcugcagugacgcugugcuucgccagcucccagaauaucaccgaagaguuuuaccaaucuacauguucagcggucaguaaaggcuauuugggggcuuuaagaacuggaugguacaccagcguuauuacaaucgaacuguccaacauuaaggagaauaaaugcaacgguaccgacgccaaggugaaacuaaucaagcaggaacucgauaaguauaaaaaugcaguaacugaccugcagcuucugaugcagucuacuccugccgcuggcucggggucagcaauauguagcggaaucgccgugugcaaggucuugcaccucgagggcgaggugaacaaaauuaagaaugcucugcugaguaccaacaaagccguugugucccucucuaauggugucagcguguuaacguucaagguacuggaucuuaagaacuacaucgacaaacaauugcugccaauucuaaauaagcaguccuguucaaucccgaacauagaaacuguuauugaguuucagcagaaaaauaacaggcuccuggaaaucacccgggaguucagugugaaugcgggggucacaacucccgugagcaccuauaugcuuacaaacucugagcuguugucccucauuaacgauaugccuaucaccaaugaccaaaagaaacugaugucaaacaaugugcagaucguccgccagcagagcuacaguauuaugugcauaaucaaggaagagguuuuagcauaugugguacaacugccacucuacggagugauugauacgcccuguuggaaacuucauacuucuccucugugcacaaccaacacuaaggaaggcuccaauaucuguuugacacgaaccgaccguggcugguacugcgauaacgccgggagcgucucguuuuucccacaggcugagacguguaaggugcagucuaauagaguuuucugcgacaccaugaacucccuaacacugcccucagaagugaaucucugcaacauagauauuuucaauccuaaauaugacuguaagaucaugacaaguaaaaccgaugucagcuccucugugaucacaagccugggagccauuguaucaugcuacgguaagacuaaauguaccgcaaguaacaagaauaggggcaucauuaagacauuuuccaacgggugcgacuauguuagcaauaaaggaguggacaccgucucugugggcaacacucuuuacugugucaacaagcaagagggucagucacuguaugugaaaggggagccaauaaucaauuucuacgauccguugguuuuucccagugacgaauuugaugcuagcauuucccaggugaacgagaagaucaaucagucucucgccuuuauccggaaaucggacgaacuguuacacaacguaaaugucggaaagagcacgacaaacauuaugauaaccacuaucauuaucgugauuaucguuauacugcuacuccugaucgcggugggccuuuucuuguauugcaaggcccgcuccaccccugucacacugucaaaagaucaacucaguggcauuaauaacaucgcauucucuaauugaggacuaguggaagcauuuuccuggcugauuaaaagaaauuacucagcuauggucaucuguuccuguuagaaggcuaugcagcauauuauauacuaugcgcauguuaugaaaugcauaauaaaaaauuuuaaaaaaucuaaaagaucuaaaaaaaaaaaaaaaaaaaaaaaaaaaaaaaaaaaaaaaaaaaaaaaaaaaaaaaaaaaaaaaaugcaucccccccccccccccccccccccccccccccaaaggcucuuuucagagccaccagaauu

SEQ ID NO: 14795 - RNA, 1979 nt, Artificial Sequence
  mRNA product Design c-4 comprising derived and/or modified sequence from HRSV(Memphis-37)__AIY60640.1__F_DSCav1_mut2 (opt4)
gggagaguccgcucagccagguugcagaagcggcuuagcguguguccuaaucuucucucugcguguagguaggccugugccgcaaacaagcuuaccauggagcugcccauccugaagaccaacgccaucaccaccauccuggccgccgugacccugugcuucgccagcagccagaacaucaccgaggaguucuaccagagcaccugcagcgccgugagcaagggcuaccugggcgcccugagaaccggcugguacaccagcgugaucaccaucgagcugagcaacaucaaggagaacaagugcaacggcaccgacgccaaggugaagcugaucaagcaggagcuggacaaguacaagaacgccgugaccgaccugcagcugcugaugcagagcacccccgccgccggcagcggcagcgccaucugcagcggcaucgccgugugcaaggugcugcaccuggagggcgaggugaacaagaucaagaacgcccugcugagcaccaacaaggccguggugagccugagcaacggcgugagcgugcugaccuucaaggugcuggaccugaagaacuacaucgacaagcagcugcugcccauccugaacaagcagagcugcagcauccccaacaucgagaccgugaucgaguuccagcagaagaacaacagacugcuggagaucaccagagaguucagcgugaacgccggcgugaccacccccgugagcaccuacaugcugaccaacagcgagcugcugagccugaucaacgacaugcccaucaccaacgaccagaagaagcugaugagcaacaacgugcagaucgugagacagcagagcuacagcaucaugugcaucaucaaggaggaggugcuggccuacguggugcagcugccccuguacggcgugaucgacacccccugcuggaagcugcacaccagcccccugugcaccaccaacaccaaggagggcagcaacaucugccugaccagaaccgacagaggcugguacugcgacaacgccggcagcgugagcuucuucccccaggccgagaccugcaaggugcagagcaacagaguguucugcgacaccaugaacagccugacccugcccagcgaggugaaccugugcaacaucgacaucuucaaccccaaguacgacugcaagaucaugaccagcaagaccgacgugagcagcagcgugaucaccagccugggcgccaucgugagcugcuacggcaagaccaagugcaccgccagcaacaagaacagaggcaucaucaagaccuucagcaacggcugcgacuacgugagcaacaagggcguggacaccgugagcgugggcaacacccuguacugcgugaacaagcaggagggccagagccuguacgugaagggcgagcccaucaucaacuucuacgacccccugguguuccccagcgacgaguucgacgccagcaucagccaggugaacgagaagaucaaccagagccuggccuucaucagaaagagcgacgagcugcugcacaacgugaacgugggcaagagcaccaccaacaucaugaucaccaccaucaucaucgugaucaucgugauccugcugcugcugaucgccgugggccuguuccuguacugcaaggccagaagcacccccgugacccugagcaaggaccagcugagcggcaucaacaacaucgccuucagcaacugaggacuaguggaagcauuuuccuggcugauuaaaagaaauuacucagcuauggucaucuguuccuguuagaaggcuaugcagcauauuauauacuaugcgcauguuaugaaaugcauaauaaaaaauuuuaaaaaaucuaaaagaucuaaaaaaaaaaaaaaaaaaaaaaaaaaaaaaaaaaaaaaaaaaaaaaaaaaaaaaaaaaaaaaaaugcaucccccccccccccccccccccccccccccccaaaggcucuuuucagagccaccagaauu

SEQ ID NO: 14796 - RNA, 1979 nt, Artificial Sequence
  mRNA product Design c-4 comprising derived and/or modified sequence from HRSV(Memphis-37)__AIY60640.1__F_DSCav1_mut2 (opt5)
gggagaguccgcucagccagguugcagaagcggcuuagcguguguccuaaucuucucucugcguguagguaggccugugccgcaaacaagcuuaccauggagcugcccauccucaagaccaacgccauuacaacgauccuggcugccgugacccuuugcuucgcgagcucccagaauauuacagaagaguuuuaccaaucuaccuguagcgcugucuccaaaggcuaucugggggcccucagaacaggaugguacaccucuguuaucacaauugaacugagcaacaucaaggagaauaaaugcaacggcaccgacgccaaggugaaacuuaucaagcaggaacuggauaaguauaaaaaugcugugacggaccuccagcugcugaugcaguccaccccugccgcugggucuggaagcgccauuuguuccggcaucgcggucugcaaggugcuccaccuggagggggagguuaacaaaauuaagaaugcccuucugagcacaaacaaagcuguggucucucucuccaauggagugagcguucugaccuucaaggugcuugaucugaagaacuacaucgacaaacaacuccugccgauucugaauaagcagucuuguuccauccccaacauugaaacagucaucgaguuucagcagaaaaauaaccggcuccuggaaaucacccgcgaguucagcgugaaugccggcgugacgacaccugucucuaccuauaugcuuacaaacuccgagcugcucagccugauuaacgauaugcccaucaccaaugaccaaaagaaacuuauguccaacaauguucagauugugagacagcagucuuacagcaucaugugcauuaucaaggaagaggugcuggcuuaugucgugcaacucccucuguacggcguuaucgauacccccuguuggaaacugcauacauccccucucugcacgaccaacacaaaggaagggagcaauauuugucugacccggacagaccgcggaugguacugcgauaacgccggcucuguguccuuuuucccgcaggcggagaccuguaagguccagagcaauagaguguuuugcgacacgaugaacucucuuacacugcccagcgaaguuaaucucugcaacaucgauauuuucaauccuaaauaugacuguaagaucaugaccuccaaaaccgaugugucuagcuccgucauuacaagccugggggccaucgugucuugcuacggaaagaccaaauguacagcuuccaacaagaaucggggcaucauuaagacguuuagcaacgggugcgacuaugucucuaauaaaggaguggacaccguuuccgugggcaacacacuuuacugugucaacaagcaagagggccagagccuguaugugaaaggggagcccaucauuaauuucuacgauccucucguuuuucccuccgacgaguucgaugccucuaucagccaggugaacgaaaagauuaaucagucccuggcuuuuauccgcaaaucugacgaacugcuccacaacgucaaugugggaaagagcaccacaaacauuaugaucaccacgaucauuaucgugauuaucguuauucugcuucugcucaucgccgucggccuguuccuguauugcaaggccagauccaccccggugacacuuagcaaagaucaacucucugggaucaauaacauugcuuucuccaauugaggacuaguggaagcauuuuccuggcugauuaaaagaaauuacucagcuauggucaucuguuccuguuagaaggcuaugcagcauauuauauacuaugcgcauguuaugaaaugcauaauaaaaaauuuuaaaaaaucuaaaagaucuaaaaaaaaaaaaaaaaaaaaaaaaaaaaaaaaaaaaaaaaaaaaaaaaaaaaaaaaaaaaaaaaugcaucccccccccccccccccccccccccccccccaaaggcucuuuucagagccaccagaauu

SEQ ID NO: 14797 - RNA, 1979 nt, Artificial Sequence
  mRNA product Design c-4 comprising derived and/or modified sequence from HRSV(Memphis-37)__AIY60640.1__F_DSCav1_mut2 (opt6)
gggagaguccgcucagccagguugcagaagcggcuuagcguguguccuaaucuucucucugcguguagguaggccugugccgcaaacaagcuuaccauggagcuuccaauauuaaaaacaaacgcuauaacaacuauacucgcagcaguuacacucugcuucgcauccucacaaaacauaacugaagaauuuuaccaauccacuugcucagccguaucaaaaggauaucuaggagcacuuagaaccggaugguauacaucagugauaacaauagaacuaagcaacauaaaagaaaacaagugcaacggaacugacgcaaaagucaaacuaaucaaacaagaacuagacaaauacaaaaacgcaguaacagaccuacaauuacuaaugcaaucaacaccagcagcaggaucagguucagccauaugcucagguaucgcuguaugcaaaguccuucaccuagaaggugaaguaaacaaaauuaaaaacgcccuacucaguacaaauaaagcugucguaaguuuaucaaacggaguaucaguccuuacauucaaaguauuagaccuaaaaaauuauauagacaaacaauuacuaccaauacucaacaaacaaucaugcucaauaccaaauauagaaaccguaauagaauuucagcaaaaaaauaacagauuacuagaaauaaccagagaauuuucagucaacgcaggagucacaacacccgucucaaccuacaugcuaaccaacucagaacuucuaucucuuaucaacgacaugcccauaaccaaugaucaaaaaaaauuaaugucuaauaacguucaaauaguaagacaacaaucauacucaauaaugugcauaaucaaagaagaaguauuagcauacguaguacaacuaccccuauauggaguaauagacacacccugcuggaaacuacacacauccccccucuguacaacaaacacuaaagaaggaucaaacauuugccuaacaagaacagaccgcggaugguacugcgacaacgcaggcuccguaucuuucuuuccacaagccgaaacuuguaaaguucaaucaaacagaguauuuugcgauacaaugaacuccuuaacauuaccuucagaaguaaaccuaugcaacauagacaucuucaacccaaaauacgacugcaaaauaaugaccucaaaaacagacguauccucaucagucauaaccuccuuaggagcaauaguaucauguuacggaaaaacaaaauguacagcaucaaauaaaaauagaggaauaauaaaaaccuucuccaacggaugcgacuacguauccaauaaaggaguagacaccguaucaguaggaaacacacuauacuguguaaacaaacaagaaggccaaucucuauauguaaaaggcgaaccaaucauaaauuuuuacgacccacuugucuuccccuccgacgaauuugacgcaagcauaucacaaguaaacgaaaaaaucaaccaaagccuagccuucauaaggaaaucugacgaauuacuucauaacguaaauguuggaaaaucaaccacaaacauaaugauaaccaccaucauaauuguaauaauaguaauacuacuacuacuaauugcaguaggacucuuccuauauugcaaagcucgcucaacaccaguuaccuuaucaaaagaccaacuaucuggaauaaacaacauagccuuuuccaacuaaggacuaguggaagcauuuuccuggcugauuaaaagaaauuacucagcuauggucaucuguuccuguuagaaggcuaugcagcauauuauauacuaugcgcauguuaugaaaugcauaauaaaaaauuuuaaaaaaucuaaaagaucuaaaaaaaaaaaaaaaaaaaaaaaaaaaaaaaaaaaaaaaaaaaaaaaaaaaaaaaaaaaaaaaaugcaucccccccccccccccccccccccccccccccaaaggcucuuuucagagccaccagaauu

SEQ ID NO: 14798 - RNA, 1979 nt, Artificial Sequence
  mRNA product Design c-4 comprising derived and/or modified sequence from HRSV(Memphis-37)__AIY60640.1__F_DSCav1_mut2 (opt11)
gggagaguccgcucagccagguugcagaagcggcuuagcguguguccuaaucuucucucugcguguagguaggccugugccgcaaacaagcuuaccauggaacucccaauccuaaaaaccaacgccaucaccaccauccucgccgcugucaccuuaugcuuugccagcagccaaaacaucaccgaagaauuuuaccaaucaacaugcuccgccgucucaaaaggauaccucggcgcccuacgcaccggcugguacacaagcgucauaaccaucgagcucuccaacaucaaggaaaacaaaugcaauggaaccgacgccaaagucaaacuaaucaaacaagaacuagacaaguacaagaacgcagucaccgaccuccaacuccucaugcaguccacccccgcagcaggcucuggcucagcaauaugcuccggcaucgcugucugcaaaguccuacaccucgaaggcgaagucaacaaaaucaaaaacgcccuacuguccacaaacaaagccgucgucucccuauccaacggcgucucgguccuaaccuuuaagguucucgaucucaaaaauuacauagacaaacaacuacuccccauccucaacaaacaaucuugcucaauccccaacaucgaaaccgucaucgaguuccaacagaaaaacaacagacuacucgaaaucacccgcgaguucucagucaacgcgggcgucacaacacccgucagcaccuacaugcuaaccaacuccgaacuccucagccucauuaacgacaugcccaucaccaacgaccaaaagaaacuuauguccaacaacguucaaaucguccgccaacaauccuacuccaucaugugcaucaucaaagaagaaguacucgccuacguaguccaacugccccucuacggcgucaucgauaccccaugcuggaaacuacacaccagcccccucugcaccaccaacaccaaagaaggcuccaauaucugcuuaacccgcacagaccguggcugguacugcgauaacgccggcuccgucuccuucuucccccaagcagaaaccugcaaaguacaauccaaccgagucuucugugacaccaugaacucccuaacccuuccaucagaagucaaccucugcaacaucgacaucuucaaccccaaguacgacugcaaaaucaugacauccaaaaccgaugucucaagcagcgucauaaccucacucggcgcuaucguaagcugcuacggcaaaaccaaaugcaccgcaucaaacaaaaaccgcggaaucaucaaaaccuucagcaacggaugcgacuacguuuccaacaaaggcguagacaccgucuccgucggaaacacccucuacugcguaaacaaacaggaaggccaaucccucuacgucaaaggcgaacccaucauaaacuucuacgauccccuugucuucccguccgaugaguucgacgccuccaucucgcaagucaacgaaaagauaaaccaaucacuagcauucauccguaaauccgacgaacuccuccacaacgucaacgucggaaaauccaccaccaacauaaugaucaccaccauaaucaucgucaucaucguaauacuauuacuccucauagccgucggccucuuccuauauugcaaagcccgaucaacccccguaacccuuucuaaagaccaacuguccggaaucaacaacaucgcuuucagcaacugaggacuaguggaagcauuuuccuggcugauuaaaagaaauuacucagcuauggucaucuguuccuguuagaaggcuaugcagcauauuauauacuaugcgcauguuaugaaaugcauaauaaaaaauuuuaaaaaaucuaaaagaucuaaaaaaaaaaaaaaaaaaaaaaaaaaaaaaaaaaaaaaaaaaaaaaaaaaaaaaaaaaaaaaaaugcaucccccccccccccccccccccccccccccccaaaggcucuuuucagagccaccagaauu

SEQ ID NO: 14799 - RNA, 1897 nt, Artificial Sequence
  mRNA product Design c-5 comprising derived and/or modified sequence from HRSV(Memphis-37)__AIY60640.1__F_DSCav1_mut2 (opt1)
gggagagcggcucggccauuuugucccagucaguccggaggcugcggcugcagaaguaccgccugcggaguaacugcaaagaagcuuaccauggagcugcccauccucaagaccaacgccaucaccacgauccuggccgcggugacccugugcuucgccagcucccagaacaucaccgaggaguucuaccagagcacgugcuccgccgucagcaagggcuaccucggcgcccugcgcaccgggugguacaccagcgugaucaccaucgagcuguccaacaucaaggagaacaagugcaacggcaccgacgccaaggugaagcucaucaagcaggagcuggacaaguacaagaacgcggucacggaccugcagcuccugaugcagagcaccccggccgccggcuccgggagcgcgaucugcuccggcaucgccgucugcaaggugcugcaccucgagggcgaggugaacaagaucaagaacgcccugcuguccaccaacaaggccgucgugagccucuccaacggggugagcguccugaccuucaaggugcuggaccucaagaacuacaucgacaagcagcugcugcccauccugaacaagcagagcugcuccauccccaacaucgagaccgucaucgaguuccagcagaagaacaaccgccuccuggagaucacgcgggaguucagcgugaacgcgggcgugaccacccccgucuccaccuacaugcugacgaacagcgagcuccugucccugaucaacgacaugccgaucaccaacgaccagaagaagcucaugagcaacaacgugcagaucgugcgccagcaguccuacagcaucaugugcaucaucaaggaggagguccuggccuacguggugcagcugccccucuacggggucaucgacacccccugcuggaagcugcacaccagcccccugugcacgaccaacaccaaggagggcuccaacaucugccucacccggacggaccgcgggugguacugcgacaacgccggcagcguguccuucuucccgcaggccgagaccugcaagguccagagcaaccggguguucugcgacaccaugaacucccugacccugcccagcgaggugaaccucugcaacaucgacaucuucaaccccaaguacgacugcaagaucaugacguccaagaccgacgucagcuccagcgugaucaccucccugggcgccaucgugagcugcuacgggaagaccaagugcacggcgagcaacaagaaccgcggcaucaucaagaccuucuccaacgggugcgacuacgucagcaacaagggcguggacaccguguccgucggcaacacccuguacugcgugaacaagcaggagggccagagccucuacgugaagggggagcccaucaucaacuucuacgacccgcuggucuuccccuccgacgaguucgacgccagcaucucccaggugaacgagaagaucaaccagagccuggccuucauccggaaguccgacgagcuccugcacaacgugaacgucggcaagagcaccacgaacaucaugaucaccaccaucaucaucgugaucaucgugauccugcugcuccugaucgccgucgggcuguuccucuacugcaaggcccgcuccacccccgugacgcugagcaaggaccagcuguccgggaucaacaacaucgcguucagcaacugaggacuagucccuguucccagagcccacuuuuuuuucuuuuuuugaaauaaaauagccugucuuucagaucuaaaaaaaaaaaaaaaaaaaaaaaaaaaaaaaaaaaaaaaaaaaaaaaaaaaaaaaaaaaaaaaaugcaucccccccccccccccccccccccccccccccaaaggcucuuuucagagccaccagaauu

SEQ ID NO: 14800 - RNA, 1897 nt, Artificial Sequence
  mRNA product Design c-5 comprising derived and/or modified sequence from HRSV(Memphis-37)__AIY60640.1__F_DSCav1_mut2 (opt1)
gggagagcggcucggccauuuugucccagucaguccggaggcugcggcugcagaaguaccgccugcggaguaacugcaaagaagcuuaccauggagcugcccauccucaagaccaacgccaucaccacgauccuggccgcggugacccugugcuucgccagcucccagaacaucaccgaggaguucuaccagagcacgugcuccgccgucagcaagggcuaccucggggcccugcgcaccggcugguacaccuccgugaucaccaucgagcugagcaacaucaaggagaacaagugcaacgggaccgacgccaaggugaagcucaucaagcaggagcuggacaaguacaagaacgcggucacggaccugcagcuccugaugcaguccaccccggccgccggcagcggguccgccaucugcagcggcaucgcggugugcaaggugcugcaccucgagggcgaggucaacaagaucaagaacgcccugcuguccaccaacaaggccguggugagccucuccaacggggucagcgugcugaccuucaaggugcuggaccucaagaacuacaucgacaagcagcugcugcccauccucaacaagcaguccugcagcauccccaacaucgagacggucaucgaguuccagcagaagaacaaccggcugcuggagaucacccgcgaguucuccgugaacgccggcgugaccacccccgucagcacguacaugcucaccaacuccgagcugcugagccucaucaacgacaugccgaucaccaacgaccagaagaagcugaugagcaacaacgugcagaucgugcggcagcaguccuacagcaucaugugcaucaucaaggaggagguccuggccuacguggugcagcucccccuguacggggucaucgacacccccugcuggaagcugcacacgagcccccucugcaccaccaacaccaaggagggcuccaacaucugccugacgcgcaccgaccgggggugguacugcgacaacgcgggcuccgugagcuucuucccgcaggccgagaccugcaaggugcaguccaaccgcgucuucugcgacaccaugaacagccugacgcuccccuccgaggugaaccugugcaacaucgacaucuucaaccccaaguacgacugcaagaucaugaccagcaagaccgacgucuccagcuccgugaucaccagccugggcgccaucguguccugcuacgggaagacgaagugcaccgccagcaacaagaaccggggcaucaucaagaccuucuccaacgggugcgacuacgucagcaacaagggcguggacaccguguccgucggcaacacgcucuacugcgugaacaagcaggaggggcagagccuguacgugaagggcgagcccaucaucaacuucuacgacccgcuggucuuccccagcgacgaguucgacgccuccaucagccaggugaacgagaagaucaaccagucccucgcguucauccgcaagagcgacgagcugcugcacaacgugaacgucgggaaguccaccaccaacaucaugaucaccaccaucaucaucgugaucaucgugauccuccugcugcucaucgccgucggccuguuccuguacugcaaggcccggagcacgcccgugacccuguccaaggaccagcucagcgggaucaacaacaucgccuucuccaacugaggacuagucccuguucccagagcccacuuuuuuuucuuuuuuugaaauaaaauagccugucuuucagaucuaaaaaaaaaaaaaaaaaaaaaaaaaaaaaaaaaaaaaaaaaaaaaaaaaaaaaaaaaaaaaaaaugcaucccccccccccccccccccccccccccccccaaaggcucuuuucagagccaccagaauu

SEQ ID NO: 14801 - RNA, 1897 nt, Artificial Sequence
  mRNA product Design c-5 comprising derived and/or modified sequence from HRSV(Memphis-37)__AIY60640.1__F_DSCav1_mut2 (opt2)
gggagagcggcucggccauuuugucccagucaguccggaggcugcggcugcagaaguaccgccugcggaguaacugcaaagaagcuuaccauggagcuccccauccucaagaccaacgccaucaccaccauccucgccgccgucacccucugcuucgccuccucccagaacaucaccgaggaguucuaccaguccaccugcuccgccgucuccaagggcuaccucggcgcccuccgcaccggcugguacaccuccgucaucaccaucgagcucuccaacaucaaggagaacaagugcaacggcaccgacgccaaggucaagcucaucaagcaggagcucgacaaguacaagaacgccgucaccgaccuccagcuccucaugcaguccacccccgccgccggcuccggcuccgccaucugcuccggcaucgccgucugcaagguccuccaccucgagggcgaggucaacaagaucaagaacgcccuccucuccaccaacaaggccgucgucucccucuccaacggcgucuccguccucaccuucaagguccucgaccucaagaacuacaucgacaagcagcuccuccccauccucaacaagcaguccugcuccauccccaacaucgagaccgucaucgaguuccagcagaagaacaaccgccuccucgagaucacccgcgaguucuccgucaacgccggcgucaccacccccgucuccaccuacaugcucaccaacuccgagcuccucucccucaucaacgacaugcccaucaccaacgaccagaagaagcucauguccaacaacguccagaucguccgccagcaguccuacuccaucaugugcaucaucaaggaggagguccucgccuacgucguccagcucccccucuacggcgucaucgacacccccugcuggaagcuccacaccuccccccucugcaccaccaacaccaaggagggcuccaacaucugccucacccgcaccgaccgcggcugguacugcgacaacgccggcuccgucuccuucuucccccaggccgagaccugcaagguccaguccaaccgcgucuucugcgacaccaugaacucccucacccuccccuccgaggucaaccucugcaacaucgacaucuucaaccccaaguacgacugcaagaucaugaccuccaagaccgacgucuccuccuccgucaucaccucccucggcgccaucgucuccugcuacggcaagaccaagugcaccgccuccaacaagaaccgcggcaucaucaagaccuucuccaacggcugcgacuacgucuccaacaagggcgucgacaccgucuccgucggcaacacccucuacugcgucaacaagcaggagggccagucccucuacgucaagggcgagcccaucaucaacuucuacgacccccucgucuuccccuccgacgaguucgacgccuccaucucccaggucaacgagaagaucaaccagucccucgccuucauccgcaaguccgacgagcuccuccacaacgucaacgucggcaaguccaccaccaacaucaugaucaccaccaucaucaucgucaucaucgucauccuccuccuccucaucgccgucggccucuuccucuacugcaaggcccgcuccacccccgucacccucuccaaggaccagcucuccggcaucaacaacaucgccuucuccaacugaggacuagucccuguucccagagcccacuuuuuuuucuuuuuuugaaauaaaauagccugucuuucagaucuaaaaaaaaaaaaaaaaaaaaaaaaaaaaaaaaaaaaaaaaaaaaaaaaaaaaaaaaaaaaaaaaugcaucccccccccccccccccccccccccccccccaaaggcucuuuucagagccaccagaauu

SEQ ID NO: 14802 - RNA, 1897 nt, Artificial Sequence
  mRNA product Design c-5 comprising derived and/or modified sequence from HRSV(Memphis-37)__AIY60640.1__F_DSCav1_mut2 (opt3)
gggagagcggcucggccauuuugucccagucaguccggaggcugcggcugcagaaguaccgccugcggaguaacugcaaagaagcuuaccauggagcugcccauccucaagaccaacgccauuacaacuauacuugcugcagugacgcugugcuucgccagcucccagaauaucaccgaagaguuuuaccaaucuacauguucagcggucaguaaaggcuauuugggggcuuuaagaacuggaugguacaccagcguuauuacaaucgaacuguccaacauuaaggagaauaaaugcaacgguaccgacgccaaggugaaacuaaucaagcaggaacucgauaaguauaaaaaugcaguaacugaccugcagcuucugaugcagucuacuccugccgcuggcucggggucagcaauauguagcggaaucgccgugugcaaggucuugcaccucgagggcgaggugaacaaaauuaagaaugcucugcugaguaccaacaaagccguugugucccucucuaauggugucagcguguuaacguucaagguacuggaucuuaagaacuacaucgacaaacaauugcugccaauucuaaauaagcaguccuguucaaucccgaacauagaaacuguuauugaguuucagcagaaaaauaacaggcuccuggaaaucacccgggaguucagugugaaugcgggggucacaacucccgugagcaccuauaugcuuacaaacucugagcuguugucccucauuaacgauaugccuaucaccaaugaccaaaagaaacugaugucaaacaaugugcagaucguccgccagcagagcuacaguauuaugugcauaaucaaggaagagguuuuagcauaugugguacaacugccacucuacggagugauugauacgcccuguuggaaacuucauacuucuccucugugcacaaccaacacuaaggaaggcuccaauaucuguuugacacgaaccgaccguggcugguacugcgauaacgccgggagcgucucguuuuucccacaggcugagacguguaaggugcagucuaauagaguuuucugcgacaccaugaacucccuaacacugcccucagaagugaaucucugcaacauagauauuuucaauccuaaauaugacuguaagaucaugacaaguaaaaccgaugucagcuccucugugaucacaagccugggagccauuguaucaugcuacgguaagacuaaauguaccgcaaguaacaagaauaggggcaucauuaagacauuuuccaacgggugcgacuauguuagcaauaaaggaguggacaccgucucugugggcaacacucuuuacugugucaacaagcaagagggucagucacuguaugugaaaggggagccaauaaucaauuucuacgauccguugguuuuucccagugacgaauuugaugcuagcauuucccaggugaacgagaagaucaaucagucucucgccuuuauccggaaaucggacgaacuguuacacaacguaaaugucggaaagagcacgacaaacauuaugauaaccacuaucauuaucgugauuaucguuauacugcuacuccugaucgcggugggccuuuucuuguauugcaaggcccgcuccaccccugucacacugucaaaagaucaacucaguggcauuaauaacaucgcauucucuaauugaggacuagucccuguucccagagcccacuuuuuuuucuuuuuuugaaauaaaauagccugucuuucagaucuaaaaaaaaaaaaaaaaaaaaaaaaaaaaaaaaaaaaaaaaaaaaaaaaaaaaaaaaaaaaaaaaugcaucccccccccccccccccccccccccccccccaaaggcucuuuucagagccaccagaauu

SEQ ID NO: 14803 - RNA, 1897 nt, Artificial Sequence
  mRNA product Design c-5 comprising derived and/or modified sequence from HRSV(Memphis-37)__AIY60640.1__F_DSCav1_mut2 (opt4)
gggagagcggcucggccauuuugucccagucaguccggaggcugcggcugcagaaguaccgccugcggaguaacugcaaagaagcuuaccauggagcugcccauccugaagaccaacgccaucaccaccauccuggccgccgugacccugugcuucgccagcagccagaacaucaccgaggaguucuaccagagcaccugcagcgccgugagcaagggcuaccugggcgcccugagaaccggcugguacaccagcgugaucaccaucgagcugagcaacaucaaggagaacaagugcaacggcaccgacgccaaggugaagcugaucaagcaggagcuggacaaguacaagaacgccgugaccgaccugcagcugcugaugcagagcacccccgccgccggcagcggcagcgccaucugcagcggcaucgccgugugcaaggugcugcaccuggagggcgaggugaacaagaucaagaacgcccugcugagcaccaacaaggccguggugagccugagcaacggcgugagcgugcugaccuucaaggugcuggaccugaagaacuacaucgacaagcagcugcugcccauccugaacaagcagagcugcagcauccccaacaucgagaccgugaucgaguuccagcagaagaacaacagacugcuggagaucaccagagaguucagcgugaacgccggcgugaccacccccgugagcaccuacaugcugaccaacagcgagcugcugagccugaucaacgacaugcccaucaccaacgaccagaagaagcugaugagcaacaacgugcagaucgugagacagcagagcuacagcaucaugugcaucaucaaggaggaggugcuggccuacguggugcagcugccccuguacggcgugaucgacacccccugcuggaagcugcacaccagcccccugugcaccaccaacaccaaggagggcagcaacaucugccugaccagaaccgacagaggcugguacugcgacaacgccggcagcgugagcuucuucccccaggccgagaccugcaaggugcagagcaacagaguguucugcgacaccaugaacagccugacccugcccagcgaggugaaccugugcaacaucgacaucuucaaccccaaguacgacugcaagaucaugaccagcaagaccgacgugagcagcagcgugaucaccagccugggcgccaucgugagcugcuacggcaagaccaagugcaccgccagcaacaagaacagaggcaucaucaagaccuucagcaacggcugcgacuacgugagcaacaagggcguggacaccgugagcgugggcaacacccuguacugcgugaacaagcaggagggccagagccuguacgugaagggcgagcccaucaucaacuucuacgacccccugguguuccccagcgacgaguucgacgccagcaucagccaggugaacgagaagaucaaccagagccuggccuucaucagaaagagcgacgagcugcugcacaacgugaacgugggcaagagcaccaccaacaucaugaucaccaccaucaucaucgugaucaucgugauccugcugcugcugaucgccgugggccuguuccuguacugcaaggccagaagcacccccgugacccugagcaaggaccagcugagcggcaucaacaacaucgccuucagcaacugaggacuagucccuguucccagagcccacuuuuuuuucuuuuuuugaaauaaaauagccugucuuucagaucuaaaaaaaaaaaaaaaaaaaaaaaaaaaaaaaaaaaaaaaaaaaaaaaaaaaaaaaaaaaaaaaaugcaucccccccccccccccccccccccccccccccaaaggcucuuuucagagccaccagaauu

SEQ ID NO: 14804 - RNA, 1897 nt, Artificial Sequence
  mRNA product Design c-5 comprising derived and/or modified sequence from HRSV(Memphis-37)__AIY60640.1__F_DSCav1_mut2 (opt5)
gggagagcggcucggccauuuugucccagucaguccggaggcugcggcugcagaaguaccgccugcggaguaacugcaaagaagcuuaccauggagcugcccauccucaagaccaacgccauuacaacgauccuggcugccgugacccuuugcuucgcgagcucccagaauauuacagaagaguuuuaccaaucuaccuguagcgcugucuccaaaggcuaucugggggcccucagaacaggaugguacaccucuguuaucacaauugaacugagcaacaucaaggagaauaaaugcaacggcaccgacgccaaggugaaacuuaucaagcaggaacuggauaaguauaaaaaugcugugacggaccuccagcugcugaugcaguccaccccugccgcugggucuggaagcgccauuuguuccggcaucgcggucugcaaggugcuccaccuggagggggagguuaacaaaauuaagaaugcccuucugagcacaaacaaagcuguggucucucucuccaauggagugagcguucugaccuucaaggugcuugaucugaagaacuacaucgacaaacaacuccugccgauucugaauaagcagucuuguuccauccccaacauugaaacagucaucgaguuucagcagaaaaauaaccggcuccuggaaaucacccgcgaguucagcgugaaugccggcgugacgacaccugucucuaccuauaugcuuacaaacuccgagcugcucagccugauuaacgauaugcccaucaccaaugaccaaaagaaacuuauguccaacaauguucagauugugagacagcagucuuacagcaucaugugcauuaucaaggaagaggugcuggcuuaugucgugcaacucccucuguacggcguuaucgauacccccuguuggaaacugcauacauccccucucugcacgaccaacacaaaggaagggagcaauauuugucugacccggacagaccgcggaugguacugcgauaacgccggcucuguguccuuuuucccgcaggcggagaccuguaagguccagagcaauagaguguuuugcgacacgaugaacucucuuacacugcccagcgaaguuaaucucugcaacaucgauauuuucaauccuaaauaugacuguaagaucaugaccuccaaaaccgaugugucuagcuccgucauuacaagccugggggccaucgugucuugcuacggaaagaccaaauguacagcuuccaacaagaaucggggcaucauuaagacguuuagcaacgggugcgacuaugucucuaauaaaggaguggacaccguuuccgugggcaacacacuuuacugugucaacaagcaagagggccagagccuguaugugaaaggggagcccaucauuaauuucuacgauccucucguuuuucccuccgacgaguucgaugccucuaucagccaggugaacgaaaagauuaaucagucccuggcuuuuauccgcaaaucugacgaacugcuccacaacgucaaugugggaaagagcaccacaaacauuaugaucaccacgaucauuaucgugauuaucguuauucugcuucugcucaucgccgucggccuguuccuguauugcaaggccagauccaccccggugacacuuagcaaagaucaacucucugggaucaauaacauugcuuucuccaauugaggacuagucccuguucccagagcccacuuuuuuuucuuuuuuugaaauaaaauagccugucuuucagaucuaaaaaaaaaaaaaaaaaaaaaaaaaaaaaaaaaaaaaaaaaaaaaaaaaaaaaaaaaaaaaaaaugcaucccccccccccccccccccccccccccccccaaaggcucuuuucagagccaccagaauu

SEQ ID NO: 14805 - RNA, 1897 nt, Artificial Sequence
  mRNA product Design c-5 comprising derived and/or modified sequence from HRSV(Memphis-37)__AIY60640.1__F_DSCav1_mut2 (opt6)
gggagagcggcucggccauuuugucccagucaguccggaggcugcggcugcagaaguaccgccugcggaguaacugcaaagaagcuuaccauggagcuuccaauauuaaaaacaaacgcuauaacaacuauacucgcagcaguuacacucugcuucgcauccucacaaaacauaacugaagaauuuuaccaauccacuugcucagccguaucaaaaggauaucuaggagcacuuagaaccggaugguauacaucagugauaacaauagaacuaagcaacauaaaagaaaacaagugcaacggaacugacgcaaaagucaaacuaaucaaacaagaacuagacaaauacaaaaacgcaguaacagaccuacaauuacuaaugcaaucaacaccagcagcaggaucagguucagccauaugcucagguaucgcuguaugcaaaguccuucaccuagaaggugaaguaaacaaaauuaaaaacgcccuacucaguacaaauaaagcugucguaaguuuaucaaacggaguaucaguccuuacauucaaaguauuagaccuaaaaaauuauauagacaaacaauuacuaccaauacucaacaaacaaucaugcucaauaccaaauauagaaaccguaauagaauuucagcaaaaaaauaacagauuacuagaaauaaccagagaauuuucagucaacgcaggagucacaacacccgucucaaccuacaugcuaaccaacucagaacuucuaucucuuaucaacgacaugcccauaaccaaugaucaaaaaaaauuaaugucuaauaacguucaaauaguaagacaacaaucauacucaauaaugugcauaaucaaagaagaaguauuagcauacguaguacaacuaccccuauauggaguaauagacacacccugcuggaaacuacacacauccccccucuguacaacaaacacuaaagaaggaucaaacauuugccuaacaagaacagaccgcggaugguacugcgacaacgcaggcuccguaucuuucuuuccacaagccgaaacuuguaaaguucaaucaaacagaguauuuugcgauacaaugaacuccuuaacauuaccuucagaaguaaaccuaugcaacauagacaucuucaacccaaaauacgacugcaaaauaaugaccucaaaaacagacguauccucaucagucauaaccuccuuaggagcaauaguaucauguuacggaaaaacaaaauguacagcaucaaauaaaaauagaggaauaauaaaaaccuucuccaacggaugcgacuacguauccaauaaaggaguagacaccguaucaguaggaaacacacuauacuguguaaacaaacaagaaggccaaucucuauauguaaaaggcgaaccaaucauaaauuuuuacgacccacuugucuuccccuccgacgaauuugacgcaagcauaucacaaguaaacgaaaaaaucaaccaaagccuagccuucauaaggaaaucugacgaauuacuucauaacguaaauguuggaaaaucaaccacaaacauaaugauaaccaccaucauaauuguaauaauaguaauacuacuacuacuaauugcaguaggacucuuccuauauugcaaagcucgcucaacaccaguuaccuuaucaaaagaccaacuaucuggaauaaacaacauagccuuuuccaacuaaggacuagucccuguucccagagcccacuuuuuuuucuuuuuuugaaauaaaauagccugucuuucagaucuaaaaaaaaaaaaaaaaaaaaaaaaaaaaaaaaaaaaaaaaaaaaaaaaaaaaaaaaaaaaaaaaugcaucccccccccccccccccccccccccccccccaaaggcucuuuucagagccaccagaauu

SEQ ID NO: 14806 - RNA, 1897 nt, Artificial Sequence
  mRNA product Design c-5 comprising derived and/or modified sequence from HRSV(Memphis-37)__AIY60640.1__F_DSCav1_mut2 (opt11)
gggagagcggcucggccauuuugucccagucaguccggaggcugcggcugcagaaguaccgccugcggaguaacugcaaagaagcuuaccauggaacucccaauccuaaaaaccaacgccaucaccaccauccucgccgcugucaccuuaugcuuugccagcagccaaaacaucaccgaagaauuuuaccaaucaacaugcuccgccgucucaaaaggauaccucggcgcccuacgcaccggcugguacacaagcgucauaaccaucgagcucuccaacaucaaggaaaacaaaugcaauggaaccgacgccaaagucaaacuaaucaaacaagaacuagacaaguacaagaacgcagucaccgaccuccaacuccucaugcaguccacccccgcagcaggcucuggcucagcaauaugcuccggcaucgcugucugcaaaguccuacaccucgaaggcgaagucaacaaaaucaaaaacgcccuacuguccacaaacaaagccgucgucucccuauccaacggcgucucgguccuaaccuuuaagguucucgaucucaaaaauuacauagacaaacaacuacuccccauccucaacaaacaaucuugcucaauccccaacaucgaaaccgucaucgaguuccaacagaaaaacaacagacuacucgaaaucacccgcgaguucucagucaacgcgggcgucacaacacccgucagcaccuacaugcuaaccaacuccgaacuccucagccucauuaacgacaugcccaucaccaacgaccaaaagaaacuuauguccaacaacguucaaaucguccgccaacaauccuacuccaucaugugcaucaucaaagaagaaguacucgccuacguaguccaacugccccucuacggcgucaucgauaccccaugcuggaaacuacacaccagcccccucugcaccaccaacaccaaagaaggcuccaauaucugcuuaacccgcacagaccguggcugguacugcgauaacgccggcuccgucuccuucuucccccaagcagaaaccugcaaaguacaauccaaccgagucuucugugacaccaugaacucccuaacccuuccaucagaagucaaccucugcaacaucgacaucuucaaccccaaguacgacugcaaaaucaugacauccaaaaccgaugucucaagcagcgucauaaccucacucggcgcuaucguaagcugcuacggcaaaaccaaaugcaccgcaucaaacaaaaaccgcggaaucaucaaaaccuucagcaacggaugcgacuacguuuccaacaaaggcguagacaccgucuccgucggaaacacccucuacugcguaaacaaacaggaaggccaaucccucuacgucaaaggcgaacccaucauaaacuucuacgauccccuugucuucccguccgaugaguucgacgccuccaucucgcaagucaacgaaaagauaaaccaaucacuagcauucauccguaaauccgacgaacuccuccacaacgucaacgucggaaaauccaccaccaacauaaugaucaccaccauaaucaucgucaucaucguaauacuauuacuccucauagccgucggccucuuccuauauugcaaagcccgaucaacccccguaacccuuucuaaagaccaacuguccggaaucaacaacaucgcuuucagcaacugaggacuagucccuguucccagagcccacuuuuuuuucuuuuuuugaaauaaaauagccugucuuucagaucuaaaaaaaaaaaaaaaaaaaaaaaaaaaaaaaaaaaaaaaaaaaaaaaaaaaaaaaaaaaaaaaaugcaucccccccccccccccccccccccccccccccaaaggcucuuuucagagccaccagaauu

SEQ ID NO: 14807 - RNA, 1906 nt, Artificial Sequence
  mRNA product Design d-1 comprising derived and/or modified sequence from HRSV(Memphis-37)__AIY60640.1__F_DSCav1_mut2 (opt1)
gggagacccgugacccggaaguuguacggcuacgcgacuuucccucccacaaacccucgcgcccuuccuuuccuacuugggcccggcagaaagcuuaccauggagcugcccauccucaagaccaacgccaucaccacgauccuggccgcggugacccugugcuucgccagcucccagaacaucaccgaggaguucuaccagagcacgugcuccgccgucagcaagggcuaccucggcgcccugcgcaccgggugguacaccagcgugaucaccaucgagcuguccaacaucaaggagaacaagugcaacggcaccgacgccaaggugaagcucaucaagcaggagcuggacaaguacaagaacgcggucacggaccugcagcuccugaugcagagcaccccggccgccggcuccgggagcgcgaucugcuccggcaucgccgucugcaaggugcugcaccucgagggcgaggugaacaagaucaagaacgcccugcuguccaccaacaaggccgucgugagccucuccaacggggugagcguccugaccuucaaggugcuggaccucaagaacuacaucgacaagcagcugcugcccauccugaacaagcagagcugcuccauccccaacaucgagaccgucaucgaguuccagcagaagaacaaccgccuccuggagaucacgcgggaguucagcgugaacgcgggcgugaccacccccgucuccaccuacaugcugacgaacagcgagcuccugucccugaucaacgacaugccgaucaccaacgaccagaagaagcucaugagcaacaacgugcagaucgugcgccagcaguccuacagcaucaugugcaucaucaaggaggagguccuggccuacguggugcagcugccccucuacggggucaucgacacccccugcuggaagcugcacaccagcccccugugcacgaccaacaccaaggagggcuccaacaucugccucacccggacggaccgcgggugguacugcgacaacgccggcagcguguccuucuucccgcaggccgagaccugcaagguccagagcaaccggguguucugcgacaccaugaacucccugacccugcccagcgaggugaaccucugcaacaucgacaucuucaaccccaaguacgacugcaagaucaugacguccaagaccgacgucagcuccagcgugaucaccucccugggcgccaucgugagcugcuacgggaagaccaagugcacggcgagcaacaagaaccgcggcaucaucaagaccuucuccaacgggugcgacuacgucagcaacaagggcguggacaccguguccgucggcaacacccuguacugcgugaacaagcaggagggccagagccucuacgugaagggggagcccaucaucaacuucuacgacccgcuggucuuccccuccgacgaguucgacgccagcaucucccaggugaacgagaagaucaaccagagccuggccuucauccggaaguccgacgagcuccugcacaacgugaacgucggcaagagcaccacgaacaucaugaucaccaccaucaucaucgugaucaucgugauccugcugcuccugaucgccgucgggcuguuccucuacugcaaggcccgcuccacccccgugacgcugagcaaggaccagcuguccgggaucaacaacaucgcguucagcaacugaggacuagucccuguucccagagcccacuuuuuuuucuuuuuuugaaauaaaauagccugucuuucagaucuaaaaaaaaaaaaaaaaaaaaaaaaaaaaaaaaaaaaaaaaaaaaaaaaaaaaaaaaaaaaaaaaugcaucccccccccccccccccccccccccccccccaaaggcucuuuucagagccaccagaauu

SEQ ID NO: 14808 - RNA, 1906 nt, Artificial Sequence
  mRNA product Design d-1 comprising derived and/or modified sequence from HRSV(Memphis-37)__AIY60640.1__F_DSCav1_mut2 (opt1)
gggagacccgugacccggaaguuguacggcuacgcgacuuucccucccacaaacccucgcgcccuuccuuuccuacuugggcccggcagaaagcuuaccauggagcugcccauccucaagaccaacgccaucaccacgauccuggccgcggugacccugugcuucgccagcucccagaacaucaccgaggaguucuaccagagcacgugcuccgccgucagcaagggcuaccucggggcccugcgcaccggcugguacaccuccgugaucaccaucgagcugagcaacaucaaggagaacaagugcaacgggaccgacgccaaggugaagcucaucaagcaggagcuggacaaguacaagaacgcggucacggaccugcagcuccugaugcaguccaccccggccgccggcagcggguccgccaucugcagcggcaucgcggugugcaaggugcugcaccucgagggcgaggucaacaagaucaagaacgcccugcuguccaccaacaaggccguggugagccucuccaacggggucagcgugcugaccuucaaggugcuggaccucaagaacuacaucgacaagcagcugcugcccauccucaacaagcaguccugcagcauccccaacaucgagacggucaucgaguuccagcagaagaacaaccggcugcuggagaucacccgcgaguucuccgugaacgccggcgugaccacccccgucagcacguacaugcucaccaacuccgagcugcugagccucaucaacgacaugccgaucaccaacgaccagaagaagcugaugagcaacaacgugcagaucgugcggcagcaguccuacagcaucaugugcaucaucaaggaggagguccuggccuacguggugcagcucccccuguacggggucaucgacacccccugcuggaagcugcacacgagcccccucugcaccaccaacaccaaggagggcuccaacaucugccugacgcgcaccgaccgggggugguacugcgacaacgcgggcuccgugagcuucuucccgcaggccgagaccugcaaggugcaguccaaccgcgucuucugcgacaccaugaacagccugacgcuccccuccgaggugaaccugugcaacaucgacaucuucaaccccaaguacgacugcaagaucaugaccagcaagaccgacgucuccagcuccgugaucaccagccugggcgccaucguguccugcuacgggaagacgaagugcaccgccagcaacaagaaccggggcaucaucaagaccuucuccaacgggugcgacuacgucagcaacaagggcguggacaccguguccgucggcaacacgcucuacugcgugaacaagcaggaggggcagagccuguacgugaagggcgagcccaucaucaacuucuacgacccgcuggucuuccccagcgacgaguucgacgccuccaucagccaggugaacgagaagaucaaccagucccucgcguucauccgcaagagcgacgagcugcugcacaacgugaacgucgggaaguccaccaccaacaucaugaucaccaccaucaucaucgugaucaucgugauccuccugcugcucaucgccgucggccuguuccuguacugcaaggcccggagcacgcccgugacccuguccaaggaccagcucagcgggaucaacaacaucgccuucuccaacugaggacuagucccuguucccagagcccacuuuuuuuucuuuuuuugaaauaaaauagccugucuuucagaucuaaaaaaaaaaaaaaaaaaaaaaaaaaaaaaaaaaaaaaaaaaaaaaaaaaaaaaaaaaaaaaaaugcaucccccccccccccccccccccccccccccccaaaggcucuuuucagagccaccagaauu

SEQ ID NO: 14809 - RNA, 1906 nt, Artificial Sequence
  mRNA product Design d-1 comprising derived and/or modified sequence from HRSV(Memphis-37)__AIY60640.1__F_DSCav1_mut2 (opt2)
gggagacccgugacccggaaguuguacggcuacgcgacuuucccucccacaaacccucgcgcccuuccuuuccuacuugggcccggcagaaagcuuaccauggagcuccccauccucaagaccaacgccaucaccaccauccucgccgccgucacccucugcuucgccuccucccagaacaucaccgaggaguucuaccaguccaccugcuccgccgucuccaagggcuaccucggcgcccuccgcaccggcugguacaccuccgucaucaccaucgagcucuccaacaucaaggagaacaagugcaacggcaccgacgccaaggucaagcucaucaagcaggagcucgacaaguacaagaacgccgucaccgaccuccagcuccucaugcaguccacccccgccgccggcuccggcuccgccaucugcuccggcaucgccgucugcaagguccuccaccucgagggcgaggucaacaagaucaagaacgcccuccucuccaccaacaaggccgucgucucccucuccaacggcgucuccguccucaccuucaagguccucgaccucaagaacuacaucgacaagcagcuccuccccauccucaacaagcaguccugcuccauccccaacaucgagaccgucaucgaguuccagcagaagaacaaccgccuccucgagaucacccgcgaguucuccgucaacgccggcgucaccacccccgucuccaccuacaugcucaccaacuccgagcuccucucccucaucaacgacaugcccaucaccaacgaccagaagaagcucauguccaacaacguccagaucguccgccagcaguccuacuccaucaugugcaucaucaaggaggagguccucgccuacgucguccagcucccccucuacggcgucaucgacacccccugcuggaagcuccacaccuccccccucugcaccaccaacaccaaggagggcuccaacaucugccucacccgcaccgaccgcggcugguacugcgacaacgccggcuccgucuccuucuucccccaggccgagaccugcaagguccaguccaaccgcgucuucugcgacaccaugaacucccucacccuccccuccgaggucaaccucugcaacaucgacaucuucaaccccaaguacgacugcaagaucaugaccuccaagaccgacgucuccuccuccgucaucaccucccucggcgccaucgucuccugcuacggcaagaccaagugcaccgccuccaacaagaaccgcggcaucaucaagaccuucuccaacggcugcgacuacgucuccaacaagggcgucgacaccgucuccgucggcaacacccucuacugcgucaacaagcaggagggccagucccucuacgucaagggcgagcccaucaucaacuucuacgacccccucgucuuccccuccgacgaguucgacgccuccaucucccaggucaacgagaagaucaaccagucccucgccuucauccgcaaguccgacgagcuccuccacaacgucaacgucggcaaguccaccaccaacaucaugaucaccaccaucaucaucgucaucaucgucauccuccuccuccucaucgccgucggccucuuccucuacugcaaggcccgcuccacccccgucacccucuccaaggaccagcucuccggcaucaacaacaucgccuucuccaacugaggacuagucccuguucccagagcccacuuuuuuuucuuuuuuugaaauaaaauagccugucuuucagaucuaaaaaaaaaaaaaaaaaaaaaaaaaaaaaaaaaaaaaaaaaaaaaaaaaaaaaaaaaaaaaaaaugcaucccccccccccccccccccccccccccccccaaaggcucuuuucagagccaccagaauu

SEQ ID NO: 14810 - RNA, 1906 nt, Artificial Sequence
  mRNA product Design d-1 comprising derived and/or modified sequence from HRSV(Memphis-37)__AIY60640.1__F_DSCav1_mut2 (opt3)
gggagacccgugacccggaaguuguacggcuacgcgacuuucccucccacaaacccucgcgcccuuccuuuccuacuugggcccggcagaaagcuuaccauggagcugcccauccucaagaccaacgccauuacaacuauacuugcugcagugacgcugugcuucgccagcucccagaauaucaccgaagaguuuuaccaaucuacauguucagcggucaguaaaggcuauuugggggcuuuaagaacuggaugguacaccagcguuauuacaaucgaacuguccaacauuaaggagaauaaaugcaacgguaccgacgccaaggugaaacuaaucaagcaggaacucgauaaguauaaaaaugcaguaacugaccugcagcuucugaugcagucuacuccugccgcuggcucggggucagcaauauguagcggaaucgccgugugcaaggucuugcaccucgagggcgaggugaacaaaauuaagaaugcucugcugaguaccaacaaagccguugugucccucucuaauggugucagcguguuaacguucaagguacuggaucuuaagaacuacaucgacaaacaauugcugccaauucuaaauaagcaguccuguucaaucccgaacauagaaacuguuauugaguuucagcagaaaaauaacaggcuccuggaaaucacccgggaguucagugugaaugcgggggucacaacucccgugagcaccuauaugcuuacaaacucugagcuguugucccucauuaacgauaugccuaucaccaaugaccaaaagaaacugaugucaaacaaugugcagaucguccgccagcagagcuacaguauuaugugcauaaucaaggaagagguuuuagcauaugugguacaacugccacucuacggagugauugauacgcccuguuggaaacuucauacuucuccucugugcacaaccaacacuaaggaaggcuccaauaucuguuugacacgaaccgaccguggcugguacugcgauaacgccgggagcgucucguuuuucccacaggcugagacguguaaggugcagucuaauagaguuuucugcgacaccaugaacucccuaacacugcccucagaagugaaucucugcaacauagauauuuucaauccuaaauaugacuguaagaucaugacaaguaaaaccgaugucagcuccucugugaucacaagccugggagccauuguaucaugcuacgguaagacuaaauguaccgcaaguaacaagaauaggggcaucauuaagacauuuuccaacgggugcgacuauguuagcaauaaaggaguggacaccgucucugugggcaacacucuuuacugugucaacaagcaagagggucagucacuguaugugaaaggggagccaauaaucaauuucuacgauccguugguuuuucccagugacgaauuugaugcuagcauuucccaggugaacgagaagaucaaucagucucucgccuuuauccggaaaucggacgaacuguuacacaacguaaaugucggaaagagcacgacaaacauuaugauaaccacuaucauuaucgugauuaucguuauacugcuacuccugaucgcggugggccuuuucuuguauugcaaggcccgcuccaccccugucacacugucaaaagaucaacucaguggcauuaauaacaucgcauucucuaauugaggacuagucccuguucccagagcccacuuuuuuuucuuuuuuugaaauaaaauagccugucuuucagaucuaaaaaaaaaaaaaaaaaaaaaaaaaaaaaaaaaaaaaaaaaaaaaaaaaaaaaaaaaaaaaaaaugcaucccccccccccccccccccccccccccccccaaaggcucuuuucagagccaccagaauu

SEQ ID NO: 14811 - RNA, 1906 nt, Artificial Sequence
  mRNA product Design d-1 comprising derived and/or modified sequence from HRSV(Memphis-37)__AIY60640.1__F_DSCav1_mut2 (opt4)
gggagacccgugacccggaaguuguacggcuacgcgacuuucccucccacaaacccucgcgcccuuccuuuccuacuugggcccggcagaaagcuuaccauggagcugcccauccugaagaccaacgccaucaccaccauccuggccgccgugacccugugcuucgccagcagccagaacaucaccgaggaguucuaccagagcaccugcagcgccgugagcaagggcuaccugggcgcccugagaaccggcugguacaccagcgugaucaccaucgagcugagcaacaucaaggagaacaagugcaacggcaccgacgccaaggugaagcugaucaagcaggagcuggacaaguacaagaacgccgugaccgaccugcagcugcugaugcagagcacccccgccgccggcagcggcagcgccaucugcagcggcaucgccgugugcaaggugcugcaccuggagggcgaggugaacaagaucaagaacgcccugcugagcaccaacaaggccguggugagccugagcaacggcgugagcgugcugaccuucaaggugcuggaccugaagaacuacaucgacaagcagcugcugcccauccugaacaagcagagcugcagcauccccaacaucgagaccgugaucgaguuccagcagaagaacaacagacugcuggagaucaccagagaguucagcgugaacgccggcgugaccacccccgugagcaccuacaugcugaccaacagcgagcugcugagccugaucaacgacaugcccaucaccaacgaccagaagaagcugaugagcaacaacgugcagaucgugagacagcagagcuacagcaucaugugcaucaucaaggaggaggugcuggccuacguggugcagcugccccuguacggcgugaucgacacccccugcuggaagcugcacaccagcccccugugcaccaccaacaccaaggagggcagcaacaucugccugaccagaaccgacagaggcugguacugcgacaacgccggcagcgugagcuucuucccccaggccgagaccugcaaggugcagagcaacagaguguucugcgacaccaugaacagccugacccugcccagcgaggugaaccugugcaacaucgacaucuucaaccccaaguacgacugcaagaucaugaccagcaagaccgacgugagcagcagcgugaucaccagccugggcgccaucgugagcugcuacggcaagaccaagugcaccgccagcaacaagaacagaggcaucaucaagaccuucagcaacggcugcgacuacgugagcaacaagggcguggacaccgugagcgugggcaacacccuguacugcgugaacaagcaggagggccagagccuguacgugaagggcgagcccaucaucaacuucuacgacccccugguguuccccagcgacgaguucgacgccagcaucagccaggugaacgagaagaucaaccagagccuggccuucaucagaaagagcgacgagcugcugcacaacgugaacgugggcaagagcaccaccaacaucaugaucaccaccaucaucaucgugaucaucgugauccugcugcugcugaucgccgugggccuguuccuguacugcaaggccagaagcacccccgugacccugagcaaggaccagcugagcggcaucaacaacaucgccuucagcaacugaggacuagucccuguucccagagcccacuuuuuuuucuuuuuuugaaauaaaauagccugucuuucagaucuaaaaaaaaaaaaaaaaaaaaaaaaaaaaaaaaaaaaaaaaaaaaaaaaaaaaaaaaaaaaaaaaugcaucccccccccccccccccccccccccccccccaaaggcucuuuucagagccaccagaauu

SEQ ID NO: 14812 - RNA, 1906 nt, Artificial Sequence
  mRNA product Design d-1 comprising derived and/or modified sequence from HRSV(Memphis-37)__AIY60640.1__F_DSCav1_mut2 (opt5)
gggagacccgugacccggaaguuguacggcuacgcgacuuucccucccacaaacccucgcgcccuuccuuuccuacuugggcccggcagaaagcuuaccauggagcugcccauccucaagaccaacgccauuacaacgauccuggcugccgugacccuuugcuucgcgagcucccagaauauuacagaagaguuuuaccaaucuaccuguagcgcugucuccaaaggcuaucugggggcccucagaacaggaugguacaccucuguuaucacaauugaacugagcaacaucaaggagaauaaaugcaacggcaccgacgccaaggugaaacuuaucaagcaggaacuggauaaguauaaaaaugcugugacggaccuccagcugcugaugcaguccaccccugccgcugggucuggaagcgccauuuguuccggcaucgcggucugcaaggugcuccaccuggagggggagguuaacaaaauuaagaaugcccuucugagcacaaacaaagcuguggucucucucuccaauggagugagcguucugaccuucaaggugcuugaucugaagaacuacaucgacaaacaacuccugccgauucugaauaagcagucuuguuccauccccaacauugaaacagucaucgaguuucagcagaaaaauaaccggcuccuggaaaucacccgcgaguucagcgugaaugccggcgugacgacaccugucucuaccuauaugcuuacaaacuccgagcugcucagccugauuaacgauaugcccaucaccaaugaccaaaagaaacuuauguccaacaauguucagauugugagacagcagucuuacagcaucaugugcauuaucaaggaagaggugcuggcuuaugucgugcaacucccucuguacggcguuaucgauacccccuguuggaaacugcauacauccccucucugcacgaccaacacaaaggaagggagcaauauuugucugacccggacagaccgcggaugguacugcgauaacgccggcucuguguccuuuuucccgcaggcggagaccuguaagguccagagcaauagaguguuuugcgacacgaugaacucucuuacacugcccagcgaaguuaaucucugcaacaucgauauuuucaauccuaaauaugacuguaagaucaugaccuccaaaaccgaugugucuagcuccgucauuacaagccugggggccaucgugucuugcuacggaaagaccaaauguacagcuuccaacaagaaucggggcaucauuaagacguuuagcaacgggugcgacuaugucucuaauaaaggaguggacaccguuuccgugggcaacacacuuuacugugucaacaagcaagagggccagagccuguaugugaaaggggagcccaucauuaauuucuacgauccucucguuuuucccuccgacgaguucgaugccucuaucagccaggugaacgaaaagauuaaucagucccuggcuuuuauccgcaaaucugacgaacugcuccacaacgucaaugugggaaagagcaccacaaacauuaugaucaccacgaucauuaucgugauuaucguuauucugcuucugcucaucgccgucggccuguuccuguauugcaaggccagauccaccccggugacacuuagcaaagaucaacucucugggaucaauaacauugcuuucuccaauugaggacuagucccuguucccagagcccacuuuuuuuucuuuuuuugaaauaaaauagccugucuuucagaucuaaaaaaaaaaaaaaaaaaaaaaaaaaaaaaaaaaaaaaaaaaaaaaaaaaaaaaaaaaaaaaaaugcaucccccccccccccccccccccccccccccccaaaggcucuuuucagagccaccagaauu

SEQ ID NO: 14813 - RNA, 1906 nt, Artificial Sequence
  mRNA product Design d-1 comprising derived and/or modified sequence from HRSV(Memphis-37)__AIY60640.1__F_DSCav1_mut2 (opt6)
gggagacccgugacccggaaguuguacggcuacgcgacuuucccucccacaaacccucgcgcccuuccuuuccuacuugggcccggcagaaagcuuaccauggagcuuccaauauuaaaaacaaacgcuauaacaacuauacucgcagcaguuacacucugcuucgcauccucacaaaacauaacugaagaauuuuaccaauccacuugcucagccguaucaaaaggauaucuaggagcacuuagaaccggaugguauacaucagugauaacaauagaacuaagcaacauaaaagaaaacaagugcaacggaacugacgcaaaagucaaacuaaucaaacaagaacuagacaaauacaaaaacgcaguaacagaccuacaauuacuaaugcaaucaacaccagcagcaggaucagguucagccauaugcucagguaucgcuguaugcaaaguccuucaccuagaaggugaaguaaacaaaauuaaaaacgcccuacucaguacaaauaaagcugucguaaguuuaucaaacggaguaucaguccuuacauucaaaguauuagaccuaaaaaauuauauagacaaacaauuacuaccaauacucaacaaacaaucaugcucaauaccaaauauagaaaccguaauagaauuucagcaaaaaaauaacagauuacuagaaauaaccagagaauuuucagucaacgcaggagucacaacacccgucucaaccuacaugcuaaccaacucagaacuucuaucucuuaucaacgacaugcccauaaccaaugaucaaaaaaaauuaaugucuaauaacguucaaauaguaagacaacaaucauacucaauaaugugcauaaucaaagaagaaguauuagcauacguaguacaacuaccccuauauggaguaauagacacacccugcuggaaacuacacacauccccccucuguacaacaaacacuaaagaaggaucaaacauuugccuaacaagaacagaccgcggaugguacugcgacaacgcaggcuccguaucuuucuuuccacaagccgaaacuuguaaaguucaaucaaacagaguauuuugcgauacaaugaacuccuuaacauuaccuucagaaguaaaccuaugcaacauagacaucuucaacccaaaauacgacugcaaaauaaugaccucaaaaacagacguauccucaucagucauaaccuccuuaggagcaauaguaucauguuacggaaaaacaaaauguacagcaucaaauaaaaauagaggaauaauaaaaaccuucuccaacggaugcgacuacguauccaauaaaggaguagacaccguaucaguaggaaacacacuauacuguguaaacaaacaagaaggccaaucucuauauguaaaaggcgaaccaaucauaaauuuuuacgacccacuugucuuccccuccgacgaauuugacgcaagcauaucacaaguaaacgaaaaaaucaaccaaagccuagccuucauaaggaaaucugacgaauuacuucauaacguaaauguuggaaaaucaaccacaaacauaaugauaaccaccaucauaauuguaauaauaguaauacuacuacuacuaauugcaguaggacucuuccuauauugcaaagcucgcucaacaccaguuaccuuaucaaaagaccaacuaucuggaauaaacaacauagccuuuuccaacuaaggacuagucccuguucccagagcccacuuuuuuuucuuuuuuugaaauaaaauagccugucuuucagaucuaaaaaaaaaaaaaaaaaaaaaaaaaaaaaaaaaaaaaaaaaaaaaaaaaaaaaaaaaaaaaaaaugcaucccccccccccccccccccccccccccccccaaaggcucuuuucagagccaccagaauu

SEQ ID NO: 14814 - RNA, 1906 nt, Artificial Sequence
  mRNA product Design d-1 comprising derived and/or modified sequence from HRSV(Memphis-37)__AIY60640.1__F_DSCav1_mut2 (opt11)
gggagacccgugacccggaaguuguacggcuacgcgacuuucccucccacaaacccucgcgcccuuccuuuccuacuugggcccggcagaaagcuuaccauggaacucccaauccuaaaaaccaacgccaucaccaccauccucgccgcugucaccuuaugcuuugccagcagccaaaacaucaccgaagaauuuuaccaaucaacaugcuccgccgucucaaaaggauaccucggcgcccuacgcaccggcugguacacaagcgucauaaccaucgagcucuccaacaucaaggaaaacaaaugcaauggaaccgacgccaaagucaaacuaaucaaacaagaacuagacaaguacaagaacgcagucaccgaccuccaacuccucaugcaguccacccccgcagcaggcucuggcucagcaauaugcuccggcaucgcugucugcaaaguccuacaccucgaaggcgaagucaacaaaaucaaaaacgcccuacuguccacaaacaaagccgucgucucccuauccaacggcgucucgguccuaaccuuuaagguucucgaucucaaaaauuacauagacaaacaacuacuccccauccucaacaaacaaucuugcucaauccccaacaucgaaaccgucaucgaguuccaacagaaaaacaacagacuacucgaaaucacccgcgaguucucagucaacgcgggcgucacaacacccgucagcaccuacaugcuaaccaacuccgaacuccucagccucauuaacgacaugcccaucaccaacgaccaaaagaaacuuauguccaacaacguucaaaucguccgccaacaauccuacuccaucaugugcaucaucaaagaagaaguacucgccuacguaguccaacugccccucuacggcgucaucgauaccccaugcuggaaacuacacaccagcccccucugcaccaccaacaccaaagaaggcuccaauaucugcuuaacccgcacagaccguggcugguacugcgauaacgccggcuccgucuccuucuucccccaagcagaaaccugcaaaguacaauccaaccgagucuucugugacaccaugaacucccuaacccuuccaucagaagucaaccucugcaacaucgacaucuucaaccccaaguacgacugcaaaaucaugacauccaaaaccgaugucucaagcagcgucauaaccucacucggcgcuaucguaagcugcuacggcaaaaccaaaugcaccgcaucaaacaaaaaccgcggaaucaucaaaaccuucagcaacggaugcgacuacguuuccaacaaaggcguagacaccgucuccgucggaaacacccucuacugcguaaacaaacaggaaggccaaucccucuacgucaaaggcgaacccaucauaaacuucuacgauccccuugucuucccguccgaugaguucgacgccuccaucucgcaagucaacgaaaagauaaaccaaucacuagcauucauccguaaauccgacgaacuccuccacaacgucaacgucggaaaauccaccaccaacauaaugaucaccaccauaaucaucgucaucaucguaauacuauuacuccucauagccgucggccucuuccuauauugcaaagcccgaucaacccccguaacccuuucuaaagaccaacuguccggaaucaacaacaucgcuuucagcaacugaggacuagucccuguucccagagcccacuuuuuuuucuuuuuuugaaauaaaauagccugucuuucagaucuaaaaaaaaaaaaaaaaaaaaaaaaaaaaaaaaaaaaaaaaaaaaaaaaaaaaaaaaaaaaaaaaugcaucccccccccccccccccccccccccccccccaaaggcucuuuucagagccaccagaauu

SEQ ID NO: 14815 - RNA, 1961 nt, Artificial Sequence
  mRNA product Design d-2 comprising derived and/or modified sequence from HRSV(Memphis-37)__AIY60640.1__F_DSCav1_mut2 (opt1)
gggagagcggcucggccauuuugucccagucaguccggaggcugcggcugcagaaguaccgccugcggaguaacugcaaagaagcuuaccauggagcugcccauccucaagaccaacgccaucaccacgauccuggccgcggugacccugugcuucgccagcucccagaacaucaccgaggaguucuaccagagcacgugcuccgccgucagcaagggcuaccucggcgcccugcgcaccgggugguacaccagcgugaucaccaucgagcuguccaacaucaaggagaacaagugcaacggcaccgacgccaaggugaagcucaucaagcaggagcuggacaaguacaagaacgcggucacggaccugcagcuccugaugcagagcaccccggccgccggcuccgggagcgcgaucugcuccggcaucgccgucugcaaggugcugcaccucgagggcgaggugaacaagaucaagaacgcccugcuguccaccaacaaggccgucgugagccucuccaacggggugagcguccugaccuucaaggugcuggaccucaagaacuacaucgacaagcagcugcugcccauccugaacaagcagagcugcuccauccccaacaucgagaccgucaucgaguuccagcagaagaacaaccgccuccuggagaucacgcgggaguucagcgugaacgcgggcgugaccacccccgucuccaccuacaugcugacgaacagcgagcuccugucccugaucaacgacaugccgaucaccaacgaccagaagaagcucaugagcaacaacgugcagaucgugcgccagcaguccuacagcaucaugugcaucaucaaggaggagguccuggccuacguggugcagcugccccucuacggggucaucgacacccccugcuggaagcugcacaccagcccccugugcacgaccaacaccaaggagggcuccaacaucugccucacccggacggaccgcgggugguacugcgacaacgccggcagcguguccuucuucccgcaggccgagaccugcaagguccagagcaaccggguguucugcgacaccaugaacucccugacccugcccagcgaggugaaccucugcaacaucgacaucuucaaccccaaguacgacugcaagaucaugacguccaagaccgacgucagcuccagcgugaucaccucccugggcgccaucgugagcugcuacgggaagaccaagugcacggcgagcaacaagaaccgcggcaucaucaagaccuucuccaacgggugcgacuacgucagcaacaagggcguggacaccguguccgucggcaacacccuguacugcgugaacaagcaggagggccagagccucuacgugaagggggagcccaucaucaacuucuacgacccgcuggucuuccccuccgacgaguucgacgccagcaucucccaggugaacgagaagaucaaccagagccuggccuucauccggaaguccgacgagcuccugcacaacgugaacgucggcaagagcaccacgaacaucaugaucaccaccaucaucaucgugaucaucgugauccugcugcuccugaucgccgucgggcuguuccucuacugcaaggcccgcuccacccccgugacgcugagcaaggaccagcuguccgggaucaacaacaucgcguucagcaacugaggacuaguaauaaggaaacuguaugaaugucugugggcaggaagugaagagauccuucuguaaagguuuuuggaauuaugucugcugaauaauaaacuuuuuugaaauaauaaaucugguagaaaaaugagaucuaaaaaaaaaaaaaaaaaaaaaaaaaaaaaaaaaaaaaaaaaaaaaaaaaaaaaaaaaaaaaaaaugcaucccccccccccccccccccccccccccccccaaaggcucuuuucagagccaccagaauu

SEQ ID NO: 14816 - RNA, 1961 nt, Artificial Sequence
  mRNA product Design d-2 comprising derived and/or modified sequence from HRSV(Memphis-37)__AIY60640.1__F_DSCav1_mut2 (opt1)
gggagagcggcucggccauuuugucccagucaguccggaggcugcggcugcagaaguaccgccugcggaguaacugcaaagaagcuuaccauggagcugcccauccucaagaccaacgccaucaccacgauccuggccgcggugacccugugcuucgccagcucccagaacaucaccgaggaguucuaccagagcacgugcuccgccgucagcaagggcuaccucggggcccugcgcaccggcugguacaccuccgugaucaccaucgagcugagcaacaucaaggagaacaagugcaacgggaccgacgccaaggugaagcucaucaagcaggagcuggacaaguacaagaacgcggucacggaccugcagcuccugaugcaguccaccccggccgccggcagcggguccgccaucugcagcggcaucgcggugugcaaggugcugcaccucgagggcgaggucaacaagaucaagaacgcccugcuguccaccaacaaggccguggugagccucuccaacggggucagcgugcugaccuucaaggugcuggaccucaagaacuacaucgacaagcagcugcugcccauccucaacaagcaguccugcagcauccccaacaucgagacggucaucgaguuccagcagaagaacaaccggcugcuggagaucacccgcgaguucuccgugaacgccggcgugaccacccccgucagcacguacaugcucaccaacuccgagcugcugagccucaucaacgacaugccgaucaccaacgaccagaagaagcugaugagcaacaacgugcagaucgugcggcagcaguccuacagcaucaugugcaucaucaaggaggagguccuggccuacguggugcagcucccccuguacggggucaucgacacccccugcuggaagcugcacacgagcccccucugcaccaccaacaccaaggagggcuccaacaucugccugacgcgcaccgaccgggggugguacugcgacaacgcgggcuccgugagcuucuucccgcaggccgagaccugcaaggugcaguccaaccgcgucuucugcgacaccaugaacagccugacgcuccccuccgaggugaaccugugcaacaucgacaucuucaaccccaaguacgacugcaagaucaugaccagcaagaccgacgucuccagcuccgugaucaccagccugggcgccaucguguccugcuacgggaagacgaagugcaccgccagcaacaagaaccggggcaucaucaagaccuucuccaacgggugcgacuacgucagcaacaagggcguggacaccguguccgucggcaacacgcucuacugcgugaacaagcaggaggggcagagccuguacgugaagggcgagcccaucaucaacuucuacgacccgcuggucuuccccagcgacgaguucgacgccuccaucagccaggugaacgagaagaucaaccagucccucgcguucauccgcaagagcgacgagcugcugcacaacgugaacgucgggaaguccaccaccaacaucaugaucaccaccaucaucaucgugaucaucgugauccuccugcugcucaucgccgucggccuguuccuguacugcaaggcccggagcacgcccgugacccuguccaaggaccagcucagcgggaucaacaacaucgccuucuccaacugaggacuaguaauaaggaaacuguaugaaugucugugggcaggaagugaagagauccuucuguaaagguuuuuggaauuaugucugcugaauaauaaacuuuuuugaaauaauaaaucugguagaaaaaugagaucuaaaaaaaaaaaaaaaaaaaaaaaaaaaaaaaaaaaaaaaaaaaaaaaaaaaaaaaaaaaaaaaaugcaucccccccccccccccccccccccccccccccaaaggcucuuuucagagccaccagaauu

SEQ ID NO: 14817 - RNA, 1961 nt, Artificial Sequence
  mRNA product Design d-2 comprising derived and/or modified sequence from HRSV(Memphis-37)__AIY60640.1__F_DSCav1_mut2 (opt2)
gggagagcggcucggccauuuugucccagucaguccggaggcugcggcugcagaaguaccgccugcggaguaacugcaaagaagcuuaccauggagcuccccauccucaagaccaacgccaucaccaccauccucgccgccgucacccucugcuucgccuccucccagaacaucaccgaggaguucuaccaguccaccugcuccgccgucuccaagggcuaccucggcgcccuccgcaccggcugguacaccuccgucaucaccaucgagcucuccaacaucaaggagaacaagugcaacggcaccgacgccaaggucaagcucaucaagcaggagcucgacaaguacaagaacgccgucaccgaccuccagcuccucaugcaguccacccccgccgccggcuccggcuccgccaucugcuccggcaucgccgucugcaagguccuccaccucgagggcgaggucaacaagaucaagaacgcccuccucuccaccaacaaggccgucgucucccucuccaacggcgucuccguccucaccuucaagguccucgaccucaagaacuacaucgacaagcagcuccuccccauccucaacaagcaguccugcuccauccccaacaucgagaccgucaucgaguuccagcagaagaacaaccgccuccucgagaucacccgcgaguucuccgucaacgccggcgucaccacccccgucuccaccuacaugcucaccaacuccgagcuccucucccucaucaacgacaugcccaucaccaacgaccagaagaagcucauguccaacaacguccagaucguccgccagcaguccuacuccaucaugugcaucaucaaggaggagguccucgccuacgucguccagcucccccucuacggcgucaucgacacccccugcuggaagcuccacaccuccccccucugcaccaccaacaccaaggagggcuccaacaucugccucacccgcaccgaccgcggcugguacugcgacaacgccggcuccgucuccuucuucccccaggccgagaccugcaagguccaguccaaccgcgucuucugcgacaccaugaacucccucacccuccccuccgaggucaaccucugcaacaucgacaucuucaaccccaaguacgacugcaagaucaugaccuccaagaccgacgucuccuccuccgucaucaccucccucggcgccaucgucuccugcuacggcaagaccaagugcaccgccuccaacaagaaccgcggcaucaucaagaccuucuccaacggcugcgacuacgucuccaacaagggcgucgacaccgucuccgucggcaacacccucuacugcgucaacaagcaggagggccagucccucuacgucaagggcgagcccaucaucaacuucuacgacccccucgucuuccccuccgacgaguucgacgccuccaucucccaggucaacgagaagaucaaccagucccucgccuucauccgcaaguccgacgagcuccuccacaacgucaacgucggcaaguccaccaccaacaucaugaucaccaccaucaucaucgucaucaucgucauccuccuccuccucaucgccgucggccucuuccucuacugcaaggcccgcuccacccccgucacccucuccaaggaccagcucuccggcaucaacaacaucgccuucuccaacugaggacuaguaauaaggaaacuguaugaaugucugugggcaggaagugaagagauccuucuguaaagguuuuuggaauuaugucugcugaauaauaaacuuuuuugaaauaauaaaucugguagaaaaaugagaucuaaaaaaaaaaaaaaaaaaaaaaaaaaaaaaaaaaaaaaaaaaaaaaaaaaaaaaaaaaaaaaaaugcaucccccccccccccccccccccccccccccccaaaggcucuuuucagagccaccagaauu

SEQ ID NO: 14818 - RNA, 1961 nt, Artificial Sequence
  mRNA product Design d-2 comprising derived and/or modified sequence from HRSV(Memphis-37)__AIY60640.1__F_DSCav1_mut2 (opt3)
gggagagcggcucggccauuuugucccagucaguccggaggcugcggcugcagaaguaccgccugcggaguaacugcaaagaagcuuaccauggagcugcccauccucaagaccaacgccauuacaacuauacuugcugcagugacgcugugcuucgccagcucccagaauaucaccgaagaguuuuaccaaucuacauguucagcggucaguaaaggcuauuugggggcuuuaagaacuggaugguacaccagcguuauuacaaucgaacuguccaacauuaaggagaauaaaugcaacgguaccgacgccaaggugaaacuaaucaagcaggaacucgauaaguauaaaaaugcaguaacugaccugcagcuucugaugcagucuacuccugccgcuggcucggggucagcaauauguagcggaaucgccgugugcaaggucuugcaccucgagggcgaggugaacaaaauuaagaaugcucugcugaguaccaacaaagccguugugucccucucuaauggugucagcguguuaacguucaagguacuggaucuuaagaacuacaucgacaaacaauugcugccaauucuaaauaagcaguccuguucaaucccgaacauagaaacuguuauugaguuucagcagaaaaauaacaggcuccuggaaaucacccgggaguucagugugaaugcgggggucacaacucccgugagcaccuauaugcuuacaaacucugagcuguugucccucauuaacgauaugccuaucaccaaugaccaaaagaaacugaugucaaacaaugugcagaucguccgccagcagagcuacaguauuaugugcauaaucaaggaagagguuuuagcauaugugguacaacugccacucuacggagugauugauacgcccuguuggaaacuucauacuucuccucugugcacaaccaacacuaaggaaggcuccaauaucuguuugacacgaaccgaccguggcugguacugcgauaacgccgggagcgucucguuuuucccacaggcugagacguguaaggugcagucuaauagaguuuucugcgacaccaugaacucccuaacacugcccucagaagugaaucucugcaacauagauauuuucaauccuaaauaugacuguaagaucaugacaaguaaaaccgaugucagcuccucugugaucacaagccugggagccauuguaucaugcuacgguaagacuaaauguaccgcaaguaacaagaauaggggcaucauuaagacauuuuccaacgggugcgacuauguuagcaauaaaggaguggacaccgucucugugggcaacacucuuuacugugucaacaagcaagagggucagucacuguaugugaaaggggagccaauaaucaauuucuacgauccguugguuuuucccagugacgaauuugaugcuagcauuucccaggugaacgagaagaucaaucagucucucgccuuuauccggaaaucggacgaacuguuacacaacguaaaugucggaaagagcacgacaaacauuaugauaaccacuaucauuaucgugauuaucguuauacugcuacuccugaucgcggugggccuuuucuuguauugcaaggcccgcuccaccccugucacacugucaaaagaucaacucaguggcauuaauaacaucgcauucucuaauugaggacuaguaauaaggaaacuguaugaaugucugugggcaggaagugaagagauccuucuguaaagguuuuuggaauuaugucugcugaauaauaaacuuuuuugaaauaauaaaucugguagaaaaaugagaucuaaaaaaaaaaaaaaaaaaaaaaaaaaaaaaaaaaaaaaaaaaaaaaaaaaaaaaaaaaaaaaaaugcaucccccccccccccccccccccccccccccccaaaggcucuuuucagagccaccagaauu

SEQ ID NO: 14819 - RNA, 1961 nt, Artificial Sequence
  mRNA product Design d-2 comprising derived and/or modified sequence from HRSV(Memphis-37)__AIY60640.1__F_DSCav1_mut2 (opt4)
gggagagcggcucggccauuuugucccagucaguccggaggcugcggcugcagaaguaccgccugcggaguaacugcaaagaagcuuaccauggagcugcccauccugaagaccaacgccaucaccaccauccuggccgccgugacccugugcuucgccagcagccagaacaucaccgaggaguucuaccagagcaccugcagcgccgugagcaagggcuaccugggcgcccugagaaccggcugguacaccagcgugaucaccaucgagcugagcaacaucaaggagaacaagugcaacggcaccgacgccaaggugaagcugaucaagcaggagcuggacaaguacaagaacgccgugaccgaccugcagcugcugaugcagagcacccccgccgccggcagcggcagcgccaucugcagcggcaucgccgugugcaaggugcugcaccuggagggcgaggugaacaagaucaagaacgcccugcugagcaccaacaaggccguggugagccugagcaacggcgugagcgugcugaccuucaaggugcuggaccugaagaacuacaucgacaagcagcugcugcccauccugaacaagcagagcugcagcauccccaacaucgagaccgugaucgaguuccagcagaagaacaacagacugcuggagaucaccagagaguucagcgugaacgccggcgugaccacccccgugagcaccuacaugcugaccaacagcgagcugcugagccugaucaacgacaugcccaucaccaacgaccagaagaagcugaugagcaacaacgugcagaucgugagacagcagagcuacagcaucaugugcaucaucaaggaggaggugcuggccuacguggugcagcugccccuguacggcgugaucgacacccccugcuggaagcugcacaccagcccccugugcaccaccaacaccaaggagggcagcaacaucugccugaccagaaccgacagaggcugguacugcgacaacgccggcagcgugagcuucuucccccaggccgagaccugcaaggugcagagcaacagaguguucugcgacaccaugaacagccugacccugcccagcgaggugaaccugugcaacaucgacaucuucaaccccaaguacgacugcaagaucaugaccagcaagaccgacgugagcagcagcgugaucaccagccugggcgccaucgugagcugcuacggcaagaccaagugcaccgccagcaacaagaacagaggcaucaucaagaccuucagcaacggcugcgacuacgugagcaacaagggcguggacaccgugagcgugggcaacacccuguacugcgugaacaagcaggagggccagagccuguacgugaagggcgagcccaucaucaacuucuacgacccccugguguuccccagcgacgaguucgacgccagcaucagccaggugaacgagaagaucaaccagagccuggccuucaucagaaagagcgacgagcugcugcacaacgugaacgugggcaagagcaccaccaacaucaugaucaccaccaucaucaucgugaucaucgugauccugcugcugcugaucgccgugggccuguuccuguacugcaaggccagaagcacccccgugacccugagcaaggaccagcugagcggcaucaacaacaucgccuucagcaacugaggacuaguaauaaggaaacuguaugaaugucugugggcaggaagugaagagauccuucuguaaagguuuuuggaauuaugucugcugaauaauaaacuuuuuugaaauaauaaaucugguagaaaaaugagaucuaaaaaaaaaaaaaaaaaaaaaaaaaaaaaaaaaaaaaaaaaaaaaaaaaaaaaaaaaaaaaaaaugcaucccccccccccccccccccccccccccccccaaaggcucuuuucagagccaccagaauu

SEQ ID NO: 14820 - RNA, 1961 nt, Artificial Sequence
  mRNA product Design d-2 comprising derived and/or modified sequence from HRSV(Memphis-37)__AIY60640.1__F_DSCav1_mut2 (opt5)
gggagagcggcucggccauuuugucccagucaguccggaggcugcggcugcagaaguaccgccugcggaguaacugcaaagaagcuuaccauggagcugcccauccucaagaccaacgccauuacaacgauccuggcugccgugacccuuugcuucgcgagcucccagaauauuacagaagaguuuuaccaaucuaccuguagcgcugucuccaaaggcuaucugggggcccucagaacaggaugguacaccucuguuaucacaauugaacugagcaacaucaaggagaauaaaugcaacggcaccgacgccaaggugaaacuuaucaagcaggaacuggauaaguauaaaaaugcugugacggaccuccagcugcugaugcaguccaccccugccgcugggucuggaagcgccauuuguuccggcaucgcggucugcaaggugcuccaccuggagggggagguuaacaaaauuaagaaugcccuucugagcacaaacaaagcuguggucucucucuccaauggagugagcguucugaccuucaaggugcuugaucugaagaacuacaucgacaaacaacuccugccgauucugaauaagcagucuuguuccauccccaacauugaaacagucaucgaguuucagcagaaaaauaaccggcuccuggaaaucacccgcgaguucagcgugaaugccggcgugacgacaccugucucuaccuauaugcuuacaaacuccgagcugcucagccugauuaacgauaugcccaucaccaaugaccaaaagaaacuuauguccaacaauguucagauugugagacagcagucuuacagcaucaugugcauuaucaaggaagaggugcuggcuuaugucgugcaacucccucuguacggcguuaucgauacccccuguuggaaacugcauacauccccucucugcacgaccaacacaaaggaagggagcaauauuugucugacccggacagaccgcggaugguacugcgauaacgccggcucuguguccuuuuucccgcaggcggagaccuguaagguccagagcaauagaguguuuugcgacacgaugaacucucuuacacugcccagcgaaguuaaucucugcaacaucgauauuuucaauccuaaauaugacuguaagaucaugaccuccaaaaccgaugugucuagcuccgucauuacaagccugggggccaucgugucuugcuacggaaagaccaaauguacagcuuccaacaagaaucggggcaucauuaagacguuuagcaacgggugcgacuaugucucuaauaaaggaguggacaccguuuccgugggcaacacacuuuacugugucaacaagcaagagggccagagccuguaugugaaaggggagcccaucauuaauuucuacgauccucucguuuuucccuccgacgaguucgaugccucuaucagccaggugaacgaaaagauuaaucagucccuggcuuuuauccgcaaaucugacgaacugcuccacaacgucaaugugggaaagagcaccacaaacauuaugaucaccacgaucauuaucgugauuaucguuauucugcuucugcucaucgccgucggccuguuccuguauugcaaggccagauccaccccggugacacuuagcaaagaucaacucucugggaucaauaacauugcuuucuccaauugaggacuaguaauaaggaaacuguaugaaugucugugggcaggaagugaagagauccuucuguaaagguuuuuggaauuaugucugcugaauaauaaacuuuuuugaaauaauaaaucugguagaaaaaugagaucuaaaaaaaaaaaaaaaaaaaaaaaaaaaaaaaaaaaaaaaaaaaaaaaaaaaaaaaaaaaaaaaaugcaucccccccccccccccccccccccccccccccaaaggcucuuuucagagccaccagaauu

SEQ ID NO: 14821 - RNA, 1961 nt, Artificial Sequence
  mRNA product Design d-2 comprising derived and/or modified sequence from HRSV(Memphis-37)__AIY60640.1__F_DSCav1_mut2 (opt6)
gggagagcggcucggccauuuugucccagucaguccggaggcugcggcugcagaaguaccgccugcggaguaacugcaaagaagcuuaccauggagcuuccaauauuaaaaacaaacgcuauaacaacuauacucgcagcaguuacacucugcuucgcauccucacaaaacauaacugaagaauuuuaccaauccacuugcucagccguaucaaaaggauaucuaggagcacuuagaaccggaugguauacaucagugauaacaauagaacuaagcaacauaaaagaaaacaagugcaacggaacugacgcaaaagucaaacuaaucaaacaagaacuagacaaauacaaaaacgcaguaacagaccuacaauuacuaaugcaaucaacaccagcagcaggaucagguucagccauaugcucagguaucgcuguaugcaaaguccuucaccuagaaggugaaguaaacaaaauuaaaaacgcccuacucaguacaaauaaagcugucguaaguuuaucaaacggaguaucaguccuuacauucaaaguauuagaccuaaaaaauuauauagacaaacaauuacuaccaauacucaacaaacaaucaugcucaauaccaaauauagaaaccguaauagaauuucagcaaaaaaauaacagauuacuagaaauaaccagagaauuuucagucaacgcaggagucacaacacccgucucaaccuacaugcuaaccaacucagaacuucuaucucuuaucaacgacaugcccauaaccaaugaucaaaaaaaauuaaugucuaauaacguucaaauaguaagacaacaaucauacucaauaaugugcauaaucaaagaagaaguauuagcauacguaguacaacuaccccuauauggaguaauagacacacccugcuggaaacuacacacauccccccucuguacaacaaacacuaaagaaggaucaaacauuugccuaacaagaacagaccgcggaugguacugcgacaacgcaggcuccguaucuuucuuuccacaagccgaaacuuguaaaguucaaucaaacagaguauuuugcgauacaaugaacuccuuaacauuaccuucagaaguaaaccuaugcaacauagacaucuucaacccaaaauacgacugcaaaauaaugaccucaaaaacagacguauccucaucagucauaaccuccuuaggagcaauaguaucauguuacggaaaaacaaaauguacagcaucaaauaaaaauagaggaauaauaaaaaccuucuccaacggaugcgacuacguauccaauaaaggaguagacaccguaucaguaggaaacacacuauacuguguaaacaaacaagaaggccaaucucuauauguaaaaggcgaaccaaucauaaauuuuuacgacccacuugucuuccccuccgacgaauuugacgcaagcauaucacaaguaaacgaaaaaaucaaccaaagccuagccuucauaaggaaaucugacgaauuacuucauaacguaaauguuggaaaaucaaccacaaacauaaugauaaccaccaucauaauuguaauaauaguaauacuacuacuacuaauugcaguaggacucuuccuauauugcaaagcucgcucaacaccaguuaccuuaucaaaagaccaacuaucuggaauaaacaacauagccuuuuccaacuaaggacuaguaauaaggaaacuguaugaaugucugugggcaggaagugaagagauccuucuguaaagguuuuuggaauuaugucugcugaauaauaaacuuuuuugaaauaauaaaucugguagaaaaaugagaucuaaaaaaaaaaaaaaaaaaaaaaaaaaaaaaaaaaaaaaaaaaaaaaaaaaaaaaaaaaaaaaaaugcaucccccccccccccccccccccccccccccccaaaggcucuuuucagagccaccagaauu

SEQ ID NO: 14822 - RNA, 1961 nt, Artificial Sequence
  mRNA product Design d-2 comprising derived and/or modified sequence from HRSV(Memphis-37)__AIY60640.1__F_DSCav1_mut2 (opt11)
gggagagcggcucggccauuuugucccagucaguccggaggcugcggcugcagaaguaccgccugcggaguaacugcaaagaagcuuaccauggaacucccaauccuaaaaaccaacgccaucaccaccauccucgccgcugucaccuuaugcuuugccagcagccaaaacaucaccgaagaauuuuaccaaucaacaugcuccgccgucucaaaaggauaccucggcgcccuacgcaccggcugguacacaagcgucauaaccaucgagcucuccaacaucaaggaaaacaaaugcaauggaaccgacgccaaagucaaacuaaucaaacaagaacuagacaaguacaagaacgcagucaccgaccuccaacuccucaugcaguccacccccgcagcaggcucuggcucagcaauaugcuccggcaucgcugucugcaaaguccuacaccucgaaggcgaagucaacaaaaucaaaaacgcccuacuguccacaaacaaagccgucgucucccuauccaacggcgucucgguccuaaccuuuaagguucucgaucucaaaaauuacauagacaaacaacuacuccccauccucaacaaacaaucuugcucaauccccaacaucgaaaccgucaucgaguuccaacagaaaaacaacagacuacucgaaaucacccgcgaguucucagucaacgcgggcgucacaacacccgucagcaccuacaugcuaaccaacuccgaacuccucagccucauuaacgacaugcccaucaccaacgaccaaaagaaacuuauguccaacaacguucaaaucguccgccaacaauccuacuccaucaugugcaucaucaaagaagaaguacucgccuacguaguccaacugccccucuacggcgucaucgauaccccaugcuggaaacuacacaccagcccccucugcaccaccaacaccaaagaaggcuccaauaucugcuuaacccgcacagaccguggcugguacugcgauaacgccggcuccgucuccuucuucccccaagcagaaaccugcaaaguacaauccaaccgagucuucugugacaccaugaacucccuaacccuuccaucagaagucaaccucugcaacaucgacaucuucaaccccaaguacgacugcaaaaucaugacauccaaaaccgaugucucaagcagcgucauaaccucacucggcgcuaucguaagcugcuacggcaaaaccaaaugcaccgcaucaaacaaaaaccgcggaaucaucaaaaccuucagcaacggaugcgacuacguuuccaacaaaggcguagacaccgucuccgucggaaacacccucuacugcguaaacaaacaggaaggccaaucccucuacgucaaaggcgaacccaucauaaacuucuacgauccccuugucuucccguccgaugaguucgacgccuccaucucgcaagucaacgaaaagauaaaccaaucacuagcauucauccguaaauccgacgaacuccuccacaacgucaacgucggaaaauccaccaccaacauaaugaucaccaccauaaucaucgucaucaucguaauacuauuacuccucauagccgucggccucuuccuauauugcaaagcccgaucaacccccguaacccuuucuaaagaccaacuguccggaaucaacaacaucgcuuucagcaacugaggacuaguaauaaggaaacuguaugaaugucugugggcaggaagugaagagauccuucuguaaagguuuuuggaauuaugucugcugaauaauaaacuuuuuugaaauaauaaaucugguagaaaaaugagaucuaaaaaaaaaaaaaaaaaaaaaaaaaaaaaaaaaaaaaaaaaaaaaaaaaaaaaaaaaaaaaaaaugcaucccccccccccccccccccccccccccccccaaaggcucuuuucagagccaccagaauu

SEQ ID NO: 14823 - RNA, 2277 nt, Artificial Sequence
  mRNA product Design d-3 comprising derived and/or modified sequence from HRSV(Memphis-37)__AIY60640.1__F_DSCav1_mut2 (opt1)
gggagagggcgcuuggcuugcaaggacccugagcugcggcauugaagcacacccaacccaacucgacugaagucagccucacugaaccggaucugagaaucuucucucucugggcuugccagggcucuccgaaccuagcuagcauccucuucaauuccaacuagaaagcuuaccauggagcugcccauccucaagaccaacgccaucaccacgauccuggccgcggugacccugugcuucgccagcucccagaacaucaccgaggaguucuaccagagcacgugcuccgccgucagcaagggcuaccucggcgcccugcgcaccgggugguacaccagcgugaucaccaucgagcuguccaacaucaaggagaacaagugcaacggcaccgacgccaaggugaagcucaucaagcaggagcuggacaaguacaagaacgcggucacggaccugcagcuccugaugcagagcaccccggccgccggcuccgggagcgcgaucugcuccggcaucgccgucugcaaggugcugcaccucgagggcgaggugaacaagaucaagaacgcccugcuguccaccaacaaggccgucgugagccucuccaacggggugagcguccugaccuucaaggugcuggaccucaagaacuacaucgacaagcagcugcugcccauccugaacaagcagagcugcuccauccccaacaucgagaccgucaucgaguuccagcagaagaacaaccgccuccuggagaucacgcgggaguucagcgugaacgcgggcgugaccacccccgucuccaccuacaugcugacgaacagcgagcuccugucccugaucaacgacaugccgaucaccaacgaccagaagaagcucaugagcaacaacgugcagaucgugcgccagcaguccuacagcaucaugugcaucaucaaggaggagguccuggccuacguggugcagcugccccucuacggggucaucgacacccccugcuggaagcugcacaccagcccccugugcacgaccaacaccaaggagggcuccaacaucugccucacccggacggaccgcgggugguacugcgacaacgccggcagcguguccuucuucccgcaggccgagaccugcaagguccagagcaaccggguguucugcgacaccaugaacucccugacccugcccagcgaggugaaccucugcaacaucgacaucuucaaccccaaguacgacugcaagaucaugacguccaagaccgacgucagcuccagcgugaucaccucccugggcgccaucgugagcugcuacgggaagaccaagugcacggcgagcaacaagaaccgcggcaucaucaagaccuucuccaacgggugcgacuacgucagcaacaagggcguggacaccguguccgucggcaacacccuguacugcgugaacaagcaggagggccagagccucuacgugaagggggagcccaucaucaacuucuacgacccgcuggucuuccccuccgacgaguucgacgccagcaucucccaggugaacgagaagaucaaccagagccuggccuucauccggaaguccgacgagcuccugcacaacgugaacgucggcaagagcaccacgaacaucaugaucaccaccaucaucaucgugaucaucgugauccugcugcuccugaucgccgucgggcuguuccucuacugcaaggcccgcuccacccccgugacgcugagcaaggaccagcuguccgggaucaacaacaucgcguucagcaacugaggacuagugaagggaacacccaaauuuaauucagccuuaagcacaauuaauuaagagugaaacguaauuguacaagcaguuggucacccaccauagggcaugaucaacaccgcaaccuuuccuuuuucccccagugauucugaaaaaccccucuucccuucagcuugcuuagauguuccaaauuuaguaagcuuaaggcggccuacagaagaaaaagaaaaaaaaggccacaaaaguucccucucacuuucaguaaauaaaauaaaagcagcaacagaaauaaagaaauaaaugaaauucaaaaugaaauaaauauuguguugugcagcauuaaaaaaucaauaaaaauuaaaaaugagcaagaucuaaaaaaaaaaaaaaaaaaaaaaaaaaaaaaaaaaaaaaaaaaaaaaaaaaaaaaaaaaaaaaaaugcaucccccccccccccccccccccccccccccccaaaggcucuuuucagagccaccagaauu

SEQ ID NO: 14824 - RNA, 2277 nt, Artificial Sequence
  mRNA product Design d-3 comprising derived and/or modified sequence from HRSV(Memphis-37)__AIY60640.1__F_DSCav1_mut2 (opt1)
gggagagggcgcuuggcuugcaaggacccugagcugcggcauugaagcacacccaacccaacucgacugaagucagccucacugaaccggaucugagaaucuucucucucugggcuugccagggcucuccgaaccuagcuagcauccucuucaauuccaacuagaaagcuuaccauggagcugcccauccucaagaccaacgccaucaccacgauccuggccgcggugacccugugcuucgccagcucccagaacaucaccgaggaguucuaccagagcacgugcuccgccgucagcaagggcuaccucggggcccugcgcaccggcugguacaccuccgugaucaccaucgagcugagcaacaucaaggagaacaagugcaacgggaccgacgccaaggugaagcucaucaagcaggagcuggacaaguacaagaacgcggucacggaccugcagcuccugaugcaguccaccccggccgccggcagcggguccgccaucugcagcggcaucgcggugugcaaggugcugcaccucgagggcgaggucaacaagaucaagaacgcccugcuguccaccaacaaggccguggugagccucuccaacggggucagcgugcugaccuucaaggugcuggaccucaagaacuacaucgacaagcagcugcugcccauccucaacaagcaguccugcagcauccccaacaucgagacggucaucgaguuccagcagaagaacaaccggcugcuggagaucacccgcgaguucuccgugaacgccggcgugaccacccccgucagcacguacaugcucaccaacuccgagcugcugagccucaucaacgacaugccgaucaccaacgaccagaagaagcugaugagcaacaacgugcagaucgugcggcagcaguccuacagcaucaugugcaucaucaaggaggagguccuggccuacguggugcagcucccccuguacggggucaucgacacccccugcuggaagcugcacacgagcccccucugcaccaccaacaccaaggagggcuccaacaucugccugacgcgcaccgaccgggggugguacugcgacaacgcgggcuccgugagcuucuucccgcaggccgagaccugcaaggugcaguccaaccgcgucuucugcgacaccaugaacagccugacgcuccccuccgaggugaaccugugcaacaucgacaucuucaaccccaaguacgacugcaagaucaugaccagcaagaccgacgucuccagcuccgugaucaccagccugggcgccaucguguccugcuacgggaagacgaagugcaccgccagcaacaagaaccggggcaucaucaagaccuucuccaacgggugcgacuacgucagcaacaagggcguggacaccguguccgucggcaacacgcucuacugcgugaacaagcaggaggggcagagccuguacgugaagggcgagcccaucaucaacuucuacgacccgcuggucuuccccagcgacgaguucgacgccuccaucagccaggugaacgagaagaucaaccagucccucgcguucauccgcaagagcgacgagcugcugcacaacgugaacgucgggaaguccaccaccaacaucaugaucaccaccaucaucaucgugaucaucgugauccuccugcugcucaucgccgucggccuguuccuguacugcaaggcccggagcacgcccgugacccuguccaaggaccagcucagcgggaucaacaacaucgccuucuccaacugaggacuagugaagggaacacccaaauuuaauucagccuuaagcacaauuaauuaagagugaaacguaauuguacaagcaguuggucacccaccauagggcaugaucaacaccgcaaccuuuccuuuuucccccagugauucugaaaaaccccucuucccuucagcuugcuuagauguuccaaauuuaguaagcuuaaggcggccuacagaagaaaaagaaaaaaaaggccacaaaaguucccucucacuuucaguaaauaaaauaaaagcagcaacagaaauaaagaaauaaaugaaauucaaaaugaaauaaauauuguguugugcagcauuaaaaaaucaauaaaaauuaaaaaugagcaagaucuaaaaaaaaaaaaaaaaaaaaaaaaaaaaaaaaaaaaaaaaaaaaaaaaaaaaaaaaaaaaaaaaugcaucccccccccccccccccccccccccccccccaaaggcucuuuucagagccaccagaauu

SEQ ID NO: 14825 - RNA, 2277 nt, Artificial Sequence
  mRNA product Design d-3 comprising derived and/or modified sequence from HRSV(Memphis-37)__AIY60640.1__F_DSCav1_mut2 (opt2)
gggagagggcgcuuggcuugcaaggacccugagcugcggcauugaagcacacccaacccaacucgacugaagucagccucacugaaccggaucugagaaucuucucucucugggcuugccagggcucuccgaaccuagcuagcauccucuucaauuccaacuagaaagcuuaccauggagcuccccauccucaagaccaacgccaucaccaccauccucgccgccgucacccucugcuucgccuccucccagaacaucaccgaggaguucuaccaguccaccugcuccgccgucuccaagggcuaccucggcgcccuccgcaccggcugguacaccuccgucaucaccaucgagcucuccaacaucaaggagaacaagugcaacggcaccgacgccaaggucaagcucaucaagcaggagcucgacaaguacaagaacgccgucaccgaccuccagcuccucaugcaguccacccccgccgccggcuccggcuccgccaucugcuccggcaucgccgucugcaagguccuccaccucgagggcgaggucaacaagaucaagaacgcccuccucuccaccaacaaggccgucgucucccucuccaacggcgucuccguccucaccuucaagguccucgaccucaagaacuacaucgacaagcagcuccuccccauccucaacaagcaguccugcuccauccccaacaucgagaccgucaucgaguuccagcagaagaacaaccgccuccucgagaucacccgcgaguucuccgucaacgccggcgucaccacccccgucuccaccuacaugcucaccaacuccgagcuccucucccucaucaacgacaugcccaucaccaacgaccagaagaagcucauguccaacaacguccagaucguccgccagcaguccuacuccaucaugugcaucaucaaggaggagguccucgccuacgucguccagcucccccucuacggcgucaucgacacccccugcuggaagcuccacaccuccccccucugcaccaccaacaccaaggagggcuccaacaucugccucacccgcaccgaccgcggcugguacugcgacaacgccggcuccgucuccuucuucccccaggccgagaccugcaagguccaguccaaccgcgucuucugcgacaccaugaacucccucacccuccccuccgaggucaaccucugcaacaucgacaucuucaaccccaaguacgacugcaagaucaugaccuccaagaccgacgucuccuccuccgucaucaccucccucggcgccaucgucuccugcuacggcaagaccaagugcaccgccuccaacaagaaccgcggcaucaucaagaccuucuccaacggcugcgacuacgucuccaacaagggcgucgacaccgucuccgucggcaacacccucuacugcgucaacaagcaggagggccagucccucuacgucaagggcgagcccaucaucaacuucuacgacccccucgucuuccccuccgacgaguucgacgccuccaucucccaggucaacgagaagaucaaccagucccucgccuucauccgcaaguccgacgagcuccuccacaacgucaacgucggcaaguccaccaccaacaucaugaucaccaccaucaucaucgucaucaucgucauccuccuccuccucaucgccgucggccucuuccucuacugcaaggcccgcuccacccccgucacccucuccaaggaccagcucuccggcaucaacaacaucgccuucuccaacugaggacuagugaagggaacacccaaauuuaauucagccuuaagcacaauuaauuaagagugaaacguaauuguacaagcaguuggucacccaccauagggcaugaucaacaccgcaaccuuuccuuuuucccccagugauucugaaaaaccccucuucccuucagcuugcuuagauguuccaaauuuaguaagcuuaaggcggccuacagaagaaaaagaaaaaaaaggccacaaaaguucccucucacuuucaguaaauaaaauaaaagcagcaacagaaauaaagaaauaaaugaaauucaaaaugaaauaaauauuguguugugcagcauuaaaaaaucaauaaaaauuaaaaaugagcaagaucuaaaaaaaaaaaaaaaaaaaaaaaaaaaaaaaaaaaaaaaaaaaaaaaaaaaaaaaaaaaaaaaaugcaucccccccccccccccccccccccccccccccaaaggcucuuuucagagccaccagaauu

SEQ ID NO: 14826 - RNA, 2277 nt, Artificial Sequence
  mRNA product Design d-3 comprising derived and/or modified sequence from HRSV(Memphis-37)__AIY60640.1__F_DSCav1_mut2 (opt3)
gggagagggcgcuuggcuugcaaggacccugagcugcggcauugaagcacacccaacccaacucgacugaagucagccucacugaaccggaucugagaaucuucucucucugggcuugccagggcucuccgaaccuagcuagcauccucuucaauuccaacuagaaagcuuaccauggagcugcccauccucaagaccaacgccauuacaacuauacuugcugcagugacgcugugcuucgccagcucccagaauaucaccgaagaguuuuaccaaucuacauguucagcggucaguaaaggcuauuugggggcuuuaagaacuggaugguacaccagcguuauuacaaucgaacuguccaacauuaaggagaauaaaugcaacgguaccgacgccaaggugaaacuaaucaagcaggaacucgauaaguauaaaaaugcaguaacugaccugcagcuucugaugcagucuacuccugccgcuggcucggggucagcaauauguagcggaaucgccgugugcaaggucuugcaccucgagggcgaggugaacaaaauuaagaaugcucugcugaguaccaacaaagccguugugucccucucuaauggugucagcguguuaacguucaagguacuggaucuuaagaacuacaucgacaaacaauugcugccaauucuaaauaagcaguccuguucaaucccgaacauagaaacuguuauugaguuucagcagaaaaauaacaggcuccuggaaaucacccgggaguucagugugaaugcgggggucacaacucccgugagcaccuauaugcuuacaaacucugagcuguugucccucauuaacgauaugccuaucaccaaugaccaaaagaaacugaugucaaacaaugugcagaucguccgccagcagagcuacaguauuaugugcauaaucaaggaagagguuuuagcauaugugguacaacugccacucuacggagugauugauacgcccuguuggaaacuucauacuucuccucugugcacaaccaacacuaaggaaggcuccaauaucuguuugacacgaaccgaccguggcugguacugcgauaacgccgggagcgucucguuuuucccacaggcugagacguguaaggugcagucuaauagaguuuucugcgacaccaugaacucccuaacacugcccucagaagugaaucucugcaacauagauauuuucaauccuaaauaugacuguaagaucaugacaaguaaaaccgaugucagcuccucugugaucacaagccugggagccauuguaucaugcuacgguaagacuaaauguaccgcaaguaacaagaauaggggcaucauuaagacauuuuccaacgggugcgacuauguuagcaauaaaggaguggacaccgucucugugggcaacacucuuuacugugucaacaagcaagagggucagucacuguaugugaaaggggagccaauaaucaauuucuacgauccguugguuuuucccagugacgaauuugaugcuagcauuucccaggugaacgagaagaucaaucagucucucgccuuuauccggaaaucggacgaacuguuacacaacguaaaugucggaaagagcacgacaaacauuaugauaaccacuaucauuaucgugauuaucguuauacugcuacuccugaucgcggugggccuuuucuuguauugcaaggcccgcuccaccccugucacacugucaaaagaucaacucaguggcauuaauaacaucgcauucucuaauugaggacuagugaagggaacacccaaauuuaauucagccuuaagcacaauuaauuaagagugaaacguaauuguacaagcaguuggucacccaccauagggcaugaucaacaccgcaaccuuuccuuuuucccccagugauucugaaaaaccccucuucccuucagcuugcuuagauguuccaaauuuaguaagcuuaaggcggccuacagaagaaaaagaaaaaaaaggccacaaaaguucccucucacuuucaguaaauaaaauaaaagcagcaacagaaauaaagaaauaaaugaaauucaaaaugaaauaaauauuguguugugcagcauuaaaaaaucaauaaaaauuaaaaaugagcaagaucuaaaaaaaaaaaaaaaaaaaaaaaaaaaaaaaaaaaaaaaaaaaaaaaaaaaaaaaaaaaaaaaaugcaucccccccccccccccccccccccccccccccaaaggcucuuuucagagccaccagaauu

SEQ ID NO: 14827 - RNA, 2277 nt, Artificial Sequence
  mRNA product Design d-3 comprising derived and/or modified sequence from HRSV(Memphis-37)__AIY60640.1__F_DSCav1_mut2 (opt4)
gggagagggcgcuuggcuugcaaggacccugagcugcggcauugaagcacacccaacccaacucgacugaagucagccucacugaaccggaucugagaaucuucucucucugggcuugccagggcucuccgaaccuagcuagcauccucuucaauuccaacuagaaagcuuaccauggagcugcccauccugaagaccaacgccaucaccaccauccuggccgccgugacccugugcuucgccagcagccagaacaucaccgaggaguucuaccagagcaccugcagcgccgugagcaagggcuaccugggcgcccugagaaccggcugguacaccagcgugaucaccaucgagcugagcaacaucaaggagaacaagugcaacggcaccgacgccaaggugaagcugaucaagcaggagcuggacaaguacaagaacgccgugaccgaccugcagcugcugaugcagagcacccccgccgccggcagcggcagcgccaucugcagcggcaucgccgugugcaaggugcugcaccuggagggcgaggugaacaagaucaagaacgcccugcugagcaccaacaaggccguggugagccugagcaacggcgugagcgugcugaccuucaaggugcuggaccugaagaacuacaucgacaagcagcugcugcccauccugaacaagcagagcugcagcauccccaacaucgagaccgugaucgaguuccagcagaagaacaacagacugcuggagaucaccagagaguucagcgugaacgccggcgugaccacccccgugagcaccuacaugcugaccaacagcgagcugcugagccugaucaacgacaugcccaucaccaacgaccagaagaagcugaugagcaacaacgugcagaucgugagacagcagagcuacagcaucaugugcaucaucaaggaggaggugcuggccuacguggugcagcugccccuguacggcgugaucgacacccccugcuggaagcugcacaccagcccccugugcaccaccaacaccaaggagggcagcaacaucugccugaccagaaccgacagaggcugguacugcgacaacgccggcagcgugagcuucuucccccaggccgagaccugcaaggugcagagcaacagaguguucugcgacaccaugaacagccugacccugcccagcgaggugaaccugugcaacaucgacaucuucaaccccaaguacgacugcaagaucaugaccagcaagaccgacgugagcagcagcgugaucaccagccugggcgccaucgugagcugcuacggcaagaccaagugcaccgccagcaacaagaacagaggcaucaucaagaccuucagcaacggcugcgacuacgugagcaacaagggcguggacaccgugagcgugggcaacacccuguacugcgugaacaagcaggagggccagagccuguacgugaagggcgagcccaucaucaacuucuacgacccccugguguuccccagcgacgaguucgacgccagcaucagccaggugaacgagaagaucaaccagagccuggccuucaucagaaagagcgacgagcugcugcacaacgugaacgugggcaagagcaccaccaacaucaugaucaccaccaucaucaucgugaucaucgugauccugcugcugcugaucgccgugggccuguuccuguacugcaaggccagaagcacccccgugacccugagcaaggaccagcugagcggcaucaacaacaucgccuucagcaacugaggacuagugaagggaacacccaaauuuaauucagccuuaagcacaauuaauuaagagugaaacguaauuguacaagcaguuggucacccaccauagggcaugaucaacaccgcaaccuuuccuuuuucccccagugauucugaaaaaccccucuucccuucagcuugcuuagauguuccaaauuuaguaagcuuaaggcggccuacagaagaaaaagaaaaaaaaggccacaaaaguucccucucacuuucaguaaauaaaauaaaagcagcaacagaaauaaagaaauaaaugaaauucaaaaugaaauaaauauuguguugugcagcauuaaaaaaucaauaaaaauuaaaaaugagcaagaucuaaaaaaaaaaaaaaaaaaaaaaaaaaaaaaaaaaaaaaaaaaaaaaaaaaaaaaaaaaaaaaaaugcaucccccccccccccccccccccccccccccccaaaggcucuuuucagagccaccagaauu

SEQ ID NO: 14828 - RNA, 2277 nt, Artificial Sequence
  mRNA product Design d-3 comprising derived and/or modified sequence from HRSV(Memphis-37)__AIY60640.1__F_DSCav1_mut2 (opt5)
gggagagggcgcuuggcuugcaaggacccugagcugcggcauugaagcacacccaacccaacucgacugaagucagccucacugaaccggaucugagaaucuucucucucugggcuugccagggcucuccgaaccuagcuagcauccucuucaauuccaacuagaaagcuuaccauggagcugcccauccucaagaccaacgccauuacaacgauccuggcugccgugacccuuugcuucgcgagcucccagaauauuacagaagaguuuuaccaaucuaccuguagcgcugucuccaaaggcuaucugggggcccucagaacaggaugguacaccucuguuaucacaauugaacugagcaacaucaaggagaauaaaugcaacggcaccgacgccaaggugaaacuuaucaagcaggaacuggauaaguauaaaaaugcugugacggaccuccagcugcugaugcaguccaccccugccgcugggucuggaagcgccauuuguuccggcaucgcggucugcaaggugcuccaccuggagggggagguuaacaaaauuaagaaugcccuucugagcacaaacaaagcuguggucucucucuccaauggagugagcguucugaccuucaaggugcuugaucugaagaacuacaucgacaaacaacuccugccgauucugaauaagcagucuuguuccauccccaacauugaaacagucaucgaguuucagcagaaaaauaaccggcuccuggaaaucacccgcgaguucagcgugaaugccggcgugacgacaccugucucuaccuauaugcuuacaaacuccgagcugcucagccugauuaacgauaugcccaucaccaaugaccaaaagaaacuuauguccaacaauguucagauugugagacagcagucuuacagcaucaugugcauuaucaaggaagaggugcuggcuuaugucgugcaacucccucuguacggcguuaucgauacccccuguuggaaacugcauacauccccucucugcacgaccaacacaaaggaagggagcaauauuugucugacccggacagaccgcggaugguacugcgauaacgccggcucuguguccuuuuucccgcaggcggagaccuguaagguccagagcaauagaguguuuugcgacacgaugaacucucuuacacugcccagcgaaguuaaucucugcaacaucgauauuuucaauccuaaauaugacuguaagaucaugaccuccaaaaccgaugugucuagcuccgucauuacaagccugggggccaucgugucuugcuacggaaagaccaaauguacagcuuccaacaagaaucggggcaucauuaagacguuuagcaacgggugcgacuaugucucuaauaaaggaguggacaccguuuccgugggcaacacacuuuacugugucaacaagcaagagggccagagccuguaugugaaaggggagcccaucauuaauuucuacgauccucucguuuuucccuccgacgaguucgaugccucuaucagccaggugaacgaaaagauuaaucagucccuggcuuuuauccgcaaaucugacgaacugcuccacaacgucaaugugggaaagagcaccacaaacauuaugaucaccacgaucauuaucgugauuaucguuauucugcuucugcucaucgccgucggccuguuccuguauugcaaggccagauccaccccggugacacuuagcaaagaucaacucucugggaucaauaacauugcuuucuccaauugaggacuagugaagggaacacccaaauuuaauucagccuuaagcacaauuaauuaagagugaaacguaauuguacaagcaguuggucacccaccauagggcaugaucaacaccgcaaccuuuccuuuuucccccagugauucugaaaaaccccucuucccuucagcuugcuuagauguuccaaauuuaguaagcuuaaggcggccuacagaagaaaaagaaaaaaaaggccacaaaaguucccucucacuuucaguaaauaaaauaaaagcagcaacagaaauaaagaaauaaaugaaauucaaaaugaaauaaauauuguguugugcagcauuaaaaaaucaauaaaaauuaaaaaugagcaagaucuaaaaaaaaaaaaaaaaaaaaaaaaaaaaaaaaaaaaaaaaaaaaaaaaaaaaaaaaaaaaaaaaugcaucccccccccccccccccccccccccccccccaaaggcucuuuucagagccaccagaauu

SEQ ID NO: 14829 - RNA, 2277 nt, Artificial Sequence
  mRNA product Design d-3 comprising derived and/or modified sequence from HRSV(Memphis-37)__AIY60640.1__F_DSCav1_mut2 (opt6)
gggagagggcgcuuggcuugcaaggacccugagcugcggcauugaagcacacccaacccaacucgacugaagucagccucacugaaccggaucugagaaucuucucucucugggcuugccagggcucuccgaaccuagcuagcauccucuucaauuccaacuagaaagcuuaccauggagcuuccaauauuaaaaacaaacgcuauaacaacuauacucgcagcaguuacacucugcuucgcauccucacaaaacauaacugaagaauuuuaccaauccacuugcucagccguaucaaaaggauaucuaggagcacuuagaaccggaugguauacaucagugauaacaauagaacuaagcaacauaaaagaaaacaagugcaacggaacugacgcaaaagucaaacuaaucaaacaagaacuagacaaauacaaaaacgcaguaacagaccuacaauuacuaaugcaaucaacaccagcagcaggaucagguucagccauaugcucagguaucgcuguaugcaaaguccuucaccuagaaggugaaguaaacaaaauuaaaaacgcccuacucaguacaaauaaagcugucguaaguuuaucaaacggaguaucaguccuuacauucaaaguauuagaccuaaaaaauuauauagacaaacaauuacuaccaauacucaacaaacaaucaugcucaauaccaaauauagaaaccguaauagaauuucagcaaaaaaauaacagauuacuagaaauaaccagagaauuuucagucaacgcaggagucacaacacccgucucaaccuacaugcuaaccaacucagaacuucuaucucuuaucaacgacaugcccauaaccaaugaucaaaaaaaauuaaugucuaauaacguucaaauaguaagacaacaaucauacucaauaaugugcauaaucaaagaagaaguauuagcauacguaguacaacuaccccuauauggaguaauagacacacccugcuggaaacuacacacauccccccucuguacaacaaacacuaaagaaggaucaaacauuugccuaacaagaacagaccgcggaugguacugcgacaacgcaggcuccguaucuuucuuuccacaagccgaaacuuguaaaguucaaucaaacagaguauuuugcgauacaaugaacuccuuaacauuaccuucagaaguaaaccuaugcaacauagacaucuucaacccaaaauacgacugcaaaauaaugaccucaaaaacagacguauccucaucagucauaaccuccuuaggagcaauaguaucauguuacggaaaaacaaaauguacagcaucaaauaaaaauagaggaauaauaaaaaccuucuccaacggaugcgacuacguauccaauaaaggaguagacaccguaucaguaggaaacacacuauacuguguaaacaaacaagaaggccaaucucuauauguaaaaggcgaaccaaucauaaauuuuuacgacccacuugucuuccccuccgacgaauuugacgcaagcauaucacaaguaaacgaaaaaaucaaccaaagccuagccuucauaaggaaaucugacgaauuacuucauaacguaaauguuggaaaaucaaccacaaacauaaugauaaccaccaucauaauuguaauaauaguaauacuacuacuacuaauugcaguaggacucuuccuauauugcaaagcucgcucaacaccaguuaccuuaucaaaagaccaacuaucuggaauaaacaacauagccuuuuccaacuaaggacuagugaagggaacacccaaauuuaauucagccuuaagcacaauuaauuaagagugaaacguaauuguacaagcaguuggucacccaccauagggcaugaucaacaccgcaaccuuuccuuuuucccccagugauucugaaaaaccccucuucccuucagcuugcuuagauguuccaaauuuaguaagcuuaaggcggccuacagaagaaaaagaaaaaaaaggccacaaaaguucccucucacuuucaguaaauaaaauaaaagcagcaacagaaauaaagaaauaaaugaaauucaaaaugaaauaaauauuguguugugcagcauuaaaaaaucaauaaaaauuaaaaaugagcaagaucuaaaaaaaaaaaaaaaaaaaaaaaaaaaaaaaaaaaaaaaaaaaaaaaaaaaaaaaaaaaaaaaaugcaucccccccccccccccccccccccccccccccaaaggcucuuuucagagccaccagaauu

SEQ ID NO: 14830 - RNA, 2277 nt, Artificial Sequence
  mRNA product Design d-3 comprising derived and/or modified sequence from HRSV(Memphis-37)__AIY60640.1__F_DSCav1_mut2 (opt11)
gggagagggcgcuuggcuugcaaggacccugagcugcggcauugaagcacacccaacccaacucgacugaagucagccucacugaaccggaucugagaaucuucucucucugggcuugccagggcucuccgaaccuagcuagcauccucuucaauuccaacuagaaagcuuaccauggaacucccaauccuaaaaaccaacgccaucaccaccauccucgccgcugucaccuuaugcuuugccagcagccaaaacaucaccgaagaauuuuaccaaucaacaugcuccgccgucucaaaaggauaccucggcgcccuacgcaccggcugguacacaagcgucauaaccaucgagcucuccaacaucaaggaaaacaaaugcaauggaaccgacgccaaagucaaacuaaucaaacaagaacuagacaaguacaagaacgcagucaccgaccuccaacuccucaugcaguccacccccgcagcaggcucuggcucagcaauaugcuccggcaucgcugucugcaaaguccuacaccucgaaggcgaagucaacaaaaucaaaaacgcccuacuguccacaaacaaagccgucgucucccuauccaacggcgucucgguccuaaccuuuaagguucucgaucucaaaaauuacauagacaaacaacuacuccccauccucaacaaacaaucuugcucaauccccaacaucgaaaccgucaucgaguuccaacagaaaaacaacagacuacucgaaaucacccgcgaguucucagucaacgcgggcgucacaacacccgucagcaccuacaugcuaaccaacuccgaacuccucagccucauuaacgacaugcccaucaccaacgaccaaaagaaacuuauguccaacaacguucaaaucguccgccaacaauccuacuccaucaugugcaucaucaaagaagaaguacucgccuacguaguccaacugccccucuacggcgucaucgauaccccaugcuggaaacuacacaccagcccccucugcaccaccaacaccaaagaaggcuccaauaucugcuuaacccgcacagaccguggcugguacugcgauaacgccggcuccgucuccuucuucccccaagcagaaaccugcaaaguacaauccaaccgagucuucugugacaccaugaacucccuaacccuuccaucagaagucaaccucugcaacaucgacaucuucaaccccaaguacgacugcaaaaucaugacauccaaaaccgaugucucaagcagcgucauaaccucacucggcgcuaucguaagcugcuacggcaaaaccaaaugcaccgcaucaaacaaaaaccgcggaaucaucaaaaccuucagcaacggaugcgacuacguuuccaacaaaggcguagacaccgucuccgucggaaacacccucuacugcguaaacaaacaggaaggccaaucccucuacgucaaaggcgaacccaucauaaacuucuacgauccccuugucuucccguccgaugaguucgacgccuccaucucgcaagucaacgaaaagauaaaccaaucacuagcauucauccguaaauccgacgaacuccuccacaacgucaacgucggaaaauccaccaccaacauaaugaucaccaccauaaucaucgucaucaucguaauacuauuacuccucauagccgucggccucuuccuauauugcaaagcccgaucaacccccguaacccuuucuaaagaccaacuguccggaaucaacaacaucgcuuucagcaacugaggacuagugaagggaacacccaaauuuaauucagccuuaagcacaauuaauuaagagugaaacguaauuguacaagcaguuggucacccaccauagggcaugaucaacaccgcaaccuuuccuuuuucccccagugauucugaaaaaccccucuucccuucagcuugcuuagauguuccaaauuuaguaagcuuaaggcggccuacagaagaaaaagaaaaaaaaggccacaaaaguucccucucacuuucaguaaauaaaauaaaagcagcaacagaaauaaagaaauaaaugaaauucaaaaugaaauaaauauuguguugugcagcauuaaaaaaucaauaaaaauuaaaaaugagcaagaucuaaaaaaaaaaaaaaaaaaaaaaaaaaaaaaaaaaaaaaaaaaaaaaaaaaaaaaaaaaaaaaaaugcaucccccccccccccccccccccccccccccccaaaggcucuuuucagagccaccagaauu

SEQ ID NO: 14831 - RNA, 1960 nt, Artificial Sequence
  mRNA product Design d-4 comprising derived and/or modified sequence from HRSV(Memphis-37)__AIY60640.1__F_DSCav1_mut2 (opt1)
gggagagucccgcagucggcguccagcggcucugcuuguucgugugugugucguugcaggccuuauucaagcuuaccauggagcugcccauccucaagaccaacgccaucaccacgauccuggccgcggugacccugugcuucgccagcucccagaacaucaccgaggaguucuaccagagcacgugcuccgccgucagcaagggcuaccucggcgcccugcgcaccgggugguacaccagcgugaucaccaucgagcuguccaacaucaaggagaacaagugcaacggcaccgacgccaaggugaagcucaucaagcaggagcuggacaaguacaagaacgcggucacggaccugcagcuccugaugcagagcaccccggccgccggcuccgggagcgcgaucugcuccggcaucgccgucugcaaggugcugcaccucgagggcgaggugaacaagaucaagaacgcccugcuguccaccaacaaggccgucgugagccucuccaacggggugagcguccugaccuucaaggugcuggaccucaagaacuacaucgacaagcagcugcugcccauccugaacaagcagagcugcuccauccccaacaucgagaccgucaucgaguuccagcagaagaacaaccgccuccuggagaucacgcgggaguucagcgugaacgcgggcgugaccacccccgucuccaccuacaugcugacgaacagcgagcuccugucccugaucaacgacaugccgaucaccaacgaccagaagaagcucaugagcaacaacgugcagaucgugcgccagcaguccuacagcaucaugugcaucaucaaggaggagguccuggccuacguggugcagcugccccucuacggggucaucgacacccccugcuggaagcugcacaccagcccccugugcacgaccaacaccaaggagggcuccaacaucugccucacccggacggaccgcgggugguacugcgacaacgccggcagcguguccuucuucccgcaggccgagaccugcaagguccagagcaaccggguguucugcgacaccaugaacucccugacccugcccagcgaggugaaccucugcaacaucgacaucuucaaccccaaguacgacugcaagaucaugacguccaagaccgacgucagcuccagcgugaucaccucccugggcgccaucgugagcugcuacgggaagaccaagugcacggcgagcaacaagaaccgcggcaucaucaagaccuucuccaacgggugcgacuacgucagcaacaagggcguggacaccguguccgucggcaacacccuguacugcgugaacaagcaggagggccagagccucuacgugaagggggagcccaucaucaacuucuacgacccgcuggucuuccccuccgacgaguucgacgccagcaucucccaggugaacgagaagaucaaccagagccuggccuucauccggaaguccgacgagcuccugcacaacgugaacgucggcaagagcaccacgaacaucaugaucaccaccaucaucaucgugaucaucgugauccugcugcuccugaucgccgucgggcuguuccucuacugcaaggcccgcuccacccccgugacgcugagcaaggaccagcuguccgggaucaacaacaucgcguucagcaacugaggacuaguggaagcauuuuccuggcugauuaaaagaaauuacucagcuauggucaucuguuccuguuagaaggcuaugcagcauauuauauacuaugcgcauguuaugaaaugcauaauaaaaaauuuuaaaaaaucuaaaagaucuaaaaaaaaaaaaaaaaaaaaaaaaaaaaaaaaaaaaaaaaaaaaaaaaaaaaaaaaaaaaaaaaugcaucccccccccccccccccccccccccccccccaaaggcucuuuucagagccaccagaauu

SEQ ID NO: 14832 - RNA, 1960 nt, Artificial Sequence
  mRNA product Design d-4 comprising derived and/or modified sequence from HRSV(Memphis-37)__AIY60640.1__F_DSCav1_mut2 (opt1)
gggagagucccgcagucggcguccagcggcucugcuuguucgugugugugucguugcaggccuuauucaagcuuaccauggagcugcccauccucaagaccaacgccaucaccacgauccuggccgcggugacccugugcuucgccagcucccagaacaucaccgaggaguucuaccagagcacgugcuccgccgucagcaagggcuaccucggggcccugcgcaccggcugguacaccuccgugaucaccaucgagcugagcaacaucaaggagaacaagugcaacgggaccgacgccaaggugaagcucaucaagcaggagcuggacaaguacaagaacgcggucacggaccugcagcuccugaugcaguccaccccggccgccggcagcggguccgccaucugcagcggcaucgcggugugcaaggugcugcaccucgagggcgaggucaacaagaucaagaacgcccugcuguccaccaacaaggccguggugagccucuccaacggggucagcgugcugaccuucaaggugcuggaccucaagaacuacaucgacaagcagcugcugcccauccucaacaagcaguccugcagcauccccaacaucgagacggucaucgaguuccagcagaagaacaaccggcugcuggagaucacccgcgaguucuccgugaacgccggcgugaccacccccgucagcacguacaugcucaccaacuccgagcugcugagccucaucaacgacaugccgaucaccaacgaccagaagaagcugaugagcaacaacgugcagaucgugcggcagcaguccuacagcaucaugugcaucaucaaggaggagguccuggccuacguggugcagcucccccuguacggggucaucgacacccccugcuggaagcugcacacgagcccccucugcaccaccaacaccaaggagggcuccaacaucugccugacgcgcaccgaccgggggugguacugcgacaacgcgggcuccgugagcuucuucccgcaggccgagaccugcaaggugcaguccaaccgcgucuucugcgacaccaugaacagccugacgcuccccuccgaggugaaccugugcaacaucgacaucuucaaccccaaguacgacugcaagaucaugaccagcaagaccgacgucuccagcuccgugaucaccagccugggcgccaucguguccugcuacgggaagacgaagugcaccgccagcaacaagaaccggggcaucaucaagaccuucuccaacgggugcgacuacgucagcaacaagggcguggacaccguguccgucggcaacacgcucuacugcgugaacaagcaggaggggcagagccuguacgugaagggcgagcccaucaucaacuucuacgacccgcuggucuuccccagcgacgaguucgacgccuccaucagccaggugaacgagaagaucaaccagucccucgcguucauccgcaagagcgacgagcugcugcacaacgugaacgucgggaaguccaccaccaacaucaugaucaccaccaucaucaucgugaucaucgugauccuccugcugcucaucgccgucggccuguuccuguacugcaaggcccggagcacgcccgugacccuguccaaggaccagcucagcgggaucaacaacaucgccuucuccaacugaggacuaguggaagcauuuuccuggcugauuaaaagaaauuacucagcuauggucaucuguuccuguuagaaggcuaugcagcauauuauauacuaugcgcauguuaugaaaugcauaauaaaaaauuuuaaaaaaucuaaaagaucuaaaaaaaaaaaaaaaaaaaaaaaaaaaaaaaaaaaaaaaaaaaaaaaaaaaaaaaaaaaaaaaaugcaucccccccccccccccccccccccccccccccaaaggcucuuuucagagccaccagaauu

SEQ ID NO: 14833 - RNA, 1960 nt, Artificial Sequence
  mRNA product Design d-4 comprising derived and/or modified sequence from HRSV(Memphis-37)__AIY60640.1__F_DSCav1_mut2 (opt2)
gggagagucccgcagucggcguccagcggcucugcuuguucgugugugugucguugcaggccuuauucaagcuuaccauggagcuccccauccucaagaccaacgccaucaccaccauccucgccgccgucacccucugcuucgccuccucccagaacaucaccgaggaguucuaccaguccaccugcuccgccgucuccaagggcuaccucggcgcccuccgcaccggcugguacaccuccgucaucaccaucgagcucuccaacaucaaggagaacaagugcaacggcaccgacgccaaggucaagcucaucaagcaggagcucgacaaguacaagaacgccgucaccgaccuccagcuccucaugcaguccacccccgccgccggcuccggcuccgccaucugcuccggcaucgccgucugcaagguccuccaccucgagggcgaggucaacaagaucaagaacgcccuccucuccaccaacaaggccgucgucucccucuccaacggcgucuccguccucaccuucaagguccucgaccucaagaacuacaucgacaagcagcuccuccccauccucaacaagcaguccugcuccauccccaacaucgagaccgucaucgaguuccagcagaagaacaaccgccuccucgagaucacccgcgaguucuccgucaacgccggcgucaccacccccgucuccaccuacaugcucaccaacuccgagcuccucucccucaucaacgacaugcccaucaccaacgaccagaagaagcucauguccaacaacguccagaucguccgccagcaguccuacuccaucaugugcaucaucaaggaggagguccucgccuacgucguccagcucccccucuacggcgucaucgacacccccugcuggaagcuccacaccuccccccucugcaccaccaacaccaaggagggcuccaacaucugccucacccgcaccgaccgcggcugguacugcgacaacgccggcuccgucuccuucuucccccaggccgagaccugcaagguccaguccaaccgcgucuucugcgacaccaugaacucccucacccuccccuccgaggucaaccucugcaacaucgacaucuucaaccccaaguacgacugcaagaucaugaccuccaagaccgacgucuccuccuccgucaucaccucccucggcgccaucgucuccugcuacggcaagaccaagugcaccgccuccaacaagaaccgcggcaucaucaagaccuucuccaacggcugcgacuacgucuccaacaagggcgucgacaccgucuccgucggcaacacccucuacugcgucaacaagcaggagggccagucccucuacgucaagggcgagcccaucaucaacuucuacgacccccucgucuuccccuccgacgaguucgacgccuccaucucccaggucaacgagaagaucaaccagucccucgccuucauccgcaaguccgacgagcuccuccacaacgucaacgucggcaaguccaccaccaacaucaugaucaccaccaucaucaucgucaucaucgucauccuccuccuccucaucgccgucggccucuuccucuacugcaaggcccgcuccacccccgucacccucuccaaggaccagcucuccggcaucaacaacaucgccuucuccaacugaggacuaguggaagcauuuuccuggcugauuaaaagaaauuacucagcuauggucaucuguuccuguuagaaggcuaugcagcauauuauauacuaugcgcauguuaugaaaugcauaauaaaaaauuuuaaaaaaucuaaaagaucuaaaaaaaaaaaaaaaaaaaaaaaaaaaaaaaaaaaaaaaaaaaaaaaaaaaaaaaaaaaaaaaaugcaucccccccccccccccccccccccccccccccaaaggcucuuuucagagccaccagaauu

SEQ ID NO: 14834 - RNA, 1960 nt, Artificial Sequence
  mRNA product Design d-4 comprising derived and/or modified sequence from HRSV(Memphis-37)__AIY60640.1__F_DSCav1_mut2 (opt3)
gggagagucccgcagucggcguccagcggcucugcuuguucgugugugugucguugcaggccuuauucaagcuuaccauggagcugcccauccucaagaccaacgccauuacaacuauacuugcugcagugacgcugugcuucgccagcucccagaauaucaccgaagaguuuuaccaaucuacauguucagcggucaguaaaggcuauuugggggcuuuaagaacuggaugguacaccagcguuauuacaaucgaacuguccaacauuaaggagaauaaaugcaacgguaccgacgccaaggugaaacuaaucaagcaggaacucgauaaguauaaaaaugcaguaacugaccugcagcuucugaugcagucuacuccugccgcuggcucggggucagcaauauguagcggaaucgccgugugcaaggucuugcaccucgagggcgaggugaacaaaauuaagaaugcucugcugaguaccaacaaagccguugugucccucucuaauggugucagcguguuaacguucaagguacuggaucuuaagaacuacaucgacaaacaauugcugccaauucuaaauaagcaguccuguucaaucccgaacauagaaacuguuauugaguuucagcagaaaaauaacaggcuccuggaaaucacccgggaguucagugugaaugcgggggucacaacucccgugagcaccuauaugcuuacaaacucugagcuguugucccucauuaacgauaugccuaucaccaaugaccaaaagaaacugaugucaaacaaugugcagaucguccgccagcagagcuacaguauuaugugcauaaucaaggaagagguuuuagcauaugugguacaacugccacucuacggagugauugauacgcccuguuggaaacuucauacuucuccucugugcacaaccaacacuaaggaaggcuccaauaucuguuugacacgaaccgaccguggcugguacugcgauaacgccgggagcgucucguuuuucccacaggcugagacguguaaggugcagucuaauagaguuuucugcgacaccaugaacucccuaacacugcccucagaagugaaucucugcaacauagauauuuucaauccuaaauaugacuguaagaucaugacaaguaaaaccgaugucagcuccucugugaucacaagccugggagccauuguaucaugcuacgguaagacuaaauguaccgcaaguaacaagaauaggggcaucauuaagacauuuuccaacgggugcgacuauguuagcaauaaaggaguggacaccgucucugugggcaacacucuuuacugugucaacaagcaagagggucagucacuguaugugaaaggggagccaauaaucaauuucuacgauccguugguuuuucccagugacgaauuugaugcuagcauuucccaggugaacgagaagaucaaucagucucucgccuuuauccggaaaucggacgaacuguuacacaacguaaaugucggaaagagcacgacaaacauuaugauaaccacuaucauuaucgugauuaucguuauacugcuacuccugaucgcggugggccuuuucuuguauugcaaggcccgcuccaccccugucacacugucaaaagaucaacucaguggcauuaauaacaucgcauucucuaauugaggacuaguggaagcauuuuccuggcugauuaaaagaaauuacucagcuauggucaucuguuccuguuagaaggcuaugcagcauauuauauacuaugcgcauguuaugaaaugcauaauaaaaaauuuuaaaaaaucuaaaagaucuaaaaaaaaaaaaaaaaaaaaaaaaaaaaaaaaaaaaaaaaaaaaaaaaaaaaaaaaaaaaaaaaugcaucccccccccccccccccccccccccccccccaaaggcucuuuucagagccaccagaauu

SEQ ID NO: 14835 - RNA, 1960 nt, Artificial Sequence
  mRNA product Design d-4 comprising derived and/or modified sequence from HRSV(Memphis-37)__AIY60640.1__F_DSCav1_mut2 (opt4)
gggagagucccgcagucggcguccagcggcucugcuuguucgugugugugucguugcaggccuuauucaagcuuaccauggagcugcccauccugaagaccaacgccaucaccaccauccuggccgccgugacccugugcuucgccagcagccagaacaucaccgaggaguucuaccagagcaccugcagcgccgugagcaagggcuaccugggcgcccugagaaccggcugguacaccagcgugaucaccaucgagcugagcaacaucaaggagaacaagugcaacggcaccgacgccaaggugaagcugaucaagcaggagcuggacaaguacaagaacgccgugaccgaccugcagcugcugaugcagagcacccccgccgccggcagcggcagcgccaucugcagcggcaucgccgugugcaaggugcugcaccuggagggcgaggugaacaagaucaagaacgcccugcugagcaccaacaaggccguggugagccugagcaacggcgugagcgugcugaccuucaaggugcuggaccugaagaacuacaucgacaagcagcugcugcccauccugaacaagcagagcugcagcauccccaacaucgagaccgugaucgaguuccagcagaagaacaacagacugcuggagaucaccagagaguucagcgugaacgccggcgugaccacccccgugagcaccuacaugcugaccaacagcgagcugcugagccugaucaacgacaugcccaucaccaacgaccagaagaagcugaugagcaacaacgugcagaucgugagacagcagagcuacagcaucaugugcaucaucaaggaggaggugcuggccuacguggugcagcugccccuguacggcgugaucgacacccccugcuggaagcugcacaccagcccccugugcaccaccaacaccaaggagggcagcaacaucugccugaccagaaccgacagaggcugguacugcgacaacgccggcagcgugagcuucuucccccaggccgagaccugcaaggugcagagcaacagaguguucugcgacaccaugaacagccugacccugcccagcgaggugaaccugugcaacaucgacaucuucaaccccaaguacgacugcaagaucaugaccagcaagaccgacgugagcagcagcgugaucaccagccugggcgccaucgugagcugcuacggcaagaccaagugcaccgccagcaacaagaacagaggcaucaucaagaccuucagcaacggcugcgacuacgugagcaacaagggcguggacaccgugagcgugggcaacacccuguacugcgugaacaagcaggagggccagagccuguacgugaagggcgagcccaucaucaacuucuacgacccccugguguuccccagcgacgaguucgacgccagcaucagccaggugaacgagaagaucaaccagagccuggccuucaucagaaagagcgacgagcugcugcacaacgugaacgugggcaagagcaccaccaacaucaugaucaccaccaucaucaucgugaucaucgugauccugcugcugcugaucgccgugggccuguuccuguacugcaaggccagaagcacccccgugacccugagcaaggaccagcugagcggcaucaacaacaucgccuucagcaacugaggacuaguggaagcauuuuccuggcugauuaaaagaaauuacucagcuauggucaucuguuccuguuagaaggcuaugcagcauauuauauacuaugcgcauguuaugaaaugcauaauaaaaaauuuuaaaaaaucuaaaagaucuaaaaaaaaaaaaaaaaaaaaaaaaaaaaaaaaaaaaaaaaaaaaaaaaaaaaaaaaaaaaaaaaugcaucccccccccccccccccccccccccccccccaaaggcucuuuucagagccaccagaauu

SEQ ID NO: 14836 - RNA, 1960 nt, Artificial Sequence
  mRNA product Design d-4 comprising derived and/or modified sequence from HRSV(Memphis-37)__AIY60640.1__F_DSCav1_mut2 (opt5)
gggagagucccgcagucggcguccagcggcucugcuuguucgugugugugucguugcaggccuuauucaagcuuaccauggagcugcccauccucaagaccaacgccauuacaacgauccuggcugccgugacccuuugcuucgcgagcucccagaauauuacagaagaguuuuaccaaucuaccuguagcgcugucuccaaaggcuaucugggggcccucagaacaggaugguacaccucuguuaucacaauugaacugagcaacaucaaggagaauaaaugcaacggcaccgacgccaaggugaaacuuaucaagcaggaacuggauaaguauaaaaaugcugugacggaccuccagcugcugaugcaguccaccccugccgcugggucuggaagcgccauuuguuccggcaucgcggucugcaaggugcuccaccuggagggggagguuaacaaaauuaagaaugcccuucugagcacaaacaaagcuguggucucucucuccaauggagugagcguucugaccuucaaggugcuugaucugaagaacuacaucgacaaacaacuccugccgauucugaauaagcagucuuguuccauccccaacauugaaacagucaucgaguuucagcagaaaaauaaccggcuccuggaaaucacccgcgaguucagcgugaaugccggcgugacgacaccugucucuaccuauaugcuuacaaacuccgagcugcucagccugauuaacgauaugcccaucaccaaugaccaaaagaaacuuauguccaacaauguucagauugugagacagcagucuuacagcaucaugugcauuaucaaggaagaggugcuggcuuaugucgugcaacucccucuguacggcguuaucgauacccccuguuggaaacugcauacauccccucucugcacgaccaacacaaaggaagggagcaauauuugucugacccggacagaccgcggaugguacugcgauaacgccggcucuguguccuuuuucccgcaggcggagaccuguaagguccagagcaauagaguguuuugcgacacgaugaacucucuuacacugcccagcgaaguuaaucucugcaacaucgauauuuucaauccuaaauaugacuguaagaucaugaccuccaaaaccgaugugucuagcuccgucauuacaagccugggggccaucgugucuugcuacggaaagaccaaauguacagcuuccaacaagaaucggggcaucauuaagacguuuagcaacgggugcgacuaugucucuaauaaaggaguggacaccguuuccgugggcaacacacuuuacugugucaacaagcaagagggccagagccuguaugugaaaggggagcccaucauuaauuucuacgauccucucguuuuucccuccgacgaguucgaugccucuaucagccaggugaacgaaaagauuaaucagucccuggcuuuuauccgcaaaucugacgaacugcuccacaacgucaaugugggaaagagcaccacaaacauuaugaucaccacgaucauuaucgugauuaucguuauucugcuucugcucaucgccgucggccuguuccuguauugcaaggccagauccaccccggugacacuuagcaaagaucaacucucugggaucaauaacauugcuuucuccaauugaggacuaguggaagcauuuuccuggcugauuaaaagaaauuacucagcuauggucaucuguuccuguuagaaggcuaugcagcauauuauauacuaugcgcauguuaugaaaugcauaauaaaaaauuuuaaaaaaucuaaaagaucuaaaaaaaaaaaaaaaaaaaaaaaaaaaaaaaaaaaaaaaaaaaaaaaaaaaaaaaaaaaaaaaaugcaucccccccccccccccccccccccccccccccaaaggcucuuuucagagccaccagaauu

SEQ ID NO: 14837 - RNA, 1960 nt, Artificial Sequence
  mRNA product Design d-4 comprising derived and/or modified sequence from HRSV(Memphis-37)__AIY60640.1__F_DSCav1_mut2 (opt6)
gggagagucccgcagucggcguccagcggcucugcuuguucgugugugugucguugcaggccuuauucaagcuuaccauggagcuuccaauauuaaaaacaaacgcuauaacaacuauacucgcagcaguuacacucugcuucgcauccucacaaaacauaacugaagaauuuuaccaauccacuugcucagccguaucaaaaggauaucuaggagcacuuagaaccggaugguauacaucagugauaacaauagaacuaagcaacauaaaagaaaacaagugcaacggaacugacgcaaaagucaaacuaaucaaacaagaacuagacaaauacaaaaacgcaguaacagaccuacaauuacuaaugcaaucaacaccagcagcaggaucagguucagccauaugcucagguaucgcuguaugcaaaguccuucaccuagaaggugaaguaaacaaaauuaaaaacgcccuacucaguacaaauaaagcugucguaaguuuaucaaacggaguaucaguccuuacauucaaaguauuagaccuaaaaaauuauauagacaaacaauuacuaccaauacucaacaaacaaucaugcucaauaccaaauauagaaaccguaauagaauuucagcaaaaaaauaacagauuacuagaaauaaccagagaauuuucagucaacgcaggagucacaacacccgucucaaccuacaugcuaaccaacucagaacuucuaucucuuaucaacgacaugcccauaaccaaugaucaaaaaaaauuaaugucuaauaacguucaaauaguaagacaacaaucauacucaauaaugugcauaaucaaagaagaaguauuagcauacguaguacaacuaccccuauauggaguaauagacacacccugcuggaaacuacacacauccccccucuguacaacaaacacuaaagaaggaucaaacauuugccuaacaagaacagaccgcggaugguacugcgacaacgcaggcuccguaucuuucuuuccacaagccgaaacuuguaaaguucaaucaaacagaguauuuugcgauacaaugaacuccuuaacauuaccuucagaaguaaaccuaugcaacauagacaucuucaacccaaaauacgacugcaaaauaaugaccucaaaaacagacguauccucaucagucauaaccuccuuaggagcaauaguaucauguuacggaaaaacaaaauguacagcaucaaauaaaaauagaggaauaauaaaaaccuucuccaacggaugcgacuacguauccaauaaaggaguagacaccguaucaguaggaaacacacuauacuguguaaacaaacaagaaggccaaucucuauauguaaaaggcgaaccaaucauaaauuuuuacgacccacuugucuuccccuccgacgaauuugacgcaagcauaucacaaguaaacgaaaaaaucaaccaaagccuagccuucauaaggaaaucugacgaauuacuucauaacguaaauguuggaaaaucaaccacaaacauaaugauaaccaccaucauaauuguaauaauaguaauacuacuacuacuaauugcaguaggacucuuccuauauugcaaagcucgcucaacaccaguuaccuuaucaaaagaccaacuaucuggaauaaacaacauagccuuuuccaacuaaggacuaguggaagcauuuuccuggcugauuaaaagaaauuacucagcuauggucaucuguuccuguuagaaggcuaugcagcauauuauauacuaugcgcauguuaugaaaugcauaauaaaaaauuuuaaaaaaucuaaaagaucuaaaaaaaaaaaaaaaaaaaaaaaaaaaaaaaaaaaaaaaaaaaaaaaaaaaaaaaaaaaaaaaaugcaucccccccccccccccccccccccccccccccaaaggcucuuuucagagccaccagaauu

SEQ ID NO: 14838 - RNA, 1960 nt, Artificial Sequence
  mRNA product Design d-4 comprising derived and/or modified sequence from HRSV(Memphis-37)__AIY60640.1__F_DSCav1_mut2 (opt11)
gggagagucccgcagucggcguccagcggcucugcuuguucgugugugugucguugcaggccuuauucaagcuuaccauggaacucccaauccuaaaaaccaacgccaucaccaccauccucgccgcugucaccuuaugcuuugccagcagccaaaacaucaccgaagaauuuuaccaaucaacaugcuccgccgucucaaaaggauaccucggcgcccuacgcaccggcugguacacaagcgucauaaccaucgagcucuccaacaucaaggaaaacaaaugcaauggaaccgacgccaaagucaaacuaaucaaacaagaacuagacaaguacaagaacgcagucaccgaccuccaacuccucaugcaguccacccccgcagcaggcucuggcucagcaauaugcuccggcaucgcugucugcaaaguccuacaccucgaaggcgaagucaacaaaaucaaaaacgcccuacuguccacaaacaaagccgucgucucccuauccaacggcgucucgguccuaaccuuuaagguucucgaucucaaaaauuacauagacaaacaacuacuccccauccucaacaaacaaucuugcucaauccccaacaucgaaaccgucaucgaguuccaacagaaaaacaacagacuacucgaaaucacccgcgaguucucagucaacgcgggcgucacaacacccgucagcaccuacaugcuaaccaacuccgaacuccucagccucauuaacgacaugcccaucaccaacgaccaaaagaaacuuauguccaacaacguucaaaucguccgccaacaauccuacuccaucaugugcaucaucaaagaagaaguacucgccuacguaguccaacugccccucuacggcgucaucgauaccccaugcuggaaacuacacaccagcccccucugcaccaccaacaccaaagaaggcuccaauaucugcuuaacccgcacagaccguggcugguacugcgauaacgccggcuccgucuccuucuucccccaagcagaaaccugcaaaguacaauccaaccgagucuucugugacaccaugaacucccuaacccuuccaucagaagucaaccucugcaacaucgacaucuucaaccccaaguacgacugcaaaaucaugacauccaaaaccgaugucucaagcagcgucauaaccucacucggcgcuaucguaagcugcuacggcaaaaccaaaugcaccgcaucaaacaaaaaccgcggaaucaucaaaaccuucagcaacggaugcgacuacguuuccaacaaaggcguagacaccgucuccgucggaaacacccucuacugcguaaacaaacaggaaggccaaucccucuacgucaaaggcgaacccaucauaaacuucuacgauccccuugucuucccguccgaugaguucgacgccuccaucucgcaagucaacgaaaagauaaaccaaucacuagcauucauccguaaauccgacgaacuccuccacaacgucaacgucggaaaauccaccaccaacauaaugaucaccaccauaaucaucgucaucaucguaauacuauuacuccucauagccgucggccucuuccuauauugcaaagcccgaucaacccccguaacccuuucuaaagaccaacuguccggaaucaacaacaucgcuuucagcaacugaggacuaguggaagcauuuuccuggcugauuaaaagaaauuacucagcuauggucaucuguuccuguuagaaggcuaugcagcauauuauauacuaugcgcauguuaugaaaugcauaauaaaaaauuuuaaaaaaucuaaaagaucuaaaaaaaaaaaaaaaaaaaaaaaaaaaaaaaaaaaaaaaaaaaaaaaaaaaaaaaaaaaaaaaaugcaucccccccccccccccccccccccccccccccaaaggcucuuuucagagccaccagaauu

SEQ ID NO: 14839 - RNA, 2057 nt, Artificial Sequence
  mRNA product Design d-5 comprising derived and/or modified sequence from HRSV(Memphis-37)__AIY60640.1__F_DSCav1_mut2 (opt1)
gggagagggcgcuuggcuugcaaggacccugagcugcggcauugaagcacacccaacccaacucgacugaagucagccucacugaaccggaucugagaaucuucucucucugggcuugccagggcucuccgaaccuagcuagcauccucuucaauuccaacuagaaagcuuaccauggagcugcccauccucaagaccaacgccaucaccacgauccuggccgcggugacccugugcuucgccagcucccagaacaucaccgaggaguucuaccagagcacgugcuccgccgucagcaagggcuaccucggcgcccugcgcaccgggugguacaccagcgugaucaccaucgagcuguccaacaucaaggagaacaagugcaacggcaccgacgccaaggugaagcucaucaagcaggagcuggacaaguacaagaacgcggucacggaccugcagcuccugaugcagagcaccccggccgccggcuccgggagcgcgaucugcuccggcaucgccgucugcaaggugcugcaccucgagggcgaggugaacaagaucaagaacgcccugcuguccaccaacaaggccgucgugagccucuccaacggggugagcguccugaccuucaaggugcuggaccucaagaacuacaucgacaagcagcugcugcccauccugaacaagcagagcugcuccauccccaacaucgagaccgucaucgaguuccagcagaagaacaaccgccuccuggagaucacgcgggaguucagcgugaacgcgggcgugaccacccccgucuccaccuacaugcugacgaacagcgagcuccugucccugaucaacgacaugccgaucaccaacgaccagaagaagcucaugagcaacaacgugcagaucgugcgccagcaguccuacagcaucaugugcaucaucaaggaggagguccuggccuacguggugcagcugccccucuacggggucaucgacacccccugcuggaagcugcacaccagcccccugugcacgaccaacaccaaggagggcuccaacaucugccucacccggacggaccgcgggugguacugcgacaacgccggcagcguguccuucuucccgcaggccgagaccugcaagguccagagcaaccggguguucugcgacaccaugaacucccugacccugcccagcgaggugaaccucugcaacaucgacaucuucaaccccaaguacgacugcaagaucaugacguccaagaccgacgucagcuccagcgugaucaccucccugggcgccaucgugagcugcuacgggaagaccaagugcacggcgagcaacaagaaccgcggcaucaucaagaccuucuccaacgggugcgacuacgucagcaacaagggcguggacaccguguccgucggcaacacccuguacugcgugaacaagcaggagggccagagccucuacgugaagggggagcccaucaucaacuucuacgacccgcuggucuuccccuccgacgaguucgacgccagcaucucccaggugaacgagaagaucaaccagagccuggccuucauccggaaguccgacgagcuccugcacaacgugaacgucggcaagagcaccacgaacaucaugaucaccaccaucaucaucgugaucaucgugauccugcugcuccugaucgccgucgggcuguuccucuacugcaaggcccgcuccacccccgugacgcugagcaaggaccagcuguccgggaucaacaacaucgcguucagcaacugaggacuaguggaagcauuuuccuggcugauuaaaagaaauuacucagcuauggucaucuguuccuguuagaaggcuaugcagcauauuauauacuaugcgcauguuaugaaaugcauaauaaaaaauuuuaaaaaaucuaaaagaucuaaaaaaaaaaaaaaaaaaaaaaaaaaaaaaaaaaaaaaaaaaaaaaaaaaaaaaaaaaaaaaaaugcaucccccccccccccccccccccccccccccccaaaggcucuuuucagagccaccagaauu

SEQ ID NO: 14840 - RNA, 2057 nt, Artificial Sequence
  mRNA product Design d-5 comprising derived and/or modified sequence from HRSV(Memphis-37)__AIY60640.1__F_DSCav1_mut2 (opt1)
gggagagggcgcuuggcuugcaaggacccugagcugcggcauugaagcacacccaacccaacucgacugaagucagccucacugaaccggaucugagaaucuucucucucugggcuugccagggcucuccgaaccuagcuagcauccucuucaauuccaacuagaaagcuuaccauggagcugcccauccucaagaccaacgccaucaccacgauccuggccgcggugacccugugcuucgccagcucccagaacaucaccgaggaguucuaccagagcacgugcuccgccgucagcaagggcuaccucggggcccugcgcaccggcugguacaccuccgugaucaccaucgagcugagcaacaucaaggagaacaagugcaacgggaccgacgccaaggugaagcucaucaagcaggagcuggacaaguacaagaacgcggucacggaccugcagcuccugaugcaguccaccccggccgccggcagcggguccgccaucugcagcggcaucgcggugugcaaggugcugcaccucgagggcgaggucaacaagaucaagaacgcccugcuguccaccaacaaggccguggugagccucuccaacggggucagcgugcugaccuucaaggugcuggaccucaagaacuacaucgacaagcagcugcugcccauccucaacaagcaguccugcagcauccccaacaucgagacggucaucgaguuccagcagaagaacaaccggcugcuggagaucacccgcgaguucuccgugaacgccggcgugaccacccccgucagcacguacaugcucaccaacuccgagcugcugagccucaucaacgacaugccgaucaccaacgaccagaagaagcugaugagcaacaacgugcagaucgugcggcagcaguccuacagcaucaugugcaucaucaaggaggagguccuggccuacguggugcagcucccccuguacggggucaucgacacccccugcuggaagcugcacacgagcccccucugcaccaccaacaccaaggagggcuccaacaucugccugacgcgcaccgaccgggggugguacugcgacaacgcgggcuccgugagcuucuucccgcaggccgagaccugcaaggugcaguccaaccgcgucuucugcgacaccaugaacagccugacgcuccccuccgaggugaaccugugcaacaucgacaucuucaaccccaaguacgacugcaagaucaugaccagcaagaccgacgucuccagcuccgugaucaccagccugggcgccaucguguccugcuacgggaagacgaagugcaccgccagcaacaagaaccggggcaucaucaagaccuucuccaacgggugcgacuacgucagcaacaagggcguggacaccguguccgucggcaacacgcucuacugcgugaacaagcaggaggggcagagccuguacgugaagggcgagcccaucaucaacuucuacgacccgcuggucuuccccagcgacgaguucgacgccuccaucagccaggugaacgagaagaucaaccagucccucgcguucauccgcaagagcgacgagcugcugcacaacgugaacgucgggaaguccaccaccaacaucaugaucaccaccaucaucaucgugaucaucgugauccuccugcugcucaucgccgucggccuguuccuguacugcaaggcccggagcacgcccgugacccuguccaaggaccagcucagcgggaucaacaacaucgccuucuccaacugaggacuaguggaagcauuuuccuggcugauuaaaagaaauuacucagcuauggucaucuguuccuguuagaaggcuaugcagcauauuauauacuaugcgcauguuaugaaaugcauaauaaaaaauuuuaaaaaaucuaaaagaucuaaaaaaaaaaaaaaaaaaaaaaaaaaaaaaaaaaaaaaaaaaaaaaaaaaaaaaaaaaaaaaaaugcaucccccccccccccccccccccccccccccccaaaggcucuuuucagagccaccagaauu

SEQ ID NO: 14841 - RNA, 2057 nt, Artificial Sequence
  mRNA product Design d-5 comprising derived and/or modified sequence from HRSV(Memphis-37)__AIY60640.1__F_DSCav1_mut2 (opt2)
gggagagggcgcuuggcuugcaaggacccugagcugcggcauugaagcacacccaacccaacucgacugaagucagccucacugaaccggaucugagaaucuucucucucugggcuugccagggcucuccgaaccuagcuagcauccucuucaauuccaacuagaaagcuuaccauggagcuccccauccucaagaccaacgccaucaccaccauccucgccgccgucacccucugcuucgccuccucccagaacaucaccgaggaguucuaccaguccaccugcuccgccgucuccaagggcuaccucggcgcccuccgcaccggcugguacaccuccgucaucaccaucgagcucuccaacaucaaggagaacaagugcaacggcaccgacgccaaggucaagcucaucaagcaggagcucgacaaguacaagaacgccgucaccgaccuccagcuccucaugcaguccacccccgccgccggcuccggcuccgccaucugcuccggcaucgccgucugcaagguccuccaccucgagggcgaggucaacaagaucaagaacgcccuccucuccaccaacaaggccgucgucucccucuccaacggcgucuccguccucaccuucaagguccucgaccucaagaacuacaucgacaagcagcuccuccccauccucaacaagcaguccugcuccauccccaacaucgagaccgucaucgaguuccagcagaagaacaaccgccuccucgagaucacccgcgaguucuccgucaacgccggcgucaccacccccgucuccaccuacaugcucaccaacuccgagcuccucucccucaucaacgacaugcccaucaccaacgaccagaagaagcucauguccaacaacguccagaucguccgccagcaguccuacuccaucaugugcaucaucaaggaggagguccucgccuacgucguccagcucccccucuacggcgucaucgacacccccugcuggaagcuccacaccuccccccucugcaccaccaacaccaaggagggcuccaacaucugccucacccgcaccgaccgcggcugguacugcgacaacgccggcuccgucuccuucuucccccaggccgagaccugcaagguccaguccaaccgcgucuucugcgacaccaugaacucccucacccuccccuccgaggucaaccucugcaacaucgacaucuucaaccccaaguacgacugcaagaucaugaccuccaagaccgacgucuccuccuccgucaucaccucccucggcgccaucgucuccugcuacggcaagaccaagugcaccgccuccaacaagaaccgcggcaucaucaagaccuucuccaacggcugcgacuacgucuccaacaagggcgucgacaccgucuccgucggcaacacccucuacugcgucaacaagcaggagggccagucccucuacgucaagggcgagcccaucaucaacuucuacgacccccucgucuuccccuccgacgaguucgacgccuccaucucccaggucaacgagaagaucaaccagucccucgccuucauccgcaaguccgacgagcuccuccacaacgucaacgucggcaaguccaccaccaacaucaugaucaccaccaucaucaucgucaucaucgucauccuccuccuccucaucgccgucggccucuuccucuacugcaaggcccgcuccacccccgucacccucuccaaggaccagcucuccggcaucaacaacaucgccuucuccaacugaggacuaguggaagcauuuuccuggcugauuaaaagaaauuacucagcuauggucaucuguuccuguuagaaggcuaugcagcauauuauauacuaugcgcauguuaugaaaugcauaauaaaaaauuuuaaaaaaucuaaaagaucuaaaaaaaaaaaaaaaaaaaaaaaaaaaaaaaaaaaaaaaaaaaaaaaaaaaaaaaaaaaaaaaaugcaucccccccccccccccccccccccccccccccaaaggcucuuuucagagccaccagaauu

SEQ ID NO: 14842 - RNA, 2057 nt, Artificial Sequence
  mRNA product Design d-5 comprising derived and/or modified sequence from HRSV(Memphis-37)__AIY60640.1__F_DSCav1_mut2 (opt3)
gggagagggcgcuuggcuugcaaggacccugagcugcggcauugaagcacacccaacccaacucgacugaagucagccucacugaaccggaucugagaaucuucucucucugggcuugccagggcucuccgaaccuagcuagcauccucuucaauuccaacuagaaagcuuaccauggagcugcccauccucaagaccaacgccauuacaacuauacuugcugcagugacgcugugcuucgccagcucccagaauaucaccgaagaguuuuaccaaucuacauguucagcggucaguaaaggcuauuugggggcuuuaagaacuggaugguacaccagcguuauuacaaucgaacuguccaacauuaaggagaauaaaugcaacgguaccgacgccaaggugaaacuaaucaagcaggaacucgauaaguauaaaaaugcaguaacugaccugcagcuucugaugcagucuacuccugccgcuggcucggggucagcaauauguagcggaaucgccgugugcaaggucuugcaccucgagggcgaggugaacaaaauuaagaaugcucugcugaguaccaacaaagccguugugucccucucuaauggugucagcguguuaacguucaagguacuggaucuuaagaacuacaucgacaaacaauugcugccaauucuaaauaagcaguccuguucaaucccgaacauagaaacuguuauugaguuucagcagaaaaauaacaggcuccuggaaaucacccgggaguucagugugaaugcgggggucacaacucccgugagcaccuauaugcuuacaaacucugagcuguugucccucauuaacgauaugccuaucaccaaugaccaaaagaaacugaugucaaacaaugugcagaucguccgccagcagagcuacaguauuaugugcauaaucaaggaagagguuuuagcauaugugguacaacugccacucuacggagugauugauacgcccuguuggaaacuucauacuucuccucugugcacaaccaacacuaaggaaggcuccaauaucuguuugacacgaaccgaccguggcugguacugcgauaacgccgggagcgucucguuuuucccacaggcugagacguguaaggugcagucuaauagaguuuucugcgacaccaugaacucccuaacacugcccucagaagugaaucucugcaacauagauauuuucaauccuaaauaugacuguaagaucaugacaaguaaaaccgaugucagcuccucugugaucacaagccugggagccauuguaucaugcuacgguaagacuaaauguaccgcaaguaacaagaauaggggcaucauuaagacauuuuccaacgggugcgacuauguuagcaauaaaggaguggacaccgucucugugggcaacacucuuuacugugucaacaagcaagagggucagucacuguaugugaaaggggagccaauaaucaauuucuacgauccguugguuuuucccagugacgaauuugaugcuagcauuucccaggugaacgagaagaucaaucagucucucgccuuuauccggaaaucggacgaacuguuacacaacguaaaugucggaaagagcacgacaaacauuaugauaaccacuaucauuaucgugauuaucguuauacugcuacuccugaucgcggugggccuuuucuuguauugcaaggcccgcuccaccccugucacacugucaaaagaucaacucaguggcauuaauaacaucgcauucucuaauugaggacuaguggaagcauuuuccuggcugauuaaaagaaauuacucagcuauggucaucuguuccuguuagaaggcuaugcagcauauuauauacuaugcgcauguuaugaaaugcauaauaaaaaauuuuaaaaaaucuaaaagaucuaaaaaaaaaaaaaaaaaaaaaaaaaaaaaaaaaaaaaaaaaaaaaaaaaaaaaaaaaaaaaaaaugcaucccccccccccccccccccccccccccccccaaaggcucuuuucagagccaccagaauu

SEQ ID NO: 14843 - RNA, 2057 nt, Artificial Sequence
  mRNA product Design d-5 comprising derived and/or modified sequence from HRSV(Memphis-37)__AIY60640.1__F_DSCav1_mut2 (opt4)
gggagagggcgcuuggcuugcaaggacccugagcugcggcauugaagcacacccaacccaacucgacugaagucagccucacugaaccggaucugagaaucuucucucucugggcuugccagggcucuccgaaccuagcuagcauccucuucaauuccaacuagaaagcuuaccauggagcugcccauccugaagaccaacgccaucaccaccauccuggccgccgugacccugugcuucgccagcagccagaacaucaccgaggaguucuaccagagcaccugcagcgccgugagcaagggcuaccugggcgcccugagaaccggcugguacaccagcgugaucaccaucgagcugagcaacaucaaggagaacaagugcaacggcaccgacgccaaggugaagcugaucaagcaggagcuggacaaguacaagaacgccgugaccgaccugcagcugcugaugcagagcacccccgccgccggcagcggcagcgccaucugcagcggcaucgccgugugcaaggugcugcaccuggagggcgaggugaacaagaucaagaacgcccugcugagcaccaacaaggccguggugagccugagcaacggcgugagcgugcugaccuucaaggugcuggaccugaagaacuacaucgacaagcagcugcugcccauccugaacaagcagagcugcagcauccccaacaucgagaccgugaucgaguuccagcagaagaacaacagacugcuggagaucaccagagaguucagcgugaacgccggcgugaccacccccgugagcaccuacaugcugaccaacagcgagcugcugagccugaucaacgacaugcccaucaccaacgaccagaagaagcugaugagcaacaacgugcagaucgugagacagcagagcuacagcaucaugugcaucaucaaggaggaggugcuggccuacguggugcagcugccccuguacggcgugaucgacacccccugcuggaagcugcacaccagcccccugugcaccaccaacaccaaggagggcagcaacaucugccugaccagaaccgacagaggcugguacugcgacaacgccggcagcgugagcuucuucccccaggccgagaccugcaaggugcagagcaacagaguguucugcgacaccaugaacagccugacccugcccagcgaggugaaccugugcaacaucgacaucuucaaccccaaguacgacugcaagaucaugaccagcaagaccgacgugagcagcagcgugaucaccagccugggcgccaucgugagcugcuacggcaagaccaagugcaccgccagcaacaagaacagaggcaucaucaagaccuucagcaacggcugcgacuacgugagcaacaagggcguggacaccgugagcgugggcaacacccuguacugcgugaacaagcaggagggccagagccuguacgugaagggcgagcccaucaucaacuucuacgacccccugguguuccccagcgacgaguucgacgccagcaucagccaggugaacgagaagaucaaccagagccuggccuucaucagaaagagcgacgagcugcugcacaacgugaacgugggcaagagcaccaccaacaucaugaucaccaccaucaucaucgugaucaucgugauccugcugcugcugaucgccgugggccuguuccuguacugcaaggccagaagcacccccgugacccugagcaaggaccagcugagcggcaucaacaacaucgccuucagcaacugaggacuaguggaagcauuuuccuggcugauuaaaagaaauuacucagcuauggucaucuguuccuguuagaaggcuaugcagcauauuauauacuaugcgcauguuaugaaaugcauaauaaaaaauuuuaaaaaaucuaaaagaucuaaaaaaaaaaaaaaaaaaaaaaaaaaaaaaaaaaaaaaaaaaaaaaaaaaaaaaaaaaaaaaaaugcaucccccccccccccccccccccccccccccccaaaggcucuuuucagagccaccagaauu

SEQ ID NO: 14844 - RNA, 2057 nt, Artificial Sequence
  mRNA product Design d-5 comprising derived and/or modified sequence from HRSV(Memphis-37)__AIY60640.1__F_DSCav1_mut2 (opt5)
gggagagggcgcuuggcuugcaaggacccugagcugcggcauugaagcacacccaacccaacucgacugaagucagccucacugaaccggaucugagaaucuucucucucugggcuugccagggcucuccgaaccuagcuagcauccucuucaauuccaacuagaaagcuuaccauggagcugcccauccucaagaccaacgccauuacaacgauccuggcugccgugacccuuugcuucgcgagcucccagaauauuacagaagaguuuuaccaaucuaccuguagcgcugucuccaaaggcuaucugggggcccucagaacaggaugguacaccucuguuaucacaauugaacugagcaacaucaaggagaauaaaugcaacggcaccgacgccaaggugaaacuuaucaagcaggaacuggauaaguauaaaaaugcugugacggaccuccagcugcugaugcaguccaccccugccgcugggucuggaagcgccauuuguuccggcaucgcggucugcaaggugcuccaccuggagggggagguuaacaaaauuaagaaugcccuucugagcacaaacaaagcuguggucucucucuccaauggagugagcguucugaccuucaaggugcuugaucugaagaacuacaucgacaaacaacuccugccgauucugaauaagcagucuuguuccauccccaacauugaaacagucaucgaguuucagcagaaaaauaaccggcuccuggaaaucacccgcgaguucagcgugaaugccggcgugacgacaccugucucuaccuauaugcuuacaaacuccgagcugcucagccugauuaacgauaugcccaucaccaaugaccaaaagaaacuuauguccaacaauguucagauugugagacagcagucuuacagcaucaugugcauuaucaaggaagaggugcuggcuuaugucgugcaacucccucuguacggcguuaucgauacccccuguuggaaacugcauacauccccucucugcacgaccaacacaaaggaagggagcaauauuugucugacccggacagaccgcggaugguacugcgauaacgccggcucuguguccuuuuucccgcaggcggagaccuguaagguccagagcaauagaguguuuugcgacacgaugaacucucuuacacugcccagcgaaguuaaucucugcaacaucgauauuuucaauccuaaauaugacuguaagaucaugaccuccaaaaccgaugugucuagcuccgucauuacaagccugggggccaucgugucuugcuacggaaagaccaaauguacagcuuccaacaagaaucggggcaucauuaagacguuuagcaacgggugcgacuaugucucuaauaaaggaguggacaccguuuccgugggcaacacacuuuacugugucaacaagcaagagggccagagccuguaugugaaaggggagcccaucauuaauuucuacgauccucucguuuuucccuccgacgaguucgaugccucuaucagccaggugaacgaaaagauuaaucagucccuggcuuuuauccgcaaaucugacgaacugcuccacaacgucaaugugggaaagagcaccacaaacauuaugaucaccacgaucauuaucgugauuaucguuauucugcuucugcucaucgccgucggccuguuccuguauugcaaggccagauccaccccggugacacuuagcaaagaucaacucucugggaucaauaacauugcuuucuccaauugaggacuaguggaagcauuuuccuggcugauuaaaagaaauuacucagcuauggucaucuguuccuguuagaaggcuaugcagcauauuauauacuaugcgcauguuaugaaaugcauaauaaaaaauuuuaaaaaaucuaaaagaucuaaaaaaaaaaaaaaaaaaaaaaaaaaaaaaaaaaaaaaaaaaaaaaaaaaaaaaaaaaaaaaaaugcaucccccccccccccccccccccccccccccccaaaggcucuuuucagagccaccagaauu

SEQ ID NO: 14845 - RNA, 2057 nt, Artificial Sequence
  mRNA product Design d-5 comprising derived and/or modified sequence from HRSV(Memphis-37)__AIY60640.1__F_DSCav1_mut2 (opt6)
gggagagggcgcuuggcuugcaaggacccugagcugcggcauugaagcacacccaacccaacucgacugaagucagccucacugaaccggaucugagaaucuucucucucugggcuugccagggcucuccgaaccuagcuagcauccucuucaauuccaacuagaaagcuuaccauggagcuuccaauauuaaaaacaaacgcuauaacaacuauacucgcagcaguuacacucugcuucgcauccucacaaaacauaacugaagaauuuuaccaauccacuugcucagccguaucaaaaggauaucuaggagcacuuagaaccggaugguauacaucagugauaacaauagaacuaagcaacauaaaagaaaacaagugcaacggaacugacgcaaaagucaaacuaaucaaacaagaacuagacaaauacaaaaacgcaguaacagaccuacaauuacuaaugcaaucaacaccagcagcaggaucagguucagccauaugcucagguaucgcuguaugcaaaguccuucaccuagaaggugaaguaaacaaaauuaaaaacgcccuacucaguacaaauaaagcugucguaaguuuaucaaacggaguaucaguccuuacauucaaaguauuagaccuaaaaaauuauauagacaaacaauuacuaccaauacucaacaaacaaucaugcucaauaccaaauauagaaaccguaauagaauuucagcaaaaaaauaacagauuacuagaaauaaccagagaauuuucagucaacgcaggagucacaacacccgucucaaccuacaugcuaaccaacucagaacuucuaucucuuaucaacgacaugcccauaaccaaugaucaaaaaaaauuaaugucuaauaacguucaaauaguaagacaacaaucauacucaauaaugugcauaaucaaagaagaaguauuagcauacguaguacaacuaccccuauauggaguaauagacacacccugcuggaaacuacacacauccccccucuguacaacaaacacuaaagaaggaucaaacauuugccuaacaagaacagaccgcggaugguacugcgacaacgcaggcuccguaucuuucuuuccacaagccgaaacuuguaaaguucaaucaaacagaguauuuugcgauacaaugaacuccuuaacauuaccuucagaaguaaaccuaugcaacauagacaucuucaacccaaaauacgacugcaaaauaaugaccucaaaaacagacguauccucaucagucauaaccuccuuaggagcaauaguaucauguuacggaaaaacaaaauguacagcaucaaauaaaaauagaggaauaauaaaaaccuucuccaacggaugcgacuacguauccaauaaaggaguagacaccguaucaguaggaaacacacuauacuguguaaacaaacaagaaggccaaucucuauauguaaaaggcgaaccaaucauaaauuuuuacgacccacuugucuuccccuccgacgaauuugacgcaagcauaucacaaguaaacgaaaaaaucaaccaaagccuagccuucauaaggaaaucugacgaauuacuucauaacguaaauguuggaaaaucaaccacaaacauaaugauaaccaccaucauaauuguaauaauaguaauacuacuacuacuaauugcaguaggacucuuccuauauugcaaagcucgcucaacaccaguuaccuuaucaaaagaccaacuaucuggaauaaacaacauagccuuuuccaacuaaggacuaguggaagcauuuuccuggcugauuaaaagaaauuacucagcuauggucaucuguuccuguuagaaggcuaugcagcauauuauauacuaugcgcauguuaugaaaugcauaauaaaaaauuuuaaaaaaucuaaaagaucuaaaaaaaaaaaaaaaaaaaaaaaaaaaaaaaaaaaaaaaaaaaaaaaaaaaaaaaaaaaaaaaaugcaucccccccccccccccccccccccccccccccaaaggcucuuuucagagccaccagaauu

SEQ ID NO: 14846 - RNA, 2057 nt, Artificial Sequence
  mRNA product Design d-5 comprising derived and/or modified sequence from HRSV(Memphis-37)__AIY60640.1__F_DSCav1_mut2 (opt11)
gggagagggcgcuuggcuugcaaggacccugagcugcggcauugaagcacacccaacccaacucgacugaagucagccucacugaaccggaucugagaaucuucucucucugggcuugccagggcucuccgaaccuagcuagcauccucuucaauuccaacuagaaagcuuaccauggaacucccaauccuaaaaaccaacgccaucaccaccauccucgccgcugucaccuuaugcuuugccagcagccaaaacaucaccgaagaauuuuaccaaucaacaugcuccgccgucucaaaaggauaccucggcgcccuacgcaccggcugguacacaagcgucauaaccaucgagcucuccaacaucaaggaaaacaaaugcaauggaaccgacgccaaagucaaacuaaucaaacaagaacuagacaaguacaagaacgcagucaccgaccuccaacuccucaugcaguccacccccgcagcaggcucuggcucagcaauaugcuccggcaucgcugucugcaaaguccuacaccucgaaggcgaagucaacaaaaucaaaaacgcccuacuguccacaaacaaagccgucgucucccuauccaacggcgucucgguccuaaccuuuaagguucucgaucucaaaaauuacauagacaaacaacuacuccccauccucaacaaacaaucuugcucaauccccaacaucgaaaccgucaucgaguuccaacagaaaaacaacagacuacucgaaaucacccgcgaguucucagucaacgcgggcgucacaacacccgucagcaccuacaugcuaaccaacuccgaacuccucagccucauuaacgacaugcccaucaccaacgaccaaaagaaacuuauguccaacaacguucaaaucguccgccaacaauccuacuccaucaugugcaucaucaaagaagaaguacucgccuacguaguccaacugccccucuacggcgucaucgauaccccaugcuggaaacuacacaccagcccccucugcaccaccaacaccaaagaaggcuccaauaucugcuuaacccgcacagaccguggcugguacugcgauaacgccggcuccgucuccuucuucccccaagcagaaaccugcaaaguacaauccaaccgagucuucugugacaccaugaacucccuaacccuuccaucagaagucaaccucugcaacaucgacaucuucaaccccaaguacgacugcaaaaucaugacauccaaaaccgaugucucaagcagcgucauaaccucacucggcgcuaucguaagcugcuacggcaaaaccaaaugcaccgcaucaaacaaaaaccgcggaaucaucaaaaccuucagcaacggaugcgacuacguuuccaacaaaggcguagacaccgucuccgucggaaacacccucuacugcguaaacaaacaggaaggccaaucccucuacgucaaaggcgaacccaucauaaacuucuacgauccccuugucuucccguccgaugaguucgacgccuccaucucgcaagucaacgaaaagauaaaccaaucacuagcauucauccguaaauccgacgaacuccuccacaacgucaacgucggaaaauccaccaccaacauaaugaucaccaccauaaucaucgucaucaucguaauacuauuacuccucauagccgucggccucuuccuauauugcaaagcccgaucaacccccguaacccuuucuaaagaccaacuguccggaaucaacaacaucgcuuucagcaacugaggacuaguggaagcauuuuccuggcugauuaaaagaaauuacucagcuauggucaucuguuccuguuagaaggcuaugcagcauauuauauacuaugcgcauguuaugaaaugcauaauaaaaaauuuuaaaaaaucuaaaagaucuaaaaaaaaaaaaaaaaaaaaaaaaaaaaaaaaaaaaaaaaaaaaaaaaaaaaaaaaaaaaaaaaugcaucccccccccccccccccccccccccccccccaaaggcucuuuucagagccaccagaauu

SEQ ID NO: 14847 - RNA, 1937 nt, Artificial Sequence
  mRNA product Design e-1 comprising derived and/or modified sequence from HRSV(Memphis-37)__AIY60640.1__F_DSCav1_mut2 (opt1)
gggagaauauaagcguuggcggagcgucgguuguagcacucugcgcgcccgcucuucugcugcuguuugucuacuuccuccugcuuccccgccgccgccgccgccaucaagcuuaccauggagcugcccauccucaagaccaacgccaucaccacgauccuggccgcggugacccugugcuucgccagcucccagaacaucaccgaggaguucuaccagagcacgugcuccgccgucagcaagggcuaccucggcgcccugcgcaccgggugguacaccagcgugaucaccaucgagcuguccaacaucaaggagaacaagugcaacggcaccgacgccaaggugaagcucaucaagcaggagcuggacaaguacaagaacgcggucacggaccugcagcuccugaugcagagcaccccggccgccggcuccgggagcgcgaucugcuccggcaucgccgucugcaaggugcugcaccucgagggcgaggugaacaagaucaagaacgcccugcuguccaccaacaaggccgucgugagccucuccaacggggugagcguccugaccuucaaggugcuggaccucaagaacuacaucgacaagcagcugcugcccauccugaacaagcagagcugcuccauccccaacaucgagaccgucaucgaguuccagcagaagaacaaccgccuccuggagaucacgcgggaguucagcgugaacgcgggcgugaccacccccgucuccaccuacaugcugacgaacagcgagcuccugucccugaucaacgacaugccgaucaccaacgaccagaagaagcucaugagcaacaacgugcagaucgugcgccagcaguccuacagcaucaugugcaucaucaaggaggagguccuggccuacguggugcagcugccccucuacggggucaucgacacccccugcuggaagcugcacaccagcccccugugcacgaccaacaccaaggagggcuccaacaucugccucacccggacggaccgcgggugguacugcgacaacgccggcagcguguccuucuucccgcaggccgagaccugcaagguccagagcaaccggguguucugcgacaccaugaacucccugacccugcccagcgaggugaaccucugcaacaucgacaucuucaaccccaaguacgacugcaagaucaugacguccaagaccgacgucagcuccagcgugaucaccucccugggcgccaucgugagcugcuacgggaagaccaagugcacggcgagcaacaagaaccgcggcaucaucaagaccuucuccaacgggugcgacuacgucagcaacaagggcguggacaccguguccgucggcaacacccuguacugcgugaacaagcaggagggccagagccucuacgugaagggggagcccaucaucaacuucuacgacccgcuggucuuccccuccgacgaguucgacgccagcaucucccaggugaacgagaagaucaaccagagccuggccuucauccggaaguccgacgagcuccugcacaacgugaacgucggcaagagcaccacgaacaucaugaucaccaccaucaucaucgugaucaucgugauccugcugcuccugaucgccgucgggcuguuccucuacugcaaggcccgcuccacccccgugacgcugagcaaggaccagcuguccgggaucaacaacaucgcguucagcaacugaggacuaguguccaccugucccuccugggcugcuggauugucucguuuuccugccaaauaaacaggaucagcgcuuuacagaucuaaaaaaaaaaaaaaaaaaaaaaaaaaaaaaaaaaaaaaaaaaaaaaaaaaaaaaaaaaaaaaaaugcaucccccccccccccccccccccccccccccccaaaggcucuuuucagagccaccagaauu

SEQ ID NO: 14848 - RNA, 1937 nt, Artificial Sequence
  mRNA product Design e-1 comprising derived and/or modified sequence from HRSV(Memphis-37)__AIY60640.1__F_DSCav1_mut2 (opt1)
gggagaauauaagcguuggcggagcgucgguuguagcacucugcgcgcccgcucuucugcugcuguuugucuacuuccuccugcuuccccgccgccgccgccgccaucaagcuuaccauggagcugcccauccucaagaccaacgccaucaccacgauccuggccgcggugacccugugcuucgccagcucccagaacaucaccgaggaguucuaccagagcacgugcuccgccgucagcaagggcuaccucggggcccugcgcaccggcugguacaccuccgugaucaccaucgagcugagcaacaucaaggagaacaagugcaacgggaccgacgccaaggugaagcucaucaagcaggagcuggacaaguacaagaacgcggucacggaccugcagcuccugaugcaguccaccccggccgccggcagcggguccgccaucugcagcggcaucgcggugugcaaggugcugcaccucgagggcgaggucaacaagaucaagaacgcccugcuguccaccaacaaggccguggugagccucuccaacggggucagcgugcugaccuucaaggugcuggaccucaagaacuacaucgacaagcagcugcugcccauccucaacaagcaguccugcagcauccccaacaucgagacggucaucgaguuccagcagaagaacaaccggcugcuggagaucacccgcgaguucuccgugaacgccggcgugaccacccccgucagcacguacaugcucaccaacuccgagcugcugagccucaucaacgacaugccgaucaccaacgaccagaagaagcugaugagcaacaacgugcagaucgugcggcagcaguccuacagcaucaugugcaucaucaaggaggagguccuggccuacguggugcagcucccccuguacggggucaucgacacccccugcuggaagcugcacacgagcccccucugcaccaccaacaccaaggagggcuccaacaucugccugacgcgcaccgaccgggggugguacugcgacaacgcgggcuccgugagcuucuucccgcaggccgagaccugcaaggugcaguccaaccgcgucuucugcgacaccaugaacagccugacgcuccccuccgaggugaaccugugcaacaucgacaucuucaaccccaaguacgacugcaagaucaugaccagcaagaccgacgucuccagcuccgugaucaccagccugggcgccaucguguccugcuacgggaagacgaagugcaccgccagcaacaagaaccggggcaucaucaagaccuucuccaacgggugcgacuacgucagcaacaagggcguggacaccguguccgucggcaacacgcucuacugcgugaacaagcaggaggggcagagccuguacgugaagggcgagcccaucaucaacuucuacgacccgcuggucuuccccagcgacgaguucgacgccuccaucagccaggugaacgagaagaucaaccagucccucgcguucauccgcaagagcgacgagcugcugcacaacgugaacgucgggaaguccaccaccaacaucaugaucaccaccaucaucaucgugaucaucgugauccuccugcugcucaucgccgucggccuguuccuguacugcaaggcccggagcacgcccgugacccuguccaaggaccagcucagcgggaucaacaacaucgccuucuccaacugaggacuaguguccaccugucccuccugggcugcuggauugucucguuuuccugccaaauaaacaggaucagcgcuuuacagaucuaaaaaaaaaaaaaaaaaaaaaaaaaaaaaaaaaaaaaaaaaaaaaaaaaaaaaaaaaaaaaaaaugcaucccccccccccccccccccccccccccccccaaaggcucuuuucagagccaccagaauu

SEQ ID NO: 14849 - RNA, 1937 nt, Artificial Sequence
  mRNA product Design e-1 comprising derived and/or modified sequence from HRSV(Memphis-37)__AIY60640.1__F_DSCav1_mut2 (opt2)
gggagaauauaagcguuggcggagcgucgguuguagcacucugcgcgcccgcucuucugcugcuguuugucuacuuccuccugcuuccccgccgccgccgccgccaucaagcuuaccauggagcuccccauccucaagaccaacgccaucaccaccauccucgccgccgucacccucugcuucgccuccucccagaacaucaccgaggaguucuaccaguccaccugcuccgccgucuccaagggcuaccucggcgcccuccgcaccggcugguacaccuccgucaucaccaucgagcucuccaacaucaaggagaacaagugcaacggcaccgacgccaaggucaagcucaucaagcaggagcucgacaaguacaagaacgccgucaccgaccuccagcuccucaugcaguccacccccgccgccggcuccggcuccgccaucugcuccggcaucgccgucugcaagguccuccaccucgagggcgaggucaacaagaucaagaacgcccuccucuccaccaacaaggccgucgucucccucuccaacggcgucuccguccucaccuucaagguccucgaccucaagaacuacaucgacaagcagcuccuccccauccucaacaagcaguccugcuccauccccaacaucgagaccgucaucgaguuccagcagaagaacaaccgccuccucgagaucacccgcgaguucuccgucaacgccggcgucaccacccccgucuccaccuacaugcucaccaacuccgagcuccucucccucaucaacgacaugcccaucaccaacgaccagaagaagcucauguccaacaacguccagaucguccgccagcaguccuacuccaucaugugcaucaucaaggaggagguccucgccuacgucguccagcucccccucuacggcgucaucgacacccccugcuggaagcuccacaccuccccccucugcaccaccaacaccaaggagggcuccaacaucugccucacccgcaccgaccgcggcugguacugcgacaacgccggcuccgucuccuucuucccccaggccgagaccugcaagguccaguccaaccgcgucuucugcgacaccaugaacucccucacccuccccuccgaggucaaccucugcaacaucgacaucuucaaccccaaguacgacugcaagaucaugaccuccaagaccgacgucuccuccuccgucaucaccucccucggcgccaucgucuccugcuacggcaagaccaagugcaccgccuccaacaagaaccgcggcaucaucaagaccuucuccaacggcugcgacuacgucuccaacaagggcgucgacaccgucuccgucggcaacacccucuacugcgucaacaagcaggagggccagucccucuacgucaagggcgagcccaucaucaacuucuacgacccccucgucuuccccuccgacgaguucgacgccuccaucucccaggucaacgagaagaucaaccagucccucgccuucauccgcaaguccgacgagcuccuccacaacgucaacgucggcaaguccaccaccaacaucaugaucaccaccaucaucaucgucaucaucgucauccuccuccuccucaucgccgucggccucuuccucuacugcaaggcccgcuccacccccgucacccucuccaaggaccagcucuccggcaucaacaacaucgccuucuccaacugaggacuaguguccaccugucccuccugggcugcuggauugucucguuuuccugccaaauaaacaggaucagcgcuuuacagaucuaaaaaaaaaaaaaaaaaaaaaaaaaaaaaaaaaaaaaaaaaaaaaaaaaaaaaaaaaaaaaaaaugcaucccccccccccccccccccccccccccccccaaaggcucuuuucagagccaccagaauu

SEQ ID NO: 14850 - RNA, 1937 nt, Artificial Sequence
  mRNA product Design e-1 comprising derived and/or modified sequence from HRSV(Memphis-37)__AIY60640.1__F_DSCav1_mut2 (opt3)
gggagaauauaagcguuggcggagcgucgguuguagcacucugcgcgcccgcucuucugcugcuguuugucuacuuccuccugcuuccccgccgccgccgccgccaucaagcuuaccauggagcugcccauccucaagaccaacgccauuacaacuauacuugcugcagugacgcugugcuucgccagcucccagaauaucaccgaagaguuuuaccaaucuacauguucagcggucaguaaaggcuauuugggggcuuuaagaacuggaugguacaccagcguuauuacaaucgaacuguccaacauuaaggagaauaaaugcaacgguaccgacgccaaggugaaacuaaucaagcaggaacucgauaaguauaaaaaugcaguaacugaccugcagcuucugaugcagucuacuccugccgcuggcucggggucagcaauauguagcggaaucgccgugugcaaggucuugcaccucgagggcgaggugaacaaaauuaagaaugcucugcugaguaccaacaaagccguugugucccucucuaauggugucagcguguuaacguucaagguacuggaucuuaagaacuacaucgacaaacaauugcugccaauucuaaauaagcaguccuguucaaucccgaacauagaaacuguuauugaguuucagcagaaaaauaacaggcuccuggaaaucacccgggaguucagugugaaugcgggggucacaacucccgugagcaccuauaugcuuacaaacucugagcuguugucccucauuaacgauaugccuaucaccaaugaccaaaagaaacugaugucaaacaaugugcagaucguccgccagcagagcuacaguauuaugugcauaaucaaggaagagguuuuagcauaugugguacaacugccacucuacggagugauugauacgcccuguuggaaacuucauacuucuccucugugcacaaccaacacuaaggaaggcuccaauaucuguuugacacgaaccgaccguggcugguacugcgauaacgccgggagcgucucguuuuucccacaggcugagacguguaaggugcagucuaauagaguuuucugcgacaccaugaacucccuaacacugcccucagaagugaaucucugcaacauagauauuuucaauccuaaauaugacuguaagaucaugacaaguaaaaccgaugucagcuccucugugaucacaagccugggagccauuguaucaugcuacgguaagacuaaauguaccgcaaguaacaagaauaggggcaucauuaagacauuuuccaacgggugcgacuauguuagcaauaaaggaguggacaccgucucugugggcaacacucuuuacugugucaacaagcaagagggucagucacuguaugugaaaggggagccaauaaucaauuucuacgauccguugguuuuucccagugacgaauuugaugcuagcauuucccaggugaacgagaagaucaaucagucucucgccuuuauccggaaaucggacgaacuguuacacaacguaaaugucggaaagagcacgacaaacauuaugauaaccacuaucauuaucgugauuaucguuauacugcuacuccugaucgcggugggccuuuucuuguauugcaaggcccgcuccaccccugucacacugucaaaagaucaacucaguggcauuaauaacaucgcauucucuaauugaggacuaguguccaccugucccuccugggcugcuggauugucucguuuuccugccaaauaaacaggaucagcgcuuuacagaucuaaaaaaaaaaaaaaaaaaaaaaaaaaaaaaaaaaaaaaaaaaaaaaaaaaaaaaaaaaaaaaaaugcaucccccccccccccccccccccccccccccccaaaggcucuuuucagagccaccagaauu

SEQ ID NO: 14851 - RNA, 1937 nt, Artificial Sequence
  mRNA product Design e-1 comprising derived and/or modified sequence from HRSV(Memphis-37)__AIY60640.1__F_DSCav1_mut2 (opt4)
gggagaauauaagcguuggcggagcgucgguuguagcacucugcgcgcccgcucuucugcugcuguuugucuacuuccuccugcuuccccgccgccgccgccgccaucaagcuuaccauggagcugcccauccugaagaccaacgccaucaccaccauccuggccgccgugacccugugcuucgccagcagccagaacaucaccgaggaguucuaccagagcaccugcagcgccgugagcaagggcuaccugggcgcccugagaaccggcugguacaccagcgugaucaccaucgagcugagcaacaucaaggagaacaagugcaacggcaccgacgccaaggugaagcugaucaagcaggagcuggacaaguacaagaacgccgugaccgaccugcagcugcugaugcagagcacccccgccgccggcagcggcagcgccaucugcagcggcaucgccgugugcaaggugcugcaccuggagggcgaggugaacaagaucaagaacgcccugcugagcaccaacaaggccguggugagccugagcaacggcgugagcgugcugaccuucaaggugcuggaccugaagaacuacaucgacaagcagcugcugcccauccugaacaagcagagcugcagcauccccaacaucgagaccgugaucgaguuccagcagaagaacaacagacugcuggagaucaccagagaguucagcgugaacgccggcgugaccacccccgugagcaccuacaugcugaccaacagcgagcugcugagccugaucaacgacaugcccaucaccaacgaccagaagaagcugaugagcaacaacgugcagaucgugagacagcagagcuacagcaucaugugcaucaucaaggaggaggugcuggccuacguggugcagcugccccuguacggcgugaucgacacccccugcuggaagcugcacaccagcccccugugcaccaccaacaccaaggagggcagcaacaucugccugaccagaaccgacagaggcugguacugcgacaacgccggcagcgugagcuucuucccccaggccgagaccugcaaggugcagagcaacagaguguucugcgacaccaugaacagccugacccugcccagcgaggugaaccugugcaacaucgacaucuucaaccccaaguacgacugcaagaucaugaccagcaagaccgacgugagcagcagcgugaucaccagccugggcgccaucgugagcugcuacggcaagaccaagugcaccgccagcaacaagaacagaggcaucaucaagaccuucagcaacggcugcgacuacgugagcaacaagggcguggacaccgugagcgugggcaacacccuguacugcgugaacaagcaggagggccagagccuguacgugaagggcgagcccaucaucaacuucuacgacccccugguguuccccagcgacgaguucgacgccagcaucagccaggugaacgagaagaucaaccagagccuggccuucaucagaaagagcgacgagcugcugcacaacgugaacgugggcaagagcaccaccaacaucaugaucaccaccaucaucaucgugaucaucgugauccugcugcugcugaucgccgugggccuguuccuguacugcaaggccagaagcacccccgugacccugagcaaggaccagcugagcggcaucaacaacaucgccuucagcaacugaggacuaguguccaccugucccuccugggcugcuggauugucucguuuuccugccaaauaaacaggaucagcgcuuuacagaucuaaaaaaaaaaaaaaaaaaaaaaaaaaaaaaaaaaaaaaaaaaaaaaaaaaaaaaaaaaaaaaaaugcaucccccccccccccccccccccccccccccccaaaggcucuuuucagagccaccagaauu

SEQ ID NO: 14852 - RNA, 1937 nt, Artificial Sequence
  mRNA product Design e-1 comprising derived and/or modified sequence from HRSV(Memphis-37)__AIY60640.1__F_DSCav1_mut2 (opt5)
gggagaauauaagcguuggcggagcgucgguuguagcacucugcgcgcccgcucuucugcugcuguuugucuacuuccuccugcuuccccgccgccgccgccgccaucaagcuuaccauggagcugcccauccucaagaccaacgccauuacaacgauccuggcugccgugacccuuugcuucgcgagcucccagaauauuacagaagaguuuuaccaaucuaccuguagcgcugucuccaaaggcuaucugggggcccucagaacaggaugguacaccucuguuaucacaauugaacugagcaacaucaaggagaauaaaugcaacggcaccgacgccaaggugaaacuuaucaagcaggaacuggauaaguauaaaaaugcugugacggaccuccagcugcugaugcaguccaccccugccgcugggucuggaagcgccauuuguuccggcaucgcggucugcaaggugcuccaccuggagggggagguuaacaaaauuaagaaugcccuucugagcacaaacaaagcuguggucucucucuccaauggagugagcguucugaccuucaaggugcuugaucugaagaacuacaucgacaaacaacuccugccgauucugaauaagcagucuuguuccauccccaacauugaaacagucaucgaguuucagcagaaaaauaaccggcuccuggaaaucacccgcgaguucagcgugaaugccggcgugacgacaccugucucuaccuauaugcuuacaaacuccgagcugcucagccugauuaacgauaugcccaucaccaaugaccaaaagaaacuuauguccaacaauguucagauugugagacagcagucuuacagcaucaugugcauuaucaaggaagaggugcuggcuuaugucgugcaacucccucuguacggcguuaucgauacccccuguuggaaacugcauacauccccucucugcacgaccaacacaaaggaagggagcaauauuugucugacccggacagaccgcggaugguacugcgauaacgccggcucuguguccuuuuucccgcaggcggagaccuguaagguccagagcaauagaguguuuugcgacacgaugaacucucuuacacugcccagcgaaguuaaucucugcaacaucgauauuuucaauccuaaauaugacuguaagaucaugaccuccaaaaccgaugugucuagcuccgucauuacaagccugggggccaucgugucuugcuacggaaagaccaaauguacagcuuccaacaagaaucggggcaucauuaagacguuuagcaacgggugcgacuaugucucuaauaaaggaguggacaccguuuccgugggcaacacacuuuacugugucaacaagcaagagggccagagccuguaugugaaaggggagcccaucauuaauuucuacgauccucucguuuuucccuccgacgaguucgaugccucuaucagccaggugaacgaaaagauuaaucagucccuggcuuuuauccgcaaaucugacgaacugcuccacaacgucaaugugggaaagagcaccacaaacauuaugaucaccacgaucauuaucgugauuaucguuauucugcuucugcucaucgccgucggccuguuccuguauugcaaggccagauccaccccggugacacuuagcaaagaucaacucucugggaucaauaacauugcuuucuccaauugaggacuaguguccaccugucccuccugggcugcuggauugucucguuuuccugccaaauaaacaggaucagcgcuuuacagaucuaaaaaaaaaaaaaaaaaaaaaaaaaaaaaaaaaaaaaaaaaaaaaaaaaaaaaaaaaaaaaaaaugcaucccccccccccccccccccccccccccccccaaaggcucuuuucagagccaccagaauu

SEQ ID NO: 14853 - RNA, 1937 nt, Artificial Sequence
  mRNA product Design e-1 comprising derived and/or modified sequence from HRSV(Memphis-37)__AIY60640.1__F_DSCav1_mut2 (opt6)
gggagaauauaagcguuggcggagcgucgguuguagcacucugcgcgcccgcucuucugcugcuguuugucuacuuccuccugcuuccccgccgccgccgccgccaucaagcuuaccauggagcuuccaauauuaaaaacaaacgcuauaacaacuauacucgcagcaguuacacucugcuucgcauccucacaaaacauaacugaagaauuuuaccaauccacuugcucagccguaucaaaaggauaucuaggagcacuuagaaccggaugguauacaucagugauaacaauagaacuaagcaacauaaaagaaaacaagugcaacggaacugacgcaaaagucaaacuaaucaaacaagaacuagacaaauacaaaaacgcaguaacagaccuacaauuacuaaugcaaucaacaccagcagcaggaucagguucagccauaugcucagguaucgcuguaugcaaaguccuucaccuagaaggugaaguaaacaaaauuaaaaacgcccuacucaguacaaauaaagcugucguaaguuuaucaaacggaguaucaguccuuacauucaaaguauuagaccuaaaaaauuauauagacaaacaauuacuaccaauacucaacaaacaaucaugcucaauaccaaauauagaaaccguaauagaauuucagcaaaaaaauaacagauuacuagaaauaaccagagaauuuucagucaacgcaggagucacaacacccgucucaaccuacaugcuaaccaacucagaacuucuaucucuuaucaacgacaugcccauaaccaaugaucaaaaaaaauuaaugucuaauaacguucaaauaguaagacaacaaucauacucaauaaugugcauaaucaaagaagaaguauuagcauacguaguacaacuaccccuauauggaguaauagacacacccugcuggaaacuacacacauccccccucuguacaacaaacacuaaagaaggaucaaacauuugccuaacaagaacagaccgcggaugguacugcgacaacgcaggcuccguaucuuucuuuccacaagccgaaacuuguaaaguucaaucaaacagaguauuuugcgauacaaugaacuccuuaacauuaccuucagaaguaaaccuaugcaacauagacaucuucaacccaaaauacgacugcaaaauaaugaccucaaaaacagacguauccucaucagucauaaccuccuuaggagcaauaguaucauguuacggaaaaacaaaauguacagcaucaaauaaaaauagaggaauaauaaaaaccuucuccaacggaugcgacuacguauccaauaaaggaguagacaccguaucaguaggaaacacacuauacuguguaaacaaacaagaaggccaaucucuauauguaaaaggcgaaccaaucauaaauuuuuacgacccacuugucuuccccuccgacgaauuugacgcaagcauaucacaaguaaacgaaaaaaucaaccaaagccuagccuucauaaggaaaucugacgaauuacuucauaacguaaauguuggaaaaucaaccacaaacauaaugauaaccaccaucauaauuguaauaauaguaauacuacuacuacuaauugcaguaggacucuuccuauauugcaaagcucgcucaacaccaguuaccuuaucaaaagaccaacuaucuggaauaaacaacauagccuuuuccaacuaaggacuaguguccaccugucccuccugggcugcuggauugucucguuuuccugccaaauaaacaggaucagcgcuuuacagaucuaaaaaaaaaaaaaaaaaaaaaaaaaaaaaaaaaaaaaaaaaaaaaaaaaaaaaaaaaaaaaaaaugcaucccccccccccccccccccccccccccccccaaaggcucuuuucagagccaccagaauu

SEQ ID NO: 14854 - RNA, 1937 nt, Artificial Sequence
  mRNA product Design e-1 comprising derived and/or modified sequence from HRSV(Memphis-37)__AIY60640.1__F_DSCav1_mut2 (opt11)
gggagaauauaagcguuggcggagcgucgguuguagcacucugcgcgcccgcucuucugcugcuguuugucuacuuccuccugcuuccccgccgccgccgccgccaucaagcuuaccauggaacucccaauccuaaaaaccaacgccaucaccaccauccucgccgcugucaccuuaugcuuugccagcagccaaaacaucaccgaagaauuuuaccaaucaacaugcuccgccgucucaaaaggauaccucggcgcccuacgcaccggcugguacacaagcgucauaaccaucgagcucuccaacaucaaggaaaacaaaugcaauggaaccgacgccaaagucaaacuaaucaaacaagaacuagacaaguacaagaacgcagucaccgaccuccaacuccucaugcaguccacccccgcagcaggcucuggcucagcaauaugcuccggcaucgcugucugcaaaguccuacaccucgaaggcgaagucaacaaaaucaaaaacgcccuacuguccacaaacaaagccgucgucucccuauccaacggcgucucgguccuaaccuuuaagguucucgaucucaaaaauuacauagacaaacaacuacuccccauccucaacaaacaaucuugcucaauccccaacaucgaaaccgucaucgaguuccaacagaaaaacaacagacuacucgaaaucacccgcgaguucucagucaacgcgggcgucacaacacccgucagcaccuacaugcuaaccaacuccgaacuccucagccucauuaacgacaugcccaucaccaacgaccaaaagaaacuuauguccaacaacguucaaaucguccgccaacaauccuacuccaucaugugcaucaucaaagaagaaguacucgccuacguaguccaacugccccucuacggcgucaucgauaccccaugcuggaaacuacacaccagcccccucugcaccaccaacaccaaagaaggcuccaauaucugcuuaacccgcacagaccguggcugguacugcgauaacgccggcuccgucuccuucuucccccaagcagaaaccugcaaaguacaauccaaccgagucuucugugacaccaugaacucccuaacccuuccaucagaagucaaccucugcaacaucgacaucuucaaccccaaguacgacugcaaaaucaugacauccaaaaccgaugucucaagcagcgucauaaccucacucggcgcuaucguaagcugcuacggcaaaaccaaaugcaccgcaucaaacaaaaaccgcggaaucaucaaaaccuucagcaacggaugcgacuacguuuccaacaaaggcguagacaccgucuccgucggaaacacccucuacugcguaaacaaacaggaaggccaaucccucuacgucaaaggcgaacccaucauaaacuucuacgauccccuugucuucccguccgaugaguucgacgccuccaucucgcaagucaacgaaaagauaaaccaaucacuagcauucauccguaaauccgacgaacuccuccacaacgucaacgucggaaaauccaccaccaacauaaugaucaccaccauaaucaucgucaucaucguaauacuauuacuccucauagccgucggccucuuccuauauugcaaagcccgaucaacccccguaacccuuucuaaagaccaacuguccggaaucaacaacaucgcuuucagcaacugaggacuaguguccaccugucccuccugggcugcuggauugucucguuuuccugccaaauaaacaggaucagcgcuuuacagaucuaaaaaaaaaaaaaaaaaaaaaaaaaaaaaaaaaaaaaaaaaaaaaaaaaaaaaaaaaaaaaaaaugcaucccccccccccccccccccccccccccccccaaaggcucuuuucagagccaccagaauu

SEQ ID NO: 14855 - RNA, 1919 nt, Artificial Sequence
  mRNA product Design e-2 comprising derived and/or modified sequence from HRSV(Memphis-37)__AIY60640.1__F_DSCav1_mut2 (opt1)
gggagacccgugacccggaaguuguacggcuacgcgacuuucccucccacaaacccucgcgcccuuccuuuccuacuugggcccggcagaaagcuuaccauggagcugcccauccucaagaccaacgccaucaccacgauccuggccgcggugacccugugcuucgccagcucccagaacaucaccgaggaguucuaccagagcacgugcuccgccgucagcaagggcuaccucggcgcccugcgcaccgggugguacaccagcgugaucaccaucgagcuguccaacaucaaggagaacaagugcaacggcaccgacgccaaggugaagcucaucaagcaggagcuggacaaguacaagaacgcggucacggaccugcagcuccugaugcagagcaccccggccgccggcuccgggagcgcgaucugcuccggcaucgccgucugcaaggugcugcaccucgagggcgaggugaacaagaucaagaacgcccugcuguccaccaacaaggccgucgugagccucuccaacggggugagcguccugaccuucaaggugcuggaccucaagaacuacaucgacaagcagcugcugcccauccugaacaagcagagcugcuccauccccaacaucgagaccgucaucgaguuccagcagaagaacaaccgccuccuggagaucacgcgggaguucagcgugaacgcgggcgugaccacccccgucuccaccuacaugcugacgaacagcgagcuccugucccugaucaacgacaugccgaucaccaacgaccagaagaagcucaugagcaacaacgugcagaucgugcgccagcaguccuacagcaucaugugcaucaucaaggaggagguccuggccuacguggugcagcugccccucuacggggucaucgacacccccugcuggaagcugcacaccagcccccugugcacgaccaacaccaaggagggcuccaacaucugccucacccggacggaccgcgggugguacugcgacaacgccggcagcguguccuucuucccgcaggccgagaccugcaagguccagagcaaccggguguucugcgacaccaugaacucccugacccugcccagcgaggugaaccucugcaacaucgacaucuucaaccccaaguacgacugcaagaucaugacguccaagaccgacgucagcuccagcgugaucaccucccugggcgccaucgugagcugcuacgggaagaccaagugcacggcgagcaacaagaaccgcggcaucaucaagaccuucuccaacgggugcgacuacgucagcaacaagggcguggacaccguguccgucggcaacacccuguacugcgugaacaagcaggagggccagagccucuacgugaagggggagcccaucaucaacuucuacgacccgcuggucuuccccuccgacgaguucgacgccagcaucucccaggugaacgagaagaucaaccagagccuggccuucauccggaaguccgacgagcuccugcacaacgugaacgucggcaagagcaccacgaacaucaugaucaccaccaucaucaucgugaucaucgugauccugcugcuccugaucgccgucgggcuguuccucuacugcaaggcccgcuccacccccgugacgcugagcaaggaccagcuguccgggaucaacaacaucgcguucagcaacugaggacuaguguccaccugucccuccugggcugcuggauugucucguuuuccugccaaauaaacaggaucagcgcuuuacagaucuaaaaaaaaaaaaaaaaaaaaaaaaaaaaaaaaaaaaaaaaaaaaaaaaaaaaaaaaaaaaaaaaugcaucccccccccccccccccccccccccccccccaaaggcucuuuucagagccaccagaauu

SEQ ID NO: 14856 - RNA, 1919 nt, Artificial Sequence
  mRNA product Design e-2 comprising derived and/or modified sequence from HRSV(Memphis-37)__AIY60640.1__F_DSCav1_mut2 (opt1)
gggagacccgugacccggaaguuguacggcuacgcgacuuucccucccacaaacccucgcgcccuuccuuuccuacuugggcccggcagaaagcuuaccauggagcugcccauccucaagaccaacgccaucaccacgauccuggccgcggugacccugugcuucgccagcucccagaacaucaccgaggaguucuaccagagcacgugcuccgccgucagcaagggcuaccucggggcccugcgcaccggcugguacaccuccgugaucaccaucgagcugagcaacaucaaggagaacaagugcaacgggaccgacgccaaggugaagcucaucaagcaggagcuggacaaguacaagaacgcggucacggaccugcagcuccugaugcaguccaccccggccgccggcagcggguccgccaucugcagcggcaucgcggugugcaaggugcugcaccucgagggcgaggucaacaagaucaagaacgcccugcuguccaccaacaaggccguggugagccucuccaacggggucagcgugcugaccuucaaggugcuggaccucaagaacuacaucgacaagcagcugcugcccauccucaacaagcaguccugcagcauccccaacaucgagacggucaucgaguuccagcagaagaacaaccggcugcuggagaucacccgcgaguucuccgugaacgccggcgugaccacccccgucagcacguacaugcucaccaacuccgagcugcugagccucaucaacgacaugccgaucaccaacgaccagaagaagcugaugagcaacaacgugcagaucgugcggcagcaguccuacagcaucaugugcaucaucaaggaggagguccuggccuacguggugcagcucccccuguacggggucaucgacacccccugcuggaagcugcacacgagcccccucugcaccaccaacaccaaggagggcuccaacaucugccugacgcgcaccgaccgggggugguacugcgacaacgcgggcuccgugagcuucuucccgcaggccgagaccugcaaggugcaguccaaccgcgucuucugcgacaccaugaacagccugacgcuccccuccgaggugaaccugugcaacaucgacaucuucaaccccaaguacgacugcaagaucaugaccagcaagaccgacgucuccagcuccgugaucaccagccugggcgccaucguguccugcuacgggaagacgaagugcaccgccagcaacaagaaccggggcaucaucaagaccuucuccaacgggugcgacuacgucagcaacaagggcguggacaccguguccgucggcaacacgcucuacugcgugaacaagcaggaggggcagagccuguacgugaagggcgagcccaucaucaacuucuacgacccgcuggucuuccccagcgacgaguucgacgccuccaucagccaggugaacgagaagaucaaccagucccucgcguucauccgcaagagcgacgagcugcugcacaacgugaacgucgggaaguccaccaccaacaucaugaucaccaccaucaucaucgugaucaucgugauccuccugcugcucaucgccgucggccuguuccuguacugcaaggcccggagcacgcccgugacccuguccaaggaccagcucagcgggaucaacaacaucgccuucuccaacugaggacuaguguccaccugucccuccugggcugcuggauugucucguuuuccugccaaauaaacaggaucagcgcuuuacagaucuaaaaaaaaaaaaaaaaaaaaaaaaaaaaaaaaaaaaaaaaaaaaaaaaaaaaaaaaaaaaaaaaugcaucccccccccccccccccccccccccccccccaaaggcucuuuucagagccaccagaauu

SEQ ID NO: 14857 - RNA, 1919 nt, Artificial Sequence
  mRNA product Design e-2 comprising derived and/or modified sequence from HRSV(Memphis-37)__AIY60640.1__F_DSCav1_mut2 (opt2)
gggagacccgugacccggaaguuguacggcuacgcgacuuucccucccacaaacccucgcgcccuuccuuuccuacuugggcccggcagaaagcuuaccauggagcuccccauccucaagaccaacgccaucaccaccauccucgccgccgucacccucugcuucgccuccucccagaacaucaccgaggaguucuaccaguccaccugcuccgccgucuccaagggcuaccucggcgcccuccgcaccggcugguacaccuccgucaucaccaucgagcucuccaacaucaaggagaacaagugcaacggcaccgacgccaaggucaagcucaucaagcaggagcucgacaaguacaagaacgccgucaccgaccuccagcuccucaugcaguccacccccgccgccggcuccggcuccgccaucugcuccggcaucgccgucugcaagguccuccaccucgagggcgaggucaacaagaucaagaacgcccuccucuccaccaacaaggccgucgucucccucuccaacggcgucuccguccucaccuucaagguccucgaccucaagaacuacaucgacaagcagcuccuccccauccucaacaagcaguccugcuccauccccaacaucgagaccgucaucgaguuccagcagaagaacaaccgccuccucgagaucacccgcgaguucuccgucaacgccggcgucaccacccccgucuccaccuacaugcucaccaacuccgagcuccucucccucaucaacgacaugcccaucaccaacgaccagaagaagcucauguccaacaacguccagaucguccgccagcaguccuacuccaucaugugcaucaucaaggaggagguccucgccuacgucguccagcucccccucuacggcgucaucgacacccccugcuggaagcuccacaccuccccccucugcaccaccaacaccaaggagggcuccaacaucugccucacccgcaccgaccgcggcugguacugcgacaacgccggcuccgucuccuucuucccccaggccgagaccugcaagguccaguccaaccgcgucuucugcgacaccaugaacucccucacccuccccuccgaggucaaccucugcaacaucgacaucuucaaccccaaguacgacugcaagaucaugaccuccaagaccgacgucuccuccuccgucaucaccucccucggcgccaucgucuccugcuacggcaagaccaagugcaccgccuccaacaagaaccgcggcaucaucaagaccuucuccaacggcugcgacuacgucuccaacaagggcgucgacaccgucuccgucggcaacacccucuacugcgucaacaagcaggagggccagucccucuacgucaagggcgagcccaucaucaacuucuacgacccccucgucuuccccuccgacgaguucgacgccuccaucucccaggucaacgagaagaucaaccagucccucgccuucauccgcaaguccgacgagcuccuccacaacgucaacgucggcaaguccaccaccaacaucaugaucaccaccaucaucaucgucaucaucgucauccuccuccuccucaucgccgucggccucuuccucuacugcaaggcccgcuccacccccgucacccucuccaaggaccagcucuccggcaucaacaacaucgccuucuccaacugaggacuaguguccaccugucccuccugggcugcuggauugucucguuuuccugccaaauaaacaggaucagcgcuuuacagaucuaaaaaaaaaaaaaaaaaaaaaaaaaaaaaaaaaaaaaaaaaaaaaaaaaaaaaaaaaaaaaaaaugcaucccccccccccccccccccccccccccccccaaaggcucuuuucagagccaccagaauu

SEQ ID NO: 14858 - RNA, 1919 nt, Artificial Sequence
  mRNA product Design e-2 comprising derived and/or modified sequence from HRSV(Memphis-37)__AIY60640.1__F_DSCav1_mut2 (opt3)
gggagacccgugacccggaaguuguacggcuacgcgacuuucccucccacaaacccucgcgcccuuccuuuccuacuugggcccggcagaaagcuuaccauggagcugcccauccucaagaccaacgccauuacaacuauacuugcugcagugacgcugugcuucgccagcucccagaauaucaccgaagaguuuuaccaaucuacauguucagcggucaguaaaggcuauuugggggcuuuaagaacuggaugguacaccagcguuauuacaaucgaacuguccaacauuaaggagaauaaaugcaacgguaccgacgccaaggugaaacuaaucaagcaggaacucgauaaguauaaaaaugcaguaacugaccugcagcuucugaugcagucuacuccugccgcuggcucggggucagcaauauguagcggaaucgccgugugcaaggucuugcaccucgagggcgaggugaacaaaauuaagaaugcucugcugaguaccaacaaagccguugugucccucucuaauggugucagcguguuaacguucaagguacuggaucuuaagaacuacaucgacaaacaauugcugccaauucuaaauaagcaguccuguucaaucccgaacauagaaacuguuauugaguuucagcagaaaaauaacaggcuccuggaaaucacccgggaguucagugugaaugcgggggucacaacucccgugagcaccuauaugcuuacaaacucugagcuguugucccucauuaacgauaugccuaucaccaaugaccaaaagaaacugaugucaaacaaugugcagaucguccgccagcagagcuacaguauuaugugcauaaucaaggaagagguuuuagcauaugugguacaacugccacucuacggagugauugauacgcccuguuggaaacuucauacuucuccucugugcacaaccaacacuaaggaaggcuccaauaucuguuugacacgaaccgaccguggcugguacugcgauaacgccgggagcgucucguuuuucccacaggcugagacguguaaggugcagucuaauagaguuuucugcgacaccaugaacucccuaacacugcccucagaagugaaucucugcaacauagauauuuucaauccuaaauaugacuguaagaucaugacaaguaaaaccgaugucagcuccucugugaucacaagccugggagccauuguaucaugcuacgguaagacuaaauguaccgcaaguaacaagaauaggggcaucauuaagacauuuuccaacgggugcgacuauguuagcaauaaaggaguggacaccgucucugugggcaacacucuuuacugugucaacaagcaagagggucagucacuguaugugaaaggggagccaauaaucaauuucuacgauccguugguuuuucccagugacgaauuugaugcuagcauuucccaggugaacgagaagaucaaucagucucucgccuuuauccggaaaucggacgaacuguuacacaacguaaaugucggaaagagcacgacaaacauuaugauaaccacuaucauuaucgugauuaucguuauacugcuacuccugaucgcggugggccuuuucuuguauugcaaggcccgcuccaccccugucacacugucaaaagaucaacucaguggcauuaauaacaucgcauucucuaauugaggacuaguguccaccugucccuccugggcugcuggauugucucguuuuccugccaaauaaacaggaucagcgcuuuacagaucuaaaaaaaaaaaaaaaaaaaaaaaaaaaaaaaaaaaaaaaaaaaaaaaaaaaaaaaaaaaaaaaaugcaucccccccccccccccccccccccccccccccaaaggcucuuuucagagccaccagaauu

SEQ ID NO: 14859 - RNA, 1919 nt, Artificial Sequence
  mRNA product Design e-2 comprising derived and/or modified sequence from HRSV(Memphis-37)__AIY60640.1__F_DSCav1_mut2 (opt4)
gggagacccgugacccggaaguuguacggcuacgcgacuuucccucccacaaacccucgcgcccuuccuuuccuacuugggcccggcagaaagcuuaccauggagcugcccauccugaagaccaacgccaucaccaccauccuggccgccgugacccugugcuucgccagcagccagaacaucaccgaggaguucuaccagagcaccugcagcgccgugagcaagggcuaccugggcgcccugagaaccggcugguacaccagcgugaucaccaucgagcugagcaacaucaaggagaacaagugcaacggcaccgacgccaaggugaagcugaucaagcaggagcuggacaaguacaagaacgccgugaccgaccugcagcugcugaugcagagcacccccgccgccggcagcggcagcgccaucugcagcggcaucgccgugugcaaggugcugcaccuggagggcgaggugaacaagaucaagaacgcccugcugagcaccaacaaggccguggugagccugagcaacggcgugagcgugcugaccuucaaggugcuggaccugaagaacuacaucgacaagcagcugcugcccauccugaacaagcagagcugcagcauccccaacaucgagaccgugaucgaguuccagcagaagaacaacagacugcuggagaucaccagagaguucagcgugaacgccggcgugaccacccccgugagcaccuacaugcugaccaacagcgagcugcugagccugaucaacgacaugcccaucaccaacgaccagaagaagcugaugagcaacaacgugcagaucgugagacagcagagcuacagcaucaugugcaucaucaaggaggaggugcuggccuacguggugcagcugccccuguacggcgugaucgacacccccugcuggaagcugcacaccagcccccugugcaccaccaacaccaaggagggcagcaacaucugccugaccagaaccgacagaggcugguacugcgacaacgccggcagcgugagcuucuucccccaggccgagaccugcaaggugcagagcaacagaguguucugcgacaccaugaacagccugacccugcccagcgaggugaaccugugcaacaucgacaucuucaaccccaaguacgacugcaagaucaugaccagcaagaccgacgugagcagcagcgugaucaccagccugggcgccaucgugagcugcuacggcaagaccaagugcaccgccagcaacaagaacagaggcaucaucaagaccuucagcaacggcugcgacuacgugagcaacaagggcguggacaccgugagcgugggcaacacccuguacugcgugaacaagcaggagggccagagccuguacgugaagggcgagcccaucaucaacuucuacgacccccugguguuccccagcgacgaguucgacgccagcaucagccaggugaacgagaagaucaaccagagccuggccuucaucagaaagagcgacgagcugcugcacaacgugaacgugggcaagagcaccaccaacaucaugaucaccaccaucaucaucgugaucaucgugauccugcugcugcugaucgccgugggccuguuccuguacugcaaggccagaagcacccccgugacccugagcaaggaccagcugagcggcaucaacaacaucgccuucagcaacugaggacuaguguccaccugucccuccugggcugcuggauugucucguuuuccugccaaauaaacaggaucagcgcuuuacagaucuaaaaaaaaaaaaaaaaaaaaaaaaaaaaaaaaaaaaaaaaaaaaaaaaaaaaaaaaaaaaaaaaugcaucccccccccccccccccccccccccccccccaaaggcucuuuucagagccaccagaauu

SEQ ID NO: 14860 - RNA, 1919 nt, Artificial Sequence
  mRNA product Design e-2 comprising derived and/or modified sequence from HRSV(Memphis-37)__AIY60640.1__F_DSCav1_mut2 (opt5)
gggagacccgugacccggaaguuguacggcuacgcgacuuucccucccacaaacccucgcgcccuuccuuuccuacuugggcccggcagaaagcuuaccauggagcugcccauccucaagaccaacgccauuacaacgauccuggcugccgugacccuuugcuucgcgagcucccagaauauuacagaagaguuuuaccaaucuaccuguagcgcugucuccaaaggcuaucugggggcccucagaacaggaugguacaccucuguuaucacaauugaacugagcaacaucaaggagaauaaaugcaacggcaccgacgccaaggugaaacuuaucaagcaggaacuggauaaguauaaaaaugcugugacggaccuccagcugcugaugcaguccaccccugccgcugggucuggaagcgccauuuguuccggcaucgcggucugcaaggugcuccaccuggagggggagguuaacaaaauuaagaaugcccuucugagcacaaacaaagcuguggucucucucuccaauggagugagcguucugaccuucaaggugcuugaucugaagaacuacaucgacaaacaacuccugccgauucugaauaagcagucuuguuccauccccaacauugaaacagucaucgaguuucagcagaaaaauaaccggcuccuggaaaucacccgcgaguucagcgugaaugccggcgugacgacaccugucucuaccuauaugcuuacaaacuccgagcugcucagccugauuaacgauaugcccaucaccaaugaccaaaagaaacuuauguccaacaauguucagauugugagacagcagucuuacagcaucaugugcauuaucaaggaagaggugcuggcuuaugucgugcaacucccucuguacggcguuaucgauacccccuguuggaaacugcauacauccccucucugcacgaccaacacaaaggaagggagcaauauuugucugacccggacagaccgcggaugguacugcgauaacgccggcucuguguccuuuuucccgcaggcggagaccuguaagguccagagcaauagaguguuuugcgacacgaugaacucucuuacacugcccagcgaaguuaaucucugcaacaucgauauuuucaauccuaaauaugacuguaagaucaugaccuccaaaaccgaugugucuagcuccgucauuacaagccugggggccaucgugucuugcuacggaaagaccaaauguacagcuuccaacaagaaucggggcaucauuaagacguuuagcaacgggugcgacuaugucucuaauaaaggaguggacaccguuuccgugggcaacacacuuuacugugucaacaagcaagagggccagagccuguaugugaaaggggagcccaucauuaauuucuacgauccucucguuuuucccuccgacgaguucgaugccucuaucagccaggugaacgaaaagauuaaucagucccuggcuuuuauccgcaaaucugacgaacugcuccacaacgucaaugugggaaagagcaccacaaacauuaugaucaccacgaucauuaucgugauuaucguuauucugcuucugcucaucgccgucggccuguuccuguauugcaaggccagauccaccccggugacacuuagcaaagaucaacucucugggaucaauaacauugcuuucuccaauugaggacuaguguccaccugucccuccugggcugcuggauugucucguuuuccugccaaauaaacaggaucagcgcuuuacagaucuaaaaaaaaaaaaaaaaaaaaaaaaaaaaaaaaaaaaaaaaaaaaaaaaaaaaaaaaaaaaaaaaugcaucccccccccccccccccccccccccccccccaaaggcucuuuucagagccaccagaauu

SEQ ID NO: 14861 - RNA, 1919 nt, Artificial Sequence
  mRNA product Design e-2 comprising derived and/or modified sequence from HRSV(Memphis-37)__AIY60640.1__F_DSCav1_mut2 (opt6)
gggagacccgugacccggaaguuguacggcuacgcgacuuucccucccacaaacccucgcgcccuuccuuuccuacuugggcccggcagaaagcuuaccauggagcuuccaauauuaaaaacaaacgcuauaacaacuauacucgcagcaguuacacucugcuucgcauccucacaaaacauaacugaagaauuuuaccaauccacuugcucagccguaucaaaaggauaucuaggagcacuuagaaccggaugguauacaucagugauaacaauagaacuaagcaacauaaaagaaaacaagugcaacggaacugacgcaaaagucaaacuaaucaaacaagaacuagacaaauacaaaaacgcaguaacagaccuacaauuacuaaugcaaucaacaccagcagcaggaucagguucagccauaugcucagguaucgcuguaugcaaaguccuucaccuagaaggugaaguaaacaaaauuaaaaacgcccuacucaguacaaauaaagcugucguaaguuuaucaaacggaguaucaguccuuacauucaaaguauuagaccuaaaaaauuauauagacaaacaauuacuaccaauacucaacaaacaaucaugcucaauaccaaauauagaaaccguaauagaauuucagcaaaaaaauaacagauuacuagaaauaaccagagaauuuucagucaacgcaggagucacaacacccgucucaaccuacaugcuaaccaacucagaacuucuaucucuuaucaacgacaugcccauaaccaaugaucaaaaaaaauuaaugucuaauaacguucaaauaguaagacaacaaucauacucaauaaugugcauaaucaaagaagaaguauuagcauacguaguacaacuaccccuauauggaguaauagacacacccugcuggaaacuacacacauccccccucuguacaacaaacacuaaagaaggaucaaacauuugccuaacaagaacagaccgcggaugguacugcgacaacgcaggcuccguaucuuucuuuccacaagccgaaacuuguaaaguucaaucaaacagaguauuuugcgauacaaugaacuccuuaacauuaccuucagaaguaaaccuaugcaacauagacaucuucaacccaaaauacgacugcaaaauaaugaccucaaaaacagacguauccucaucagucauaaccuccuuaggagcaauaguaucauguuacggaaaaacaaaauguacagcaucaaauaaaaauagaggaauaauaaaaaccuucuccaacggaugcgacuacguauccaauaaaggaguagacaccguaucaguaggaaacacacuauacuguguaaacaaacaagaaggccaaucucuauauguaaaaggcgaaccaaucauaaauuuuuacgacccacuugucuuccccuccgacgaauuugacgcaagcauaucacaaguaaacgaaaaaaucaaccaaagccuagccuucauaaggaaaucugacgaauuacuucauaacguaaauguuggaaaaucaaccacaaacauaaugauaaccaccaucauaauuguaauaauaguaauacuacuacuacuaauugcaguaggacucuuccuauauugcaaagcucgcucaacaccaguuaccuuaucaaaagaccaacuaucuggaauaaacaacauagccuuuuccaacuaaggacuaguguccaccugucccuccugggcugcuggauugucucguuuuccugccaaauaaacaggaucagcgcuuuacagaucuaaaaaaaaaaaaaaaaaaaaaaaaaaaaaaaaaaaaaaaaaaaaaaaaaaaaaaaaaaaaaaaaugcaucccccccccccccccccccccccccccccccaaaggcucuuuucagagccaccagaauu

SEQ ID NO: 14862 - RNA, 1919 nt, Artificial Sequence
  mRNA product Design e-2 comprising derived and/or modified sequence from HRSV(Memphis-37)__AIY60640.1__F_DSCav1_mut2 (opt11)
gggagacccgugacccggaaguuguacggcuacgcgacuuucccucccacaaacccucgcgcccuuccuuuccuacuugggcccggcagaaagcuuaccauggaacucccaauccuaaaaaccaacgccaucaccaccauccucgccgcugucaccuuaugcuuugccagcagccaaaacaucaccgaagaauuuuaccaaucaacaugcuccgccgucucaaaaggauaccucggcgcccuacgcaccggcugguacacaagcgucauaaccaucgagcucuccaacaucaaggaaaacaaaugcaauggaaccgacgccaaagucaaacuaaucaaacaagaacuagacaaguacaagaacgcagucaccgaccuccaacuccucaugcaguccacccccgcagcaggcucuggcucagcaauaugcuccggcaucgcugucugcaaaguccuacaccucgaaggcgaagucaacaaaaucaaaaacgcccuacuguccacaaacaaagccgucgucucccuauccaacggcgucucgguccuaaccuuuaagguucucgaucucaaaaauuacauagacaaacaacuacuccccauccucaacaaacaaucuugcucaauccccaacaucgaaaccgucaucgaguuccaacagaaaaacaacagacuacucgaaaucacccgcgaguucucagucaacgcgggcgucacaacacccgucagcaccuacaugcuaaccaacuccgaacuccucagccucauuaacgacaugcccaucaccaacgaccaaaagaaacuuauguccaacaacguucaaaucguccgccaacaauccuacuccaucaugugcaucaucaaagaagaaguacucgccuacguaguccaacugccccucuacggcgucaucgauaccccaugcuggaaacuacacaccagcccccucugcaccaccaacaccaaagaaggcuccaauaucugcuuaacccgcacagaccguggcugguacugcgauaacgccggcuccgucuccuucuucccccaagcagaaaccugcaaaguacaauccaaccgagucuucugugacaccaugaacucccuaacccuuccaucagaagucaaccucugcaacaucgacaucuucaaccccaaguacgacugcaaaaucaugacauccaaaaccgaugucucaagcagcgucauaaccucacucggcgcuaucguaagcugcuacggcaaaaccaaaugcaccgcaucaaacaaaaaccgcggaaucaucaaaaccuucagcaacggaugcgacuacguuuccaacaaaggcguagacaccgucuccgucggaaacacccucuacugcguaaacaaacaggaaggccaaucccucuacgucaaaggcgaacccaucauaaacuucuacgauccccuugucuucccguccgaugaguucgacgccuccaucucgcaagucaacgaaaagauaaaccaaucacuagcauucauccguaaauccgacgaacuccuccacaacgucaacgucggaaaauccaccaccaacauaaugaucaccaccauaaucaucgucaucaucguaauacuauuacuccucauagccgucggccucuuccuauauugcaaagcccgaucaacccccguaacccuuucuaaagaccaacuguccggaaucaacaacaucgcuuucagcaacugaggacuaguguccaccugucccuccugggcugcuggauugucucguuuuccugccaaauaaacaggaucagcgcuuuacagaucuaaaaaaaaaaaaaaaaaaaaaaaaaaaaaaaaaaaaaaaaaaaaaaaaaaaaaaaaaaaaaaaaugcaucccccccccccccccccccccccccccccccaaaggcucuuuucagagccaccagaauu

SEQ ID NO: 14863 - RNA, 1889 nt, Artificial Sequence
  mRNA product Design e-3 comprising derived and/or modified sequence from HRSV(Memphis-37)__AIY60640.1__F_DSCav1_mut2 (opt1)
gggagacuuucccauucuguagcagaauuugguguugccuguggucuuggucccgcggagaagcuuaccauggagcugcccauccucaagaccaacgccaucaccacgauccuggccgcggugacccugugcuucgccagcucccagaacaucaccgaggaguucuaccagagcacgugcuccgccgucagcaagggcuaccucggcgcccugcgcaccgggugguacaccagcgugaucaccaucgagcuguccaacaucaaggagaacaagugcaacggcaccgacgccaaggugaagcucaucaagcaggagcuggacaaguacaagaacgcggucacggaccugcagcuccugaugcagagcaccccggccgccggcuccgggagcgcgaucugcuccggcaucgccgucugcaaggugcugcaccucgagggcgaggugaacaagaucaagaacgcccugcuguccaccaacaaggccgucgugagccucuccaacggggugagcguccugaccuucaaggugcuggaccucaagaacuacaucgacaagcagcugcugcccauccugaacaagcagagcugcuccauccccaacaucgagaccgucaucgaguuccagcagaagaacaaccgccuccuggagaucacgcgggaguucagcgugaacgcgggcgugaccacccccgucuccaccuacaugcugacgaacagcgagcuccugucccugaucaacgacaugccgaucaccaacgaccagaagaagcucaugagcaacaacgugcagaucgugcgccagcaguccuacagcaucaugugcaucaucaaggaggagguccuggccuacguggugcagcugccccucuacggggucaucgacacccccugcuggaagcugcacaccagcccccugugcacgaccaacaccaaggagggcuccaacaucugccucacccggacggaccgcgggugguacugcgacaacgccggcagcguguccuucuucccgcaggccgagaccugcaagguccagagcaaccggguguucugcgacaccaugaacucccugacccugcccagcgaggugaaccucugcaacaucgacaucuucaaccccaaguacgacugcaagaucaugacguccaagaccgacgucagcuccagcgugaucaccucccugggcgccaucgugagcugcuacgggaagaccaagugcacggcgagcaacaagaaccgcggcaucaucaagaccuucuccaacgggugcgacuacgucagcaacaagggcguggacaccguguccgucggcaacacccuguacugcgugaacaagcaggagggccagagccucuacgugaagggggagcccaucaucaacuucuacgacccgcuggucuuccccuccgacgaguucgacgccagcaucucccaggugaacgagaagaucaaccagagccuggccuucauccggaaguccgacgagcuccugcacaacgugaacgucggcaagagcaccacgaacaucaugaucaccaccaucaucaucgugaucaucgugauccugcugcuccugaucgccgucgggcuguuccucuacugcaaggcccgcuccacccccgugacgcugagcaaggaccagcuguccgggaucaacaacaucgcguucagcaacugaggacuaguguccaccugucccuccugggcugcuggauugucucguuuuccugccaaauaaacaggaucagcgcuuuacagaucuaaaaaaaaaaaaaaaaaaaaaaaaaaaaaaaaaaaaaaaaaaaaaaaaaaaaaaaaaaaaaaaaugcaucccccccccccccccccccccccccccccccaaaggcucuuuucagagccaccagaauu

SEQ ID NO: 14864 - RNA, 1889 nt, Artificial Sequence
  mRNA product Design e-3 comprising derived and/or modified sequence from HRSV(Memphis-37)__AIY60640.1__F_DSCav1_mut2 (opt1)
gggagacuuucccauucuguagcagaauuugguguugccuguggucuuggucccgcggagaagcuuaccauggagcugcccauccucaagaccaacgccaucaccacgauccuggccgcggugacccugugcuucgccagcucccagaacaucaccgaggaguucuaccagagcacgugcuccgccgucagcaagggcuaccucggggcccugcgcaccggcugguacaccuccgugaucaccaucgagcugagcaacaucaaggagaacaagugcaacgggaccgacgccaaggugaagcucaucaagcaggagcuggacaaguacaagaacgcggucacggaccugcagcuccugaugcaguccaccccggccgccggcagcggguccgccaucugcagcggcaucgcggugugcaaggugcugcaccucgagggcgaggucaacaagaucaagaacgcccugcuguccaccaacaaggccguggugagccucuccaacggggucagcgugcugaccuucaaggugcuggaccucaagaacuacaucgacaagcagcugcugcccauccucaacaagcaguccugcagcauccccaacaucgagacggucaucgaguuccagcagaagaacaaccggcugcuggagaucacccgcgaguucuccgugaacgccggcgugaccacccccgucagcacguacaugcucaccaacuccgagcugcugagccucaucaacgacaugccgaucaccaacgaccagaagaagcugaugagcaacaacgugcagaucgugcggcagcaguccuacagcaucaugugcaucaucaaggaggagguccuggccuacguggugcagcucccccuguacggggucaucgacacccccugcuggaagcugcacacgagcccccucugcaccaccaacaccaaggagggcuccaacaucugccugacgcgcaccgaccgggggugguacugcgacaacgcgggcuccgugagcuucuucccgcaggccgagaccugcaaggugcaguccaaccgcgucuucugcgacaccaugaacagccugacgcuccccuccgaggugaaccugugcaacaucgacaucuucaaccccaaguacgacugcaagaucaugaccagcaagaccgacgucuccagcuccgugaucaccagccugggcgccaucguguccugcuacgggaagacgaagugcaccgccagcaacaagaaccggggcaucaucaagaccuucuccaacgggugcgacuacgucagcaacaagggcguggacaccguguccgucggcaacacgcucuacugcgugaacaagcaggaggggcagagccuguacgugaagggcgagcccaucaucaacuucuacgacccgcuggucuuccccagcgacgaguucgacgccuccaucagccaggugaacgagaagaucaaccagucccucgcguucauccgcaagagcgacgagcugcugcacaacgugaacgucgggaaguccaccaccaacaucaugaucaccaccaucaucaucgugaucaucgugauccuccugcugcucaucgccgucggccuguuccuguacugcaaggcccggagcacgcccgugacccuguccaaggaccagcucagcgggaucaacaacaucgccuucuccaacugaggacuaguguccaccugucccuccugggcugcuggauugucucguuuuccugccaaauaaacaggaucagcgcuuuacagaucuaaaaaaaaaaaaaaaaaaaaaaaaaaaaaaaaaaaaaaaaaaaaaaaaaaaaaaaaaaaaaaaaugcaucccccccccccccccccccccccccccccccaaaggcucuuuucagagccaccagaauu

SEQ ID NO: 14865 - RNA, 1889 nt, Artificial Sequence
  mRNA product Design e-3 comprising derived and/or modified sequence from HRSV(Memphis-37)__AIY60640.1__F_DSCav1_mut2 (opt2)
gggagacuuucccauucuguagcagaauuugguguugccuguggucuuggucccgcggagaagcuuaccauggagcuccccauccucaagaccaacgccaucaccaccauccucgccgccgucacccucugcuucgccuccucccagaacaucaccgaggaguucuaccaguccaccugcuccgccgucuccaagggcuaccucggcgcccuccgcaccggcugguacaccuccgucaucaccaucgagcucuccaacaucaaggagaacaagugcaacggcaccgacgccaaggucaagcucaucaagcaggagcucgacaaguacaagaacgccgucaccgaccuccagcuccucaugcaguccacccccgccgccggcuccggcuccgccaucugcuccggcaucgccgucugcaagguccuccaccucgagggcgaggucaacaagaucaagaacgcccuccucuccaccaacaaggccgucgucucccucuccaacggcgucuccguccucaccuucaagguccucgaccucaagaacuacaucgacaagcagcuccuccccauccucaacaagcaguccugcuccauccccaacaucgagaccgucaucgaguuccagcagaagaacaaccgccuccucgagaucacccgcgaguucuccgucaacgccggcgucaccacccccgucuccaccuacaugcucaccaacuccgagcuccucucccucaucaacgacaugcccaucaccaacgaccagaagaagcucauguccaacaacguccagaucguccgccagcaguccuacuccaucaugugcaucaucaaggaggagguccucgccuacgucguccagcucccccucuacggcgucaucgacacccccugcuggaagcuccacaccuccccccucugcaccaccaacaccaaggagggcuccaacaucugccucacccgcaccgaccgcggcugguacugcgacaacgccggcuccgucuccuucuucccccaggccgagaccugcaagguccaguccaaccgcgucuucugcgacaccaugaacucccucacccuccccuccgaggucaaccucugcaacaucgacaucuucaaccccaaguacgacugcaagaucaugaccuccaagaccgacgucuccuccuccgucaucaccucccucggcgccaucgucuccugcuacggcaagaccaagugcaccgccuccaacaagaaccgcggcaucaucaagaccuucuccaacggcugcgacuacgucuccaacaagggcgucgacaccgucuccgucggcaacacccucuacugcgucaacaagcaggagggccagucccucuacgucaagggcgagcccaucaucaacuucuacgacccccucgucuuccccuccgacgaguucgacgccuccaucucccaggucaacgagaagaucaaccagucccucgccuucauccgcaaguccgacgagcuccuccacaacgucaacgucggcaaguccaccaccaacaucaugaucaccaccaucaucaucgucaucaucgucauccuccuccuccucaucgccgucggccucuuccucuacugcaaggcccgcuccacccccgucacccucuccaaggaccagcucuccggcaucaacaacaucgccuucuccaacugaggacuaguguccaccugucccuccugggcugcuggauugucucguuuuccugccaaauaaacaggaucagcgcuuuacagaucuaaaaaaaaaaaaaaaaaaaaaaaaaaaaaaaaaaaaaaaaaaaaaaaaaaaaaaaaaaaaaaaaugcaucccccccccccccccccccccccccccccccaaaggcucuuuucagagccaccagaauu

SEQ ID NO: 14866 - RNA, 1889 nt, Artificial Sequence
  mRNA product Design e-3 comprising derived and/or modified sequence from HRSV(Memphis-37)__AIY60640.1__F_DSCav1_mut2 (opt3)
gggagacuuucccauucuguagcagaauuugguguugccuguggucuuggucccgcggagaagcuuaccauggagcugcccauccucaagaccaacgccauuacaacuauacuugcugcagugacgcugugcuucgccagcucccagaauaucaccgaagaguuuuaccaaucuacauguucagcggucaguaaaggcuauuugggggcuuuaagaacuggaugguacaccagcguuauuacaaucgaacuguccaacauuaaggagaauaaaugcaacgguaccgacgccaaggugaaacuaaucaagcaggaacucgauaaguauaaaaaugcaguaacugaccugcagcuucugaugcagucuacuccugccgcuggcucggggucagcaauauguagcggaaucgccgugugcaaggucuugcaccucgagggcgaggugaacaaaauuaagaaugcucugcugaguaccaacaaagccguugugucccucucuaauggugucagcguguuaacguucaagguacuggaucuuaagaacuacaucgacaaacaauugcugccaauucuaaauaagcaguccuguucaaucccgaacauagaaacuguuauugaguuucagcagaaaaauaacaggcuccuggaaaucacccgggaguucagugugaaugcgggggucacaacucccgugagcaccuauaugcuuacaaacucugagcuguugucccucauuaacgauaugccuaucaccaaugaccaaaagaaacugaugucaaacaaugugcagaucguccgccagcagagcuacaguauuaugugcauaaucaaggaagagguuuuagcauaugugguacaacugccacucuacggagugauugauacgcccuguuggaaacuucauacuucuccucugugcacaaccaacacuaaggaaggcuccaauaucuguuugacacgaaccgaccguggcugguacugcgauaacgccgggagcgucucguuuuucccacaggcugagacguguaaggugcagucuaauagaguuuucugcgacaccaugaacucccuaacacugcccucagaagugaaucucugcaacauagauauuuucaauccuaaauaugacuguaagaucaugacaaguaaaaccgaugucagcuccucugugaucacaagccugggagccauuguaucaugcuacgguaagacuaaauguaccgcaaguaacaagaauaggggcaucauuaagacauuuuccaacgggugcgacuauguuagcaauaaaggaguggacaccgucucugugggcaacacucuuuacugugucaacaagcaagagggucagucacuguaugugaaaggggagccaauaaucaauuucuacgauccguugguuuuucccagugacgaauuugaugcuagcauuucccaggugaacgagaagaucaaucagucucucgccuuuauccggaaaucggacgaacuguuacacaacguaaaugucggaaagagcacgacaaacauuaugauaaccacuaucauuaucgugauuaucguuauacugcuacuccugaucgcggugggccuuuucuuguauugcaaggcccgcuccaccccugucacacugucaaaagaucaacucaguggcauuaauaacaucgcauucucuaauugaggacuaguguccaccugucccuccugggcugcuggauugucucguuuuccugccaaauaaacaggaucagcgcuuuacagaucuaaaaaaaaaaaaaaaaaaaaaaaaaaaaaaaaaaaaaaaaaaaaaaaaaaaaaaaaaaaaaaaaugcaucccccccccccccccccccccccccccccccaaaggcucuuuucagagccaccagaauu

SEQ ID NO: 14867 - RNA, 1889 nt, Artificial Sequence
  mRNA product Design e-3 comprising derived and/or modified sequence from HRSV(Memphis-37)__AIY60640.1__F_DSCav1_mut2 (opt4)
gggagacuuucccauucuguagcagaauuugguguugccuguggucuuggucccgcggagaagcuuaccauggagcugcccauccugaagaccaacgccaucaccaccauccuggccgccgugacccugugcuucgccagcagccagaacaucaccgaggaguucuaccagagcaccugcagcgccgugagcaagggcuaccugggcgcccugagaaccggcugguacaccagcgugaucaccaucgagcugagcaacaucaaggagaacaagugcaacggcaccgacgccaaggugaagcugaucaagcaggagcuggacaaguacaagaacgccgugaccgaccugcagcugcugaugcagagcacccccgccgccggcagcggcagcgccaucugcagcggcaucgccgugugcaaggugcugcaccuggagggcgaggugaacaagaucaagaacgcccugcugagcaccaacaaggccguggugagccugagcaacggcgugagcgugcugaccuucaaggugcuggaccugaagaacuacaucgacaagcagcugcugcccauccugaacaagcagagcugcagcauccccaacaucgagaccgugaucgaguuccagcagaagaacaacagacugcuggagaucaccagagaguucagcgugaacgccggcgugaccacccccgugagcaccuacaugcugaccaacagcgagcugcugagccugaucaacgacaugcccaucaccaacgaccagaagaagcugaugagcaacaacgugcagaucgugagacagcagagcuacagcaucaugugcaucaucaaggaggaggugcuggccuacguggugcagcugccccuguacggcgugaucgacacccccugcuggaagcugcacaccagcccccugugcaccaccaacaccaaggagggcagcaacaucugccugaccagaaccgacagaggcugguacugcgacaacgccggcagcgugagcuucuucccccaggccgagaccugcaaggugcagagcaacagaguguucugcgacaccaugaacagccugacccugcccagcgaggugaaccugugcaacaucgacaucuucaaccccaaguacgacugcaagaucaugaccagcaagaccgacgugagcagcagcgugaucaccagccugggcgccaucgugagcugcuacggcaagaccaagugcaccgccagcaacaagaacagaggcaucaucaagaccuucagcaacggcugcgacuacgugagcaacaagggcguggacaccgugagcgugggcaacacccuguacugcgugaacaagcaggagggccagagccuguacgugaagggcgagcccaucaucaacuucuacgacccccugguguuccccagcgacgaguucgacgccagcaucagccaggugaacgagaagaucaaccagagccuggccuucaucagaaagagcgacgagcugcugcacaacgugaacgugggcaagagcaccaccaacaucaugaucaccaccaucaucaucgugaucaucgugauccugcugcugcugaucgccgugggccuguuccuguacugcaaggccagaagcacccccgugacccugagcaaggaccagcugagcggcaucaacaacaucgccuucagcaacugaggacuaguguccaccugucccuccugggcugcuggauugucucguuuuccugccaaauaaacaggaucagcgcuuuacagaucuaaaaaaaaaaaaaaaaaaaaaaaaaaaaaaaaaaaaaaaaaaaaaaaaaaaaaaaaaaaaaaaaugcaucccccccccccccccccccccccccccccccaaaggcucuuuucagagccaccagaauu

SEQ ID NO: 14868 - RNA, 1889 nt, Artificial Sequence
  mRNA product Design e-3 comprising derived and/or modified sequence from HRSV(Memphis-37)__AIY60640.1__F_DSCav1_mut2 (opt5)
gggagacuuucccauucuguagcagaauuugguguugccuguggucuuggucccgcggagaagcuuaccauggagcugcccauccucaagaccaacgccauuacaacgauccuggcugccgugacccuuugcuucgcgagcucccagaauauuacagaagaguuuuaccaaucuaccuguagcgcugucuccaaaggcuaucugggggcccucagaacaggaugguacaccucuguuaucacaauugaacugagcaacaucaaggagaauaaaugcaacggcaccgacgccaaggugaaacuuaucaagcaggaacuggauaaguauaaaaaugcugugacggaccuccagcugcugaugcaguccaccccugccgcugggucuggaagcgccauuuguuccggcaucgcggucugcaaggugcuccaccuggagggggagguuaacaaaauuaagaaugcccuucugagcacaaacaaagcuguggucucucucuccaauggagugagcguucugaccuucaaggugcuugaucugaagaacuacaucgacaaacaacuccugccgauucugaauaagcagucuuguuccauccccaacauugaaacagucaucgaguuucagcagaaaaauaaccggcuccuggaaaucacccgcgaguucagcgugaaugccggcgugacgacaccugucucuaccuauaugcuuacaaacuccgagcugcucagccugauuaacgauaugcccaucaccaaugaccaaaagaaacuuauguccaacaauguucagauugugagacagcagucuuacagcaucaugugcauuaucaaggaagaggugcuggcuuaugucgugcaacucccucuguacggcguuaucgauacccccuguuggaaacugcauacauccccucucugcacgaccaacacaaaggaagggagcaauauuugucugacccggacagaccgcggaugguacugcgauaacgccggcucuguguccuuuuucccgcaggcggagaccuguaagguccagagcaauagaguguuuugcgacacgaugaacucucuuacacugcccagcgaaguuaaucucugcaacaucgauauuuucaauccuaaauaugacuguaagaucaugaccuccaaaaccgaugugucuagcuccgucauuacaagccugggggccaucgugucuugcuacggaaagaccaaauguacagcuuccaacaagaaucggggcaucauuaagacguuuagcaacgggugcgacuaugucucuaauaaaggaguggacaccguuuccgugggcaacacacuuuacugugucaacaagcaagagggccagagccuguaugugaaaggggagcccaucauuaauuucuacgauccucucguuuuucccuccgacgaguucgaugccucuaucagccaggugaacgaaaagauuaaucagucccuggcuuuuauccgcaaaucugacgaacugcuccacaacgucaaugugggaaagagcaccacaaacauuaugaucaccacgaucauuaucgugauuaucguuauucugcuucugcucaucgccgucggccuguuccuguauugcaaggccagauccaccccggugacacuuagcaaagaucaacucucugggaucaauaacauugcuuucuccaauugaggacuaguguccaccugucccuccugggcugcuggauugucucguuuuccugccaaauaaacaggaucagcgcuuuacagaucuaaaaaaaaaaaaaaaaaaaaaaaaaaaaaaaaaaaaaaaaaaaaaaaaaaaaaaaaaaaaaaaaugcaucccccccccccccccccccccccccccccccaaaggcucuuuucagagccaccagaauu

SEQ ID NO: 14869 - RNA, 1889 nt, Artificial Sequence
  mRNA product Design e-3 comprising derived and/or modified sequence from HRSV(Memphis-37)__AIY60640.1__F_DSCav1_mut2 (opt6)
gggagacuuucccauucuguagcagaauuugguguugccuguggucuuggucccgcggagaagcuuaccauggagcuuccaauauuaaaaacaaacgcuauaacaacuauacucgcagcaguuacacucugcuucgcauccucacaaaacauaacugaagaauuuuaccaauccacuugcucagccguaucaaaaggauaucuaggagcacuuagaaccggaugguauacaucagugauaacaauagaacuaagcaacauaaaagaaaacaagugcaacggaacugacgcaaaagucaaacuaaucaaacaagaacuagacaaauacaaaaacgcaguaacagaccuacaauuacuaaugcaaucaacaccagcagcaggaucagguucagccauaugcucagguaucgcuguaugcaaaguccuucaccuagaaggugaaguaaacaaaauuaaaaacgcccuacucaguacaaauaaagcugucguaaguuuaucaaacggaguaucaguccuuacauucaaaguauuagaccuaaaaaauuauauagacaaacaauuacuaccaauacucaacaaacaaucaugcucaauaccaaauauagaaaccguaauagaauuucagcaaaaaaauaacagauuacuagaaauaaccagagaauuuucagucaacgcaggagucacaacacccgucucaaccuacaugcuaaccaacucagaacuucuaucucuuaucaacgacaugcccauaaccaaugaucaaaaaaaauuaaugucuaauaacguucaaauaguaagacaacaaucauacucaauaaugugcauaaucaaagaagaaguauuagcauacguaguacaacuaccccuauauggaguaauagacacacccugcuggaaacuacacacauccccccucuguacaacaaacacuaaagaaggaucaaacauuugccuaacaagaacagaccgcggaugguacugcgacaacgcaggcuccguaucuuucuuuccacaagccgaaacuuguaaaguucaaucaaacagaguauuuugcgauacaaugaacuccuuaacauuaccuucagaaguaaaccuaugcaacauagacaucuucaacccaaaauacgacugcaaaauaaugaccucaaaaacagacguauccucaucagucauaaccuccuuaggagcaauaguaucauguuacggaaaaacaaaauguacagcaucaaauaaaaauagaggaauaauaaaaaccuucuccaacggaugcgacuacguauccaauaaaggaguagacaccguaucaguaggaaacacacuauacuguguaaacaaacaagaaggccaaucucuauauguaaaaggcgaaccaaucauaaauuuuuacgacccacuugucuuccccuccgacgaauuugacgcaagcauaucacaaguaaacgaaaaaaucaaccaaagccuagccuucauaaggaaaucugacgaauuacuucauaacguaaauguuggaaaaucaaccacaaacauaaugauaaccaccaucauaauuguaauaauaguaauacuacuacuacuaauugcaguaggacucuuccuauauugcaaagcucgcucaacaccaguuaccuuaucaaaagaccaacuaucuggaauaaacaacauagccuuuuccaacuaaggacuaguguccaccugucccuccugggcugcuggauugucucguuuuccugccaaauaaacaggaucagcgcuuuacagaucuaaaaaaaaaaaaaaaaaaaaaaaaaaaaaaaaaaaaaaaaaaaaaaaaaaaaaaaaaaaaaaaaugcaucccccccccccccccccccccccccccccccaaaggcucuuuucagagccaccagaauu

SEQ ID NO: 14870 - RNA, 1889 nt, Artificial Sequence
  mRNA product Design e-3 comprising derived and/or modified sequence from HRSV(Memphis-37)__AIY60640.1__F_DSCav1_mut2 (opt11)
gggagacuuucccauucuguagcagaauuugguguugccuguggucuuggucccgcggagaagcuuaccauggaacucccaauccuaaaaaccaacgccaucaccaccauccucgccgcugucaccuuaugcuuugccagcagccaaaacaucaccgaagaauuuuaccaaucaacaugcuccgccgucucaaaaggauaccucggcgcccuacgcaccggcugguacacaagcgucauaaccaucgagcucuccaacaucaaggaaaacaaaugcaauggaaccgacgccaaagucaaacuaaucaaacaagaacuagacaaguacaagaacgcagucaccgaccuccaacuccucaugcaguccacccccgcagcaggcucuggcucagcaauaugcuccggcaucgcugucugcaaaguccuacaccucgaaggcgaagucaacaaaaucaaaaacgcccuacuguccacaaacaaagccgucgucucccuauccaacggcgucucgguccuaaccuuuaagguucucgaucucaaaaauuacauagacaaacaacuacuccccauccucaacaaacaaucuugcucaauccccaacaucgaaaccgucaucgaguuccaacagaaaaacaacagacuacucgaaaucacccgcgaguucucagucaacgcgggcgucacaacacccgucagcaccuacaugcuaaccaacuccgaacuccucagccucauuaacgacaugcccaucaccaacgaccaaaagaaacuuauguccaacaacguucaaaucguccgccaacaauccuacuccaucaugugcaucaucaaagaagaaguacucgccuacguaguccaacugccccucuacggcgucaucgauaccccaugcuggaaacuacacaccagcccccucugcaccaccaacaccaaagaaggcuccaauaucugcuuaacccgcacagaccguggcugguacugcgauaacgccggcuccgucuccuucuucccccaagcagaaaccugcaaaguacaauccaaccgagucuucugugacaccaugaacucccuaacccuuccaucagaagucaaccucugcaacaucgacaucuucaaccccaaguacgacugcaaaaucaugacauccaaaaccgaugucucaagcagcgucauaaccucacucggcgcuaucguaagcugcuacggcaaaaccaaaugcaccgcaucaaacaaaaaccgcggaaucaucaaaaccuucagcaacggaugcgacuacguuuccaacaaaggcguagacaccgucuccgucggaaacacccucuacugcguaaacaaacaggaaggccaaucccucuacgucaaaggcgaacccaucauaaacuucuacgauccccuugucuucccguccgaugaguucgacgccuccaucucgcaagucaacgaaaagauaaaccaaucacuagcauucauccguaaauccgacgaacuccuccacaacgucaacgucggaaaauccaccaccaacauaaugaucaccaccauaaucaucgucaucaucguaauacuauuacuccucauagccgucggccucuuccuauauugcaaagcccgaucaacccccguaacccuuucuaaagaccaacuguccggaaucaacaacaucgcuuucagcaacugaggacuaguguccaccugucccuccugggcugcuggauugucucguuuuccugccaaauaaacaggaucagcgcuuuacagaucuaaaaaaaaaaaaaaaaaaaaaaaaaaaaaaaaaaaaaaaaaaaaaaaaaaaaaaaaaaaaaaaaugcaucccccccccccccccccccccccccccccccaaaggcucuuuucagagccaccagaauu

SEQ ID NO: 14871 - RNA, 1943 nt, Artificial Sequence
  mRNA product Design e-4 comprising derived and/or modified sequence from HRSV(Memphis-37)__AIY60640.1__F_DSCav1_mut2 (opt1)
gggagacuccugucgggcggaaguaggaggaguagaguuuaaaaacaguacucuuuuuccgguucgggacguaguugaagcaacgacaagccggauaaccgcucuugagacaggaagcuuaccauggagcugcccauccucaagaccaacgccaucaccacgauccuggccgcggugacccugugcuucgccagcucccagaacaucaccgaggaguucuaccagagcacgugcuccgccgucagcaagggcuaccucggcgcccugcgcaccgggugguacaccagcgugaucaccaucgagcuguccaacaucaaggagaacaagugcaacggcaccgacgccaaggugaagcucaucaagcaggagcuggacaaguacaagaacgcggucacggaccugcagcuccugaugcagagcaccccggccgccggcuccgggagcgcgaucugcuccggcaucgccgucugcaaggugcugcaccucgagggcgaggugaacaagaucaagaacgcccugcuguccaccaacaaggccgucgugagccucuccaacggggugagcguccugaccuucaaggugcuggaccucaagaacuacaucgacaagcagcugcugcccauccugaacaagcagagcugcuccauccccaacaucgagaccgucaucgaguuccagcagaagaacaaccgccuccuggagaucacgcgggaguucagcgugaacgcgggcgugaccacccccgucuccaccuacaugcugacgaacagcgagcuccugucccugaucaacgacaugccgaucaccaacgaccagaagaagcucaugagcaacaacgugcagaucgugcgccagcaguccuacagcaucaugugcaucaucaaggaggagguccuggccuacguggugcagcugccccucuacggggucaucgacacccccugcuggaagcugcacaccagcccccugugcacgaccaacaccaaggagggcuccaacaucugccucacccggacggaccgcgggugguacugcgacaacgccggcagcguguccuucuucccgcaggccgagaccugcaagguccagagcaaccggguguucugcgacaccaugaacucccugacccugcccagcgaggugaaccucugcaacaucgacaucuucaaccccaaguacgacugcaagaucaugacguccaagaccgacgucagcuccagcgugaucaccucccugggcgccaucgugagcugcuacgggaagaccaagugcacggcgagcaacaagaaccgcggcaucaucaagaccuucuccaacgggugcgacuacgucagcaacaagggcguggacaccguguccgucggcaacacccuguacugcgugaacaagcaggagggccagagccucuacgugaagggggagcccaucaucaacuucuacgacccgcuggucuuccccuccgacgaguucgacgccagcaucucccaggugaacgagaagaucaaccagagccuggccuucauccggaaguccgacgagcuccugcacaacgugaacgucggcaagagcaccacgaacaucaugaucaccaccaucaucaucgugaucaucgugauccugcugcuccugaucgccgucgggcuguuccucuacugcaaggcccgcuccacccccgugacgcugagcaaggaccagcuguccgggaucaacaacaucgcguucagcaacugaggacuaguguccaccugucccuccugggcugcuggauugucucguuuuccugccaaauaaacaggaucagcgcuuuacagaucuaaaaaaaaaaaaaaaaaaaaaaaaaaaaaaaaaaaaaaaaaaaaaaaaaaaaaaaaaaaaaaaaugcaucccccccccccccccccccccccccccccccaaaggcucuuuucagagccaccagaauu

SEQ ID NO: 14872 - RNA, 1943 nt, Artificial Sequence
  mRNA product Design e-4 comprising derived and/or modified sequence from HRSV(Memphis-37)__AIY60640.1__F_DSCav1_mut2 (opt1)
gggagacuccugucgggcggaaguaggaggaguagaguuuaaaaacaguacucuuuuuccgguucgggacguaguugaagcaacgacaagccggauaaccgcucuugagacaggaagcuuaccauggagcugcccauccucaagaccaacgccaucaccacgauccuggccgcggugacccugugcuucgccagcucccagaacaucaccgaggaguucuaccagagcacgugcuccgccgucagcaagggcuaccucggggcccugcgcaccggcugguacaccuccgugaucaccaucgagcugagcaacaucaaggagaacaagugcaacgggaccgacgccaaggugaagcucaucaagcaggagcuggacaaguacaagaacgcggucacggaccugcagcuccugaugcaguccaccccggccgccggcagcggguccgccaucugcagcggcaucgcggugugcaaggugcugcaccucgagggcgaggucaacaagaucaagaacgcccugcuguccaccaacaaggccguggugagccucuccaacggggucagcgugcugaccuucaaggugcuggaccucaagaacuacaucgacaagcagcugcugcccauccucaacaagcaguccugcagcauccccaacaucgagacggucaucgaguuccagcagaagaacaaccggcugcuggagaucacccgcgaguucuccgugaacgccggcgugaccacccccgucagcacguacaugcucaccaacuccgagcugcugagccucaucaacgacaugccgaucaccaacgaccagaagaagcugaugagcaacaacgugcagaucgugcggcagcaguccuacagcaucaugugcaucaucaaggaggagguccuggccuacguggugcagcucccccuguacggggucaucgacacccccugcuggaagcugcacacgagcccccucugcaccaccaacaccaaggagggcuccaacaucugccugacgcgcaccgaccgggggugguacugcgacaacgcgggcuccgugagcuucuucccgcaggccgagaccugcaaggugcaguccaaccgcgucuucugcgacaccaugaacagccugacgcuccccuccgaggugaaccugugcaacaucgacaucuucaaccccaaguacgacugcaagaucaugaccagcaagaccgacgucuccagcuccgugaucaccagccugggcgccaucguguccugcuacgggaagacgaagugcaccgccagcaacaagaaccggggcaucaucaagaccuucuccaacgggugcgacuacgucagcaacaagggcguggacaccguguccgucggcaacacgcucuacugcgugaacaagcaggaggggcagagccuguacgugaagggcgagcccaucaucaacuucuacgacccgcuggucuuccccagcgacgaguucgacgccuccaucagccaggugaacgagaagaucaaccagucccucgcguucauccgcaagagcgacgagcugcugcacaacgugaacgucgggaaguccaccaccaacaucaugaucaccaccaucaucaucgugaucaucgugauccuccugcugcucaucgccgucggccuguuccuguacugcaaggcccggagcacgcccgugacccuguccaaggaccagcucagcgggaucaacaacaucgccuucuccaacugaggacuaguguccaccugucccuccugggcugcuggauugucucguuuuccugccaaauaaacaggaucagcgcuuuacagaucuaaaaaaaaaaaaaaaaaaaaaaaaaaaaaaaaaaaaaaaaaaaaaaaaaaaaaaaaaaaaaaaaugcaucccccccccccccccccccccccccccccccaaaggcucuuuucagagccaccagaauu

SEQ ID NO: 14873 - RNA, 1943 nt, Artificial Sequence
  mRNA product Design e-4 comprising derived and/or modified sequence from HRSV(Memphis-37)__AIY60640.1__F_DSCav1_mut2 (opt2)
gggagacuccugucgggcggaaguaggaggaguagaguuuaaaaacaguacucuuuuuccgguucgggacguaguugaagcaacgacaagccggauaaccgcucuugagacaggaagcuuaccauggagcuccccauccucaagaccaacgccaucaccaccauccucgccgccgucacccucugcuucgccuccucccagaacaucaccgaggaguucuaccaguccaccugcuccgccgucuccaagggcuaccucggcgcccuccgcaccggcugguacaccuccgucaucaccaucgagcucuccaacaucaaggagaacaagugcaacggcaccgacgccaaggucaagcucaucaagcaggagcucgacaaguacaagaacgccgucaccgaccuccagcuccucaugcaguccacccccgccgccggcuccggcuccgccaucugcuccggcaucgccgucugcaagguccuccaccucgagggcgaggucaacaagaucaagaacgcccuccucuccaccaacaaggccgucgucucccucuccaacggcgucuccguccucaccuucaagguccucgaccucaagaacuacaucgacaagcagcuccuccccauccucaacaagcaguccugcuccauccccaacaucgagaccgucaucgaguuccagcagaagaacaaccgccuccucgagaucacccgcgaguucuccgucaacgccggcgucaccacccccgucuccaccuacaugcucaccaacuccgagcuccucucccucaucaacgacaugcccaucaccaacgaccagaagaagcucauguccaacaacguccagaucguccgccagcaguccuacuccaucaugugcaucaucaaggaggagguccucgccuacgucguccagcucccccucuacggcgucaucgacacccccugcuggaagcuccacaccuccccccucugcaccaccaacaccaaggagggcuccaacaucugccucacccgcaccgaccgcggcugguacugcgacaacgccggcuccgucuccuucuucccccaggccgagaccugcaagguccaguccaaccgcgucuucugcgacaccaugaacucccucacccuccccuccgaggucaaccucugcaacaucgacaucuucaaccccaaguacgacugcaagaucaugaccuccaagaccgacgucuccuccuccgucaucaccucccucggcgccaucgucuccugcuacggcaagaccaagugcaccgccuccaacaagaaccgcggcaucaucaagaccuucuccaacggcugcgacuacgucuccaacaagggcgucgacaccgucuccgucggcaacacccucuacugcgucaacaagcaggagggccagucccucuacgucaagggcgagcccaucaucaacuucuacgacccccucgucuuccccuccgacgaguucgacgccuccaucucccaggucaacgagaagaucaaccagucccucgccuucauccgcaaguccgacgagcuccuccacaacgucaacgucggcaaguccaccaccaacaucaugaucaccaccaucaucaucgucaucaucgucauccuccuccuccucaucgccgucggccucuuccucuacugcaaggcccgcuccacccccgucacccucuccaaggaccagcucuccggcaucaacaacaucgccuucuccaacugaggacuaguguccaccugucccuccugggcugcuggauugucucguuuuccugccaaauaaacaggaucagcgcuuuacagaucuaaaaaaaaaaaaaaaaaaaaaaaaaaaaaaaaaaaaaaaaaaaaaaaaaaaaaaaaaaaaaaaaugcaucccccccccccccccccccccccccccccccaaaggcucuuuucagagccaccagaauu

SEQ ID NO: 14874 - RNA, 1943 nt, Artificial Sequence
  mRNA product Design e-4 comprising derived and/or modified sequence from HRSV(Memphis-37)__AIY60640.1__F_DSCav1_mut2 (opt3)
gggagacuccugucgggcggaaguaggaggaguagaguuuaaaaacaguacucuuuuuccgguucgggacguaguugaagcaacgacaagccggauaaccgcucuugagacaggaagcuuaccauggagcugcccauccucaagaccaacgccauuacaacuauacuugcugcagugacgcugugcuucgccagcucccagaauaucaccgaagaguuuuaccaaucuacauguucagcggucaguaaaggcuauuugggggcuuuaagaacuggaugguacaccagcguuauuacaaucgaacuguccaacauuaaggagaauaaaugcaacgguaccgacgccaaggugaaacuaaucaagcaggaacucgauaaguauaaaaaugcaguaacugaccugcagcuucugaugcagucuacuccugccgcuggcucggggucagcaauauguagcggaaucgccgugugcaaggucuugcaccucgagggcgaggugaacaaaauuaagaaugcucugcugaguaccaacaaagccguugugucccucucuaauggugucagcguguuaacguucaagguacuggaucuuaagaacuacaucgacaaacaauugcugccaauucuaaauaagcaguccuguucaaucccgaacauagaaacuguuauugaguuucagcagaaaaauaacaggcuccuggaaaucacccgggaguucagugugaaugcgggggucacaacucccgugagcaccuauaugcuuacaaacucugagcuguugucccucauuaacgauaugccuaucaccaaugaccaaaagaaacugaugucaaacaaugugcagaucguccgccagcagagcuacaguauuaugugcauaaucaaggaagagguuuuagcauaugugguacaacugccacucuacggagugauugauacgcccuguuggaaacuucauacuucuccucugugcacaaccaacacuaaggaaggcuccaauaucuguuugacacgaaccgaccguggcugguacugcgauaacgccgggagcgucucguuuuucccacaggcugagacguguaaggugcagucuaauagaguuuucugcgacaccaugaacucccuaacacugcccucagaagugaaucucugcaacauagauauuuucaauccuaaauaugacuguaagaucaugacaaguaaaaccgaugucagcuccucugugaucacaagccugggagccauuguaucaugcuacgguaagacuaaauguaccgcaaguaacaagaauaggggcaucauuaagacauuuuccaacgggugcgacuauguuagcaauaaaggaguggacaccgucucugugggcaacacucuuuacugugucaacaagcaagagggucagucacuguaugugaaaggggagccaauaaucaauuucuacgauccguugguuuuucccagugacgaauuugaugcuagcauuucccaggugaacgagaagaucaaucagucucucgccuuuauccggaaaucggacgaacuguuacacaacguaaaugucggaaagagcacgacaaacauuaugauaaccacuaucauuaucgugauuaucguuauacugcuacuccugaucgcggugggccuuuucuuguauugcaaggcccgcuccaccccugucacacugucaaaagaucaacucaguggcauuaauaacaucgcauucucuaauugaggacuaguguccaccugucccuccugggcugcuggauugucucguuuuccugccaaauaaacaggaucagcgcuuuacagaucuaaaaaaaaaaaaaaaaaaaaaaaaaaaaaaaaaaaaaaaaaaaaaaaaaaaaaaaaaaaaaaaaugcaucccccccccccccccccccccccccccccccaaaggcucuuuucagagccaccagaauu

SEQ ID NO: 14875 - RNA, 1943 nt, Artificial Sequence
  mRNA product Design e-4 comprising derived and/or modified sequence from HRSV(Memphis-37)__AIY60640.1__F_DSCav1_mut2 (opt4)
gggagacuccugucgggcggaaguaggaggaguagaguuuaaaaacaguacucuuuuuccgguucgggacguaguugaagcaacgacaagccggauaaccgcucuugagacaggaagcuuaccauggagcugcccauccugaagaccaacgccaucaccaccauccuggccgccgugacccugugcuucgccagcagccagaacaucaccgaggaguucuaccagagcaccugcagcgccgugagcaagggcuaccugggcgcccugagaaccggcugguacaccagcgugaucaccaucgagcugagcaacaucaaggagaacaagugcaacggcaccgacgccaaggugaagcugaucaagcaggagcuggacaaguacaagaacgccgugaccgaccugcagcugcugaugcagagcacccccgccgccggcagcggcagcgccaucugcagcggcaucgccgugugcaaggugcugcaccuggagggcgaggugaacaagaucaagaacgcccugcugagcaccaacaaggccguggugagccugagcaacggcgugagcgugcugaccuucaaggugcuggaccugaagaacuacaucgacaagcagcugcugcccauccugaacaagcagagcugcagcauccccaacaucgagaccgugaucgaguuccagcagaagaacaacagacugcuggagaucaccagagaguucagcgugaacgccggcgugaccacccccgugagcaccuacaugcugaccaacagcgagcugcugagccugaucaacgacaugcccaucaccaacgaccagaagaagcugaugagcaacaacgugcagaucgugagacagcagagcuacagcaucaugugcaucaucaaggaggaggugcuggccuacguggugcagcugccccuguacggcgugaucgacacccccugcuggaagcugcacaccagcccccugugcaccaccaacaccaaggagggcagcaacaucugccugaccagaaccgacagaggcugguacugcgacaacgccggcagcgugagcuucuucccccaggccgagaccugcaaggugcagagcaacagaguguucugcgacaccaugaacagccugacccugcccagcgaggugaaccugugcaacaucgacaucuucaaccccaaguacgacugcaagaucaugaccagcaagaccgacgugagcagcagcgugaucaccagccugggcgccaucgugagcugcuacggcaagaccaagugcaccgccagcaacaagaacagaggcaucaucaagaccuucagcaacggcugcgacuacgugagcaacaagggcguggacaccgugagcgugggcaacacccuguacugcgugaacaagcaggagggccagagccuguacgugaagggcgagcccaucaucaacuucuacgacccccugguguuccccagcgacgaguucgacgccagcaucagccaggugaacgagaagaucaaccagagccuggccuucaucagaaagagcgacgagcugcugcacaacgugaacgugggcaagagcaccaccaacaucaugaucaccaccaucaucaucgugaucaucgugauccugcugcugcugaucgccgugggccuguuccuguacugcaaggccagaagcacccccgugacccugagcaaggaccagcugagcggcaucaacaacaucgccuucagcaacugaggacuaguguccaccugucccuccugggcugcuggauugucucguuuuccugccaaauaaacaggaucagcgcuuuacagaucuaaaaaaaaaaaaaaaaaaaaaaaaaaaaaaaaaaaaaaaaaaaaaaaaaaaaaaaaaaaaaaaaugcaucccccccccccccccccccccccccccccccaaaggcucuuuucagagccaccagaauu

SEQ ID NO: 14876 - RNA, 1943 nt, Artificial Sequence
  mRNA product Design e-4 comprising derived and/or modified sequence from HRSV(Memphis-37)__AIY60640.1__F_DSCav1_mut2 (opt5)
gggagacuccugucgggcggaaguaggaggaguagaguuuaaaaacaguacucuuuuuccgguucgggacguaguugaagcaacgacaagccggauaaccgcucuugagacaggaagcuuaccauggagcugcccauccucaagaccaacgccauuacaacgauccuggcugccgugacccuuugcuucgcgagcucccagaauauuacagaagaguuuuaccaaucuaccuguagcgcugucuccaaaggcuaucugggggcccucagaacaggaugguacaccucuguuaucacaauugaacugagcaacaucaaggagaauaaaugcaacggcaccgacgccaaggugaaacuuaucaagcaggaacuggauaaguauaaaaaugcugugacggaccuccagcugcugaugcaguccaccccugccgcugggucuggaagcgccauuuguuccggcaucgcggucugcaaggugcuccaccuggagggggagguuaacaaaauuaagaaugcccuucugagcacaaacaaagcuguggucucucucuccaauggagugagcguucugaccuucaaggugcuugaucugaagaacuacaucgacaaacaacuccugccgauucugaauaagcagucuuguuccauccccaacauugaaacagucaucgaguuucagcagaaaaauaaccggcuccuggaaaucacccgcgaguucagcgugaaugccggcgugacgacaccugucucuaccuauaugcuuacaaacuccgagcugcucagccugauuaacgauaugcccaucaccaaugaccaaaagaaacuuauguccaacaauguucagauugugagacagcagucuuacagcaucaugugcauuaucaaggaagaggugcuggcuuaugucgugcaacucccucuguacggcguuaucgauacccccuguuggaaacugcauacauccccucucugcacgaccaacacaaaggaagggagcaauauuugucugacccggacagaccgcggaugguacugcgauaacgccggcucuguguccuuuuucccgcaggcggagaccuguaagguccagagcaauagaguguuuugcgacacgaugaacucucuuacacugcccagcgaaguuaaucucugcaacaucgauauuuucaauccuaaauaugacuguaagaucaugaccuccaaaaccgaugugucuagcuccgucauuacaagccugggggccaucgugucuugcuacggaaagaccaaauguacagcuuccaacaagaaucggggcaucauuaagacguuuagcaacgggugcgacuaugucucuaauaaaggaguggacaccguuuccgugggcaacacacuuuacugugucaacaagcaagagggccagagccuguaugugaaaggggagcccaucauuaauuucuacgauccucucguuuuucccuccgacgaguucgaugccucuaucagccaggugaacgaaaagauuaaucagucccuggcuuuuauccgcaaaucugacgaacugcuccacaacgucaaugugggaaagagcaccacaaacauuaugaucaccacgaucauuaucgugauuaucguuauucugcuucugcucaucgccgucggccuguuccuguauugcaaggccagauccaccccggugacacuuagcaaagaucaacucucugggaucaauaacauugcuuucuccaauugaggacuaguguccaccugucccuccugggcugcuggauugucucguuuuccugccaaauaaacaggaucagcgcuuuacagaucuaaaaaaaaaaaaaaaaaaaaaaaaaaaaaaaaaaaaaaaaaaaaaaaaaaaaaaaaaaaaaaaaugcaucccccccccccccccccccccccccccccccaaaggcucuuuucagagccaccagaauu

SEQ ID NO: 14877 - RNA, 1943 nt, Artificial Sequence
  mRNA product Design e-4 comprising derived and/or modified sequence from HRSV(Memphis-37)__AIY60640.1__F_DSCav1_mut2 (opt6)
gggagacuccugucgggcggaaguaggaggaguagaguuuaaaaacaguacucuuuuuccgguucgggacguaguugaagcaacgacaagccggauaaccgcucuugagacaggaagcuuaccauggagcuuccaauauuaaaaacaaacgcuauaacaacuauacucgcagcaguuacacucugcuucgcauccucacaaaacauaacugaagaauuuuaccaauccacuugcucagccguaucaaaaggauaucuaggagcacuuagaaccggaugguauacaucagugauaacaauagaacuaagcaacauaaaagaaaacaagugcaacggaacugacgcaaaagucaaacuaaucaaacaagaacuagacaaauacaaaaacgcaguaacagaccuacaauuacuaaugcaaucaacaccagcagcaggaucagguucagccauaugcucagguaucgcuguaugcaaaguccuucaccuagaaggugaaguaaacaaaauuaaaaacgcccuacucaguacaaauaaagcugucguaaguuuaucaaacggaguaucaguccuuacauucaaaguauuagaccuaaaaaauuauauagacaaacaauuacuaccaauacucaacaaacaaucaugcucaauaccaaauauagaaaccguaauagaauuucagcaaaaaaauaacagauuacuagaaauaaccagagaauuuucagucaacgcaggagucacaacacccgucucaaccuacaugcuaaccaacucagaacuucuaucucuuaucaacgacaugcccauaaccaaugaucaaaaaaaauuaaugucuaauaacguucaaauaguaagacaacaaucauacucaauaaugugcauaaucaaagaagaaguauuagcauacguaguacaacuaccccuauauggaguaauagacacacccugcuggaaacuacacacauccccccucuguacaacaaacacuaaagaaggaucaaacauuugccuaacaagaacagaccgcggaugguacugcgacaacgcaggcuccguaucuuucuuuccacaagccgaaacuuguaaaguucaaucaaacagaguauuuugcgauacaaugaacuccuuaacauuaccuucagaaguaaaccuaugcaacauagacaucuucaacccaaaauacgacugcaaaauaaugaccucaaaaacagacguauccucaucagucauaaccuccuuaggagcaauaguaucauguuacggaaaaacaaaauguacagcaucaaauaaaaauagaggaauaauaaaaaccuucuccaacggaugcgacuacguauccaauaaaggaguagacaccguaucaguaggaaacacacuauacuguguaaacaaacaagaaggccaaucucuauauguaaaaggcgaaccaaucauaaauuuuuacgacccacuugucuuccccuccgacgaauuugacgcaagcauaucacaaguaaacgaaaaaaucaaccaaagccuagccuucauaaggaaaucugacgaauuacuucauaacguaaauguuggaaaaucaaccacaaacauaaugauaaccaccaucauaauuguaauaauaguaauacuacuacuacuaauugcaguaggacucuuccuauauugcaaagcucgcucaacaccaguuaccuuaucaaaagaccaacuaucuggaauaaacaacauagccuuuuccaacuaaggacuaguguccaccugucccuccugggcugcuggauugucucguuuuccugccaaauaaacaggaucagcgcuuuacagaucuaaaaaaaaaaaaaaaaaaaaaaaaaaaaaaaaaaaaaaaaaaaaaaaaaaaaaaaaaaaaaaaaugcaucccccccccccccccccccccccccccccccaaaggcucuuuucagagccaccagaauu

SEQ ID NO: 14878 - RNA, 1943 nt, Artificial Sequence
  mRNA product Design e-4 comprising derived and/or modified sequence from HRSV(Memphis-37)__AIY60640.1__F_DSCav1_mut2 (opt11)
gggagacuccugucgggcggaaguaggaggaguagaguuuaaaaacaguacucuuuuuccgguucgggacguaguugaagcaacgacaagccggauaaccgcucuugagacaggaagcuuaccauggaacucccaauccuaaaaaccaacgccaucaccaccauccucgccgcugucaccuuaugcuuugccagcagccaaaacaucaccgaagaauuuuaccaaucaacaugcuccgccgucucaaaaggauaccucggcgcccuacgcaccggcugguacacaagcgucauaaccaucgagcucuccaacaucaaggaaaacaaaugcaauggaaccgacgccaaagucaaacuaaucaaacaagaacuagacaaguacaagaacgcagucaccgaccuccaacuccucaugcaguccacccccgcagcaggcucuggcucagcaauaugcuccggcaucgcugucugcaaaguccuacaccucgaaggcgaagucaacaaaaucaaaaacgcccuacuguccacaaacaaagccgucgucucccuauccaacggcgucucgguccuaaccuuuaagguucucgaucucaaaaauuacauagacaaacaacuacuccccauccucaacaaacaaucuugcucaauccccaacaucgaaaccgucaucgaguuccaacagaaaaacaacagacuacucgaaaucacccgcgaguucucagucaacgcgggcgucacaacacccgucagcaccuacaugcuaaccaacuccgaacuccucagccucauuaacgacaugcccaucaccaacgaccaaaagaaacuuauguccaacaacguucaaaucguccgccaacaauccuacuccaucaugugcaucaucaaagaagaaguacucgccuacguaguccaacugccccucuacggcgucaucgauaccccaugcuggaaacuacacaccagcccccucugcaccaccaacaccaaagaaggcuccaauaucugcuuaacccgcacagaccguggcugguacugcgauaacgccggcuccgucuccuucuucccccaagcagaaaccugcaaaguacaauccaaccgagucuucugugacaccaugaacucccuaacccuuccaucagaagucaaccucugcaacaucgacaucuucaaccccaaguacgacugcaaaaucaugacauccaaaaccgaugucucaagcagcgucauaaccucacucggcgcuaucguaagcugcuacggcaaaaccaaaugcaccgcaucaaacaaaaaccgcggaaucaucaaaaccuucagcaacggaugcgacuacguuuccaacaaaggcguagacaccgucuccgucggaaacacccucuacugcguaaacaaacaggaaggccaaucccucuacgucaaaggcgaacccaucauaaacuucuacgauccccuugucuucccguccgaugaguucgacgccuccaucucgcaagucaacgaaaagauaaaccaaucacuagcauucauccguaaauccgacgaacuccuccacaacgucaacgucggaaaauccaccaccaacauaaugaucaccaccauaaucaucgucaucaucguaauacuauuacuccucauagccgucggccucuuccuauauugcaaagcccgaucaacccccguaacccuuucuaaagaccaacuguccggaaucaacaacaucgcuuucagcaacugaggacuaguguccaccugucccuccugggcugcuggauugucucguuuuccugccaaauaaacaggaucagcgcuuuacagaucuaaaaaaaaaaaaaaaaaaaaaaaaaaaaaaaaaaaaaaaaaaaaaaaaaaaaaaaaaaaaaaaaugcaucccccccccccccccccccccccccccccccaaaggcucuuuucagagccaccagaauu

SEQ ID NO: 14879 - RNA, 1910 nt, Artificial Sequence
  mRNA product Design e-5 comprising derived and/or modified sequence from HRSV(Memphis-37)__AIY60640.1__F_DSCav1_mut2 (opt1)
gggagagcggcucggccauuuugucccagucaguccggaggcugcggcugcagaaguaccgccugcggaguaacugcaaagaagcuuaccauggagcugcccauccucaagaccaacgccaucaccacgauccuggccgcggugacccugugcuucgccagcucccagaacaucaccgaggaguucuaccagagcacgugcuccgccgucagcaagggcuaccucggcgcccugcgcaccgggugguacaccagcgugaucaccaucgagcuguccaacaucaaggagaacaagugcaacggcaccgacgccaaggugaagcucaucaagcaggagcuggacaaguacaagaacgcggucacggaccugcagcuccugaugcagagcaccccggccgccggcuccgggagcgcgaucugcuccggcaucgccgucugcaaggugcugcaccucgagggcgaggugaacaagaucaagaacgcccugcuguccaccaacaaggccgucgugagccucuccaacggggugagcguccugaccuucaaggugcuggaccucaagaacuacaucgacaagcagcugcugcccauccugaacaagcagagcugcuccauccccaacaucgagaccgucaucgaguuccagcagaagaacaaccgccuccuggagaucacgcgggaguucagcgugaacgcgggcgugaccacccccgucuccaccuacaugcugacgaacagcgagcuccugucccugaucaacgacaugccgaucaccaacgaccagaagaagcucaugagcaacaacgugcagaucgugcgccagcaguccuacagcaucaugugcaucaucaaggaggagguccuggccuacguggugcagcugccccucuacggggucaucgacacccccugcuggaagcugcacaccagcccccugugcacgaccaacaccaaggagggcuccaacaucugccucacccggacggaccgcgggugguacugcgacaacgccggcagcguguccuucuucccgcaggccgagaccugcaagguccagagcaaccggguguucugcgacaccaugaacucccugacccugcccagcgaggugaaccucugcaacaucgacaucuucaaccccaaguacgacugcaagaucaugacguccaagaccgacgucagcuccagcgugaucaccucccugggcgccaucgugagcugcuacgggaagaccaagugcacggcgagcaacaagaaccgcggcaucaucaagaccuucuccaacgggugcgacuacgucagcaacaagggcguggacaccguguccgucggcaacacccuguacugcgugaacaagcaggagggccagagccucuacgugaagggggagcccaucaucaacuucuacgacccgcuggucuuccccuccgacgaguucgacgccagcaucucccaggugaacgagaagaucaaccagagccuggccuucauccggaaguccgacgagcuccugcacaacgugaacgucggcaagagcaccacgaacaucaugaucaccaccaucaucaucgugaucaucgugauccugcugcuccugaucgccgucgggcuguuccucuacugcaaggcccgcuccacccccgugacgcugagcaaggaccagcuguccgggaucaacaacaucgcguucagcaacugaggacuaguguccaccugucccuccugggcugcuggauugucucguuuuccugccaaauaaacaggaucagcgcuuuacagaucuaaaaaaaaaaaaaaaaaaaaaaaaaaaaaaaaaaaaaaaaaaaaaaaaaaaaaaaaaaaaaaaaugcaucccccccccccccccccccccccccccccccaaaggcucuuuucagagccaccagaauu

SEQ ID NO: 14880 - RNA, 1910 nt, Artificial Sequence
  mRNA product Design e-5 comprising derived and/or modified sequence from HRSV(Memphis-37)__AIY60640.1__F_DSCav1_mut2 (opt1)
gggagagcggcucggccauuuugucccagucaguccggaggcugcggcugcagaaguaccgccugcggaguaacugcaaagaagcuuaccauggagcugcccauccucaagaccaacgccaucaccacgauccuggccgcggugacccugugcuucgccagcucccagaacaucaccgaggaguucuaccagagcacgugcuccgccgucagcaagggcuaccucggggcccugcgcaccggcugguacaccuccgugaucaccaucgagcugagcaacaucaaggagaacaagugcaacgggaccgacgccaaggugaagcucaucaagcaggagcuggacaaguacaagaacgcggucacggaccugcagcuccugaugcaguccaccccggccgccggcagcggguccgccaucugcagcggcaucgcggugugcaaggugcugcaccucgagggcgaggucaacaagaucaagaacgcccugcuguccaccaacaaggccguggugagccucuccaacggggucagcgugcugaccuucaaggugcuggaccucaagaacuacaucgacaagcagcugcugcccauccucaacaagcaguccugcagcauccccaacaucgagacggucaucgaguuccagcagaagaacaaccggcugcuggagaucacccgcgaguucuccgugaacgccggcgugaccacccccgucagcacguacaugcucaccaacuccgagcugcugagccucaucaacgacaugccgaucaccaacgaccagaagaagcugaugagcaacaacgugcagaucgugcggcagcaguccuacagcaucaugugcaucaucaaggaggagguccuggccuacguggugcagcucccccuguacggggucaucgacacccccugcuggaagcugcacacgagcccccucugcaccaccaacaccaaggagggcuccaacaucugccugacgcgcaccgaccgggggugguacugcgacaacgcgggcuccgugagcuucuucccgcaggccgagaccugcaaggugcaguccaaccgcgucuucugcgacaccaugaacagccugacgcuccccuccgaggugaaccugugcaacaucgacaucuucaaccccaaguacgacugcaagaucaugaccagcaagaccgacgucuccagcuccgugaucaccagccugggcgccaucguguccugcuacgggaagacgaagugcaccgccagcaacaagaaccggggcaucaucaagaccuucuccaacgggugcgacuacgucagcaacaagggcguggacaccguguccgucggcaacacgcucuacugcgugaacaagcaggaggggcagagccuguacgugaagggcgagcccaucaucaacuucuacgacccgcuggucuuccccagcgacgaguucgacgccuccaucagccaggugaacgagaagaucaaccagucccucgcguucauccgcaagagcgacgagcugcugcacaacgugaacgucgggaaguccaccaccaacaucaugaucaccaccaucaucaucgugaucaucgugauccuccugcugcucaucgccgucggccuguuccuguacugcaaggcccggagcacgcccgugacccuguccaaggaccagcucagcgggaucaacaacaucgccuucuccaacugaggacuaguguccaccugucccuccugggcugcuggauugucucguuuuccugccaaauaaacaggaucagcgcuuuacagaucuaaaaaaaaaaaaaaaaaaaaaaaaaaaaaaaaaaaaaaaaaaaaaaaaaaaaaaaaaaaaaaaaugcaucccccccccccccccccccccccccccccccaaaggcucuuuucagagccaccagaauu

SEQ ID NO: 14881 - RNA, 1910 nt, Artificial Sequence
  mRNA product Design e-5 comprising derived and/or modified sequence from HRSV(Memphis-37)__AIY60640.1__F_DSCav1_mut2 (opt2)
gggagagcggcucggccauuuugucccagucaguccggaggcugcggcugcagaaguaccgccugcggaguaacugcaaagaagcuuaccauggagcuccccauccucaagaccaacgccaucaccaccauccucgccgccgucacccucugcuucgccuccucccagaacaucaccgaggaguucuaccaguccaccugcuccgccgucuccaagggcuaccucggcgcccuccgcaccggcugguacaccuccgucaucaccaucgagcucuccaacaucaaggagaacaagugcaacggcaccgacgccaaggucaagcucaucaagcaggagcucgacaaguacaagaacgccgucaccgaccuccagcuccucaugcaguccacccccgccgccggcuccggcuccgccaucugcuccggcaucgccgucugcaagguccuccaccucgagggcgaggucaacaagaucaagaacgcccuccucuccaccaacaaggccgucgucucccucuccaacggcgucuccguccucaccuucaagguccucgaccucaagaacuacaucgacaagcagcuccuccccauccucaacaagcaguccugcuccauccccaacaucgagaccgucaucgaguuccagcagaagaacaaccgccuccucgagaucacccgcgaguucuccgucaacgccggcgucaccacccccgucuccaccuacaugcucaccaacuccgagcuccucucccucaucaacgacaugcccaucaccaacgaccagaagaagcucauguccaacaacguccagaucguccgccagcaguccuacuccaucaugugcaucaucaaggaggagguccucgccuacgucguccagcucccccucuacggcgucaucgacacccccugcuggaagcuccacaccuccccccucugcaccaccaacaccaaggagggcuccaacaucugccucacccgcaccgaccgcggcugguacugcgacaacgccggcuccgucuccuucuucccccaggccgagaccugcaagguccaguccaaccgcgucuucugcgacaccaugaacucccucacccuccccuccgaggucaaccucugcaacaucgacaucuucaaccccaaguacgacugcaagaucaugaccuccaagaccgacgucuccuccuccgucaucaccucccucggcgccaucgucuccugcuacggcaagaccaagugcaccgccuccaacaagaaccgcggcaucaucaagaccuucuccaacggcugcgacuacgucuccaacaagggcgucgacaccgucuccgucggcaacacccucuacugcgucaacaagcaggagggccagucccucuacgucaagggcgagcccaucaucaacuucuacgacccccucgucuuccccuccgacgaguucgacgccuccaucucccaggucaacgagaagaucaaccagucccucgccuucauccgcaaguccgacgagcuccuccacaacgucaacgucggcaaguccaccaccaacaucaugaucaccaccaucaucaucgucaucaucgucauccuccuccuccucaucgccgucggccucuuccucuacugcaaggcccgcuccacccccgucacccucuccaaggaccagcucuccggcaucaacaacaucgccuucuccaacugaggacuaguguccaccugucccuccugggcugcuggauugucucguuuuccugccaaauaaacaggaucagcgcuuuacagaucuaaaaaaaaaaaaaaaaaaaaaaaaaaaaaaaaaaaaaaaaaaaaaaaaaaaaaaaaaaaaaaaaugcaucccccccccccccccccccccccccccccccaaaggcucuuuucagagccaccagaauu

SEQ ID NO: 14882 - RNA, 1910 nt, Artificial Sequence
  mRNA product Design e-5 comprising derived and/or modified sequence from HRSV(Memphis-37)__AIY60640.1__F_DSCav1_mut2 (opt3)
gggagagcggcucggccauuuugucccagucaguccggaggcugcggcugcagaaguaccgccugcggaguaacugcaaagaagcuuaccauggagcugcccauccucaagaccaacgccauuacaacuauacuugcugcagugacgcugugcuucgccagcucccagaauaucaccgaagaguuuuaccaaucuacauguucagcggucaguaaaggcuauuugggggcuuuaagaacuggaugguacaccagcguuauuacaaucgaacuguccaacauuaaggagaauaaaugcaacgguaccgacgccaaggugaaacuaaucaagcaggaacucgauaaguauaaaaaugcaguaacugaccugcagcuucugaugcagucuacuccugccgcuggcucggggucagcaauauguagcggaaucgccgugugcaaggucuugcaccucgagggcgaggugaacaaaauuaagaaugcucugcugaguaccaacaaagccguugugucccucucuaauggugucagcguguuaacguucaagguacuggaucuuaagaacuacaucgacaaacaauugcugccaauucuaaauaagcaguccuguucaaucccgaacauagaaacuguuauugaguuucagcagaaaaauaacaggcuccuggaaaucacccgggaguucagugugaaugcgggggucacaacucccgugagcaccuauaugcuuacaaacucugagcuguugucccucauuaacgauaugccuaucaccaaugaccaaaagaaacugaugucaaacaaugugcagaucguccgccagcagagcuacaguauuaugugcauaaucaaggaagagguuuuagcauaugugguacaacugccacucuacggagugauugauacgcccuguuggaaacuucauacuucuccucugugcacaaccaacacuaaggaaggcuccaauaucuguuugacacgaaccgaccguggcugguacugcgauaacgccgggagcgucucguuuuucccacaggcugagacguguaaggugcagucuaauagaguuuucugcgacaccaugaacucccuaacacugcccucagaagugaaucucugcaacauagauauuuucaauccuaaauaugacuguaagaucaugacaaguaaaaccgaugucagcuccucugugaucacaagccugggagccauuguaucaugcuacgguaagacuaaauguaccgcaaguaacaagaauaggggcaucauuaagacauuuuccaacgggugcgacuauguuagcaauaaaggaguggacaccgucucugugggcaacacucuuuacugugucaacaagcaagagggucagucacuguaugugaaaggggagccaauaaucaauuucuacgauccguugguuuuucccagugacgaauuugaugcuagcauuucccaggugaacgagaagaucaaucagucucucgccuuuauccggaaaucggacgaacuguuacacaacguaaaugucggaaagagcacgacaaacauuaugauaaccacuaucauuaucgugauuaucguuauacugcuacuccugaucgcggugggccuuuucuuguauugcaaggcccgcuccaccccugucacacugucaaaagaucaacucaguggcauuaauaacaucgcauucucuaauugaggacuaguguccaccugucccuccugggcugcuggauugucucguuuuccugccaaauaaacaggaucagcgcuuuacagaucuaaaaaaaaaaaaaaaaaaaaaaaaaaaaaaaaaaaaaaaaaaaaaaaaaaaaaaaaaaaaaaaaugcaucccccccccccccccccccccccccccccccaaaggcucuuuucagagccaccagaauu

SEQ ID NO: 14883 - RNA, 1910 nt, Artificial Sequence
  mRNA product Design e-5 comprising derived and/or modified sequence from HRSV(Memphis-37)__AIY60640.1__F_DSCav1_mut2 (opt4)
gggagagcggcucggccauuuugucccagucaguccggaggcugcggcugcagaaguaccgccugcggaguaacugcaaagaagcuuaccauggagcugcccauccugaagaccaacgccaucaccaccauccuggccgccgugacccugugcuucgccagcagccagaacaucaccgaggaguucuaccagagcaccugcagcgccgugagcaagggcuaccugggcgcccugagaaccggcugguacaccagcgugaucaccaucgagcugagcaacaucaaggagaacaagugcaacggcaccgacgccaaggugaagcugaucaagcaggagcuggacaaguacaagaacgccgugaccgaccugcagcugcugaugcagagcacccccgccgccggcagcggcagcgccaucugcagcggcaucgccgugugcaaggugcugcaccuggagggcgaggugaacaagaucaagaacgcccugcugagcaccaacaaggccguggugagccugagcaacggcgugagcgugcugaccuucaaggugcuggaccugaagaacuacaucgacaagcagcugcugcccauccugaacaagcagagcugcagcauccccaacaucgagaccgugaucgaguuccagcagaagaacaacagacugcuggagaucaccagagaguucagcgugaacgccggcgugaccacccccgugagcaccuacaugcugaccaacagcgagcugcugagccugaucaacgacaugcccaucaccaacgaccagaagaagcugaugagcaacaacgugcagaucgugagacagcagagcuacagcaucaugugcaucaucaaggaggaggugcuggccuacguggugcagcugccccuguacggcgugaucgacacccccugcuggaagcugcacaccagcccccugugcaccaccaacaccaaggagggcagcaacaucugccugaccagaaccgacagaggcugguacugcgacaacgccggcagcgugagcuucuucccccaggccgagaccugcaaggugcagagcaacagaguguucugcgacaccaugaacagccugacccugcccagcgaggugaaccugugcaacaucgacaucuucaaccccaaguacgacugcaagaucaugaccagcaagaccgacgugagcagcagcgugaucaccagccugggcgccaucgugagcugcuacggcaagaccaagugcaccgccagcaacaagaacagaggcaucaucaagaccuucagcaacggcugcgacuacgugagcaacaagggcguggacaccgugagcgugggcaacacccuguacugcgugaacaagcaggagggccagagccuguacgugaagggcgagcccaucaucaacuucuacgacccccugguguuccccagcgacgaguucgacgccagcaucagccaggugaacgagaagaucaaccagagccuggccuucaucagaaagagcgacgagcugcugcacaacgugaacgugggcaagagcaccaccaacaucaugaucaccaccaucaucaucgugaucaucgugauccugcugcugcugaucgccgugggccuguuccuguacugcaaggccagaagcacccccgugacccugagcaaggaccagcugagcggcaucaacaacaucgccuucagcaacugaggacuaguguccaccugucccuccugggcugcuggauugucucguuuuccugccaaauaaacaggaucagcgcuuuacagaucuaaaaaaaaaaaaaaaaaaaaaaaaaaaaaaaaaaaaaaaaaaaaaaaaaaaaaaaaaaaaaaaaugcaucccccccccccccccccccccccccccccccaaaggcucuuuucagagccaccagaauu

SEQ ID NO: 14884 - RNA, 1910 nt, Artificial Sequence
  mRNA product Design e-5 comprising derived and/or modified sequence from HRSV(Memphis-37)__AIY60640.1__F_DSCav1_mut2 (opt5)
gggagagcggcucggccauuuugucccagucaguccggaggcugcggcugcagaaguaccgccugcggaguaacugcaaagaagcuuaccauggagcugcccauccucaagaccaacgccauuacaacgauccuggcugccgugacccuuugcuucgcgagcucccagaauauuacagaagaguuuuaccaaucuaccuguagcgcugucuccaaaggcuaucugggggcccucagaacaggaugguacaccucuguuaucacaauugaacugagcaacaucaaggagaauaaaugcaacggcaccgacgccaaggugaaacuuaucaagcaggaacuggauaaguauaaaaaugcugugacggaccuccagcugcugaugcaguccaccccugccgcugggucuggaagcgccauuuguuccggcaucgcggucugcaaggugcuccaccuggagggggagguuaacaaaauuaagaaugcccuucugagcacaaacaaagcuguggucucucucuccaauggagugagcguucugaccuucaaggugcuugaucugaagaacuacaucgacaaacaacuccugccgauucugaauaagcagucuuguuccauccccaacauugaaacagucaucgaguuucagcagaaaaauaaccggcuccuggaaaucacccgcgaguucagcgugaaugccggcgugacgacaccugucucuaccuauaugcuuacaaacuccgagcugcucagccugauuaacgauaugcccaucaccaaugaccaaaagaaacuuauguccaacaauguucagauugugagacagcagucuuacagcaucaugugcauuaucaaggaagaggugcuggcuuaugucgugcaacucccucuguacggcguuaucgauacccccuguuggaaacugcauacauccccucucugcacgaccaacacaaaggaagggagcaauauuugucugacccggacagaccgcggaugguacugcgauaacgccggcucuguguccuuuuucccgcaggcggagaccuguaagguccagagcaauagaguguuuugcgacacgaugaacucucuuacacugcccagcgaaguuaaucucugcaacaucgauauuuucaauccuaaauaugacuguaagaucaugaccuccaaaaccgaugugucuagcuccgucauuacaagccugggggccaucgugucuugcuacggaaagaccaaauguacagcuuccaacaagaaucggggcaucauuaagacguuuagcaacgggugcgacuaugucucuaauaaaggaguggacaccguuuccgugggcaacacacuuuacugugucaacaagcaagagggccagagccuguaugugaaaggggagcccaucauuaauuucuacgauccucucguuuuucccuccgacgaguucgaugccucuaucagccaggugaacgaaaagauuaaucagucccuggcuuuuauccgcaaaucugacgaacugcuccacaacgucaaugugggaaagagcaccacaaacauuaugaucaccacgaucauuaucgugauuaucguuauucugcuucugcucaucgccgucggccuguuccuguauugcaaggccagauccaccccggugacacuuagcaaagaucaacucucugggaucaauaacauugcuuucuccaauugaggacuaguguccaccugucccuccugggcugcuggauugucucguuuuccugccaaauaaacaggaucagcgcuuuacagaucuaaaaaaaaaaaaaaaaaaaaaaaaaaaaaaaaaaaaaaaaaaaaaaaaaaaaaaaaaaaaaaaaugcaucccccccccccccccccccccccccccccccaaaggcucuuuucagagccaccagaauu

SEQ ID NO: 14885 - RNA, 1910 nt, Artificial Sequence
  mRNA product Design e-5 comprising derived and/or modified sequence from HRSV(Memphis-37)__AIY60640.1__F_DSCav1_mut2 (opt6)
gggagagcggcucggccauuuugucccagucaguccggaggcugcggcugcagaaguaccgccugcggaguaacugcaaagaagcuuaccauggagcuuccaauauuaaaaacaaacgcuauaacaacuauacucgcagcaguuacacucugcuucgcauccucacaaaacauaacugaagaauuuuaccaauccacuugcucagccguaucaaaaggauaucuaggagcacuuagaaccggaugguauacaucagugauaacaauagaacuaagcaacauaaaagaaaacaagugcaacggaacugacgcaaaagucaaacuaaucaaacaagaacuagacaaauacaaaaacgcaguaacagaccuacaauuacuaaugcaaucaacaccagcagcaggaucagguucagccauaugcucagguaucgcuguaugcaaaguccuucaccuagaaggugaaguaaacaaaauuaaaaacgcccuacucaguacaaauaaagcugucguaaguuuaucaaacggaguaucaguccuuacauucaaaguauuagaccuaaaaaauuauauagacaaacaauuacuaccaauacucaacaaacaaucaugcucaauaccaaauauagaaaccguaauagaauuucagcaaaaaaauaacagauuacuagaaauaaccagagaauuuucagucaacgcaggagucacaacacccgucucaaccuacaugcuaaccaacucagaacuucuaucucuuaucaacgacaugcccauaaccaaugaucaaaaaaaauuaaugucuaauaacguucaaauaguaagacaacaaucauacucaauaaugugcauaaucaaagaagaaguauuagcauacguaguacaacuaccccuauauggaguaauagacacacccugcuggaaacuacacacauccccccucuguacaacaaacacuaaagaaggaucaaacauuugccuaacaagaacagaccgcggaugguacugcgacaacgcaggcuccguaucuuucuuuccacaagccgaaacuuguaaaguucaaucaaacagaguauuuugcgauacaaugaacuccuuaacauuaccuucagaaguaaaccuaugcaacauagacaucuucaacccaaaauacgacugcaaaauaaugaccucaaaaacagacguauccucaucagucauaaccuccuuaggagcaauaguaucauguuacggaaaaacaaaauguacagcaucaaauaaaaauagaggaauaauaaaaaccuucuccaacggaugcgacuacguauccaauaaaggaguagacaccguaucaguaggaaacacacuauacuguguaaacaaacaagaaggccaaucucuauauguaaaaggcgaaccaaucauaaauuuuuacgacccacuugucuuccccuccgacgaauuugacgcaagcauaucacaaguaaacgaaaaaaucaaccaaagccuagccuucauaaggaaaucugacgaauuacuucauaacguaaauguuggaaaaucaaccacaaacauaaugauaaccaccaucauaauuguaauaauaguaauacuacuacuacuaauugcaguaggacucuuccuauauugcaaagcucgcucaacaccaguuaccuuaucaaaagaccaacuaucuggaauaaacaacauagccuuuuccaacuaaggacuaguguccaccugucccuccugggcugcuggauugucucguuuuccugccaaauaaacaggaucagcgcuuuacagaucuaaaaaaaaaaaaaaaaaaaaaaaaaaaaaaaaaaaaaaaaaaaaaaaaaaaaaaaaaaaaaaaaugcaucccccccccccccccccccccccccccccccaaaggcucuuuucagagccaccagaauu

SEQ ID NO: 14886 - RNA, 1910 nt, Artificial Sequence
  mRNA product Design e-5 comprising derived and/or modified sequence from HRSV(Memphis-37)__AIY60640.1__F_DSCav1_mut2 (opt11)
gggagagcggcucggccauuuugucccagucaguccggaggcugcggcugcagaaguaccgccugcggaguaacugcaaagaagcuuaccauggaacucccaauccuaaaaaccaacgccaucaccaccauccucgccgcugucaccuuaugcuuugccagcagccaaaacaucaccgaagaauuuuaccaaucaacaugcuccgccgucucaaaaggauaccucggcgcccuacgcaccggcugguacacaagcgucauaaccaucgagcucuccaacaucaaggaaaacaaaugcaauggaaccgacgccaaagucaaacuaaucaaacaagaacuagacaaguacaagaacgcagucaccgaccuccaacuccucaugcaguccacccccgcagcaggcucuggcucagcaauaugcuccggcaucgcugucugcaaaguccuacaccucgaaggcgaagucaacaaaaucaaaaacgcccuacuguccacaaacaaagccgucgucucccuauccaacggcgucucgguccuaaccuuuaagguucucgaucucaaaaauuacauagacaaacaacuacuccccauccucaacaaacaaucuugcucaauccccaacaucgaaaccgucaucgaguuccaacagaaaaacaacagacuacucgaaaucacccgcgaguucucagucaacgcgggcgucacaacacccgucagcaccuacaugcuaaccaacuccgaacuccucagccucauuaacgacaugcccaucaccaacgaccaaaagaaacuuauguccaacaacguucaaaucguccgccaacaauccuacuccaucaugugcaucaucaaagaagaaguacucgccuacguaguccaacugccccucuacggcgucaucgauaccccaugcuggaaacuacacaccagcccccucugcaccaccaacaccaaagaaggcuccaauaucugcuuaacccgcacagaccguggcugguacugcgauaacgccggcuccgucuccuucuucccccaagcagaaaccugcaaaguacaauccaaccgagucuucugugacaccaugaacucccuaacccuuccaucagaagucaaccucugcaacaucgacaucuucaaccccaaguacgacugcaaaaucaugacauccaaaaccgaugucucaagcagcgucauaaccucacucggcgcuaucguaagcugcuacggcaaaaccaaaugcaccgcaucaaacaaaaaccgcggaaucaucaaaaccuucagcaacggaugcgacuacguuuccaacaaaggcguagacaccgucuccgucggaaacacccucuacugcguaaacaaacaggaaggccaaucccucuacgucaaaggcgaacccaucauaaacuucuacgauccccuugucuucccguccgaugaguucgacgccuccaucucgcaagucaacgaaaagauaaaccaaucacuagcauucauccguaaauccgacgaacuccuccacaacgucaacgucggaaaauccaccaccaacauaaugaucaccaccauaaucaucgucaucaucguaauacuauuacuccucauagccgucggccucuuccuauauugcaaagcccgaucaacccccguaacccuuucuaaagaccaacuguccggaaucaacaacaucgcuuucagcaacugaggacuaguguccaccugucccuccugggcugcuggauugucucguuuuccugccaaauaaacaggaucagcgcuuuacagaucuaaaaaaaaaaaaaaaaaaaaaaaaaaaaaaaaaaaaaaaaaaaaaaaaaaaaaaaaaaaaaaaaugcaucccccccccccccccccccccccccccccccaaaggcucuuuucagagccaccagaauu

SEQ ID NO: 14887 - RNA, 1977 nt, Artificial Sequence
  mRNA product Design e-6 comprising derived and/or modified sequence from HRSV(Memphis-37)__AIY60640.1__F_DSCav1_mut2 (opt1)
gggagagcggcucggccauuuugucccagucaguccggaggcugcggcugcagaaguaccgccugcggaguaacugcaaagaagcuuaccauggagcugcccauccucaagaccaacgccaucaccacgauccuggccgcggugacccugugcuucgccagcucccagaacaucaccgaggaguucuaccagagcacgugcuccgccgucagcaagggcuaccucggcgcccugcgcaccgggugguacaccagcgugaucaccaucgagcuguccaacaucaaggagaacaagugcaacggcaccgacgccaaggugaagcucaucaagcaggagcuggacaaguacaagaacgcggucacggaccugcagcuccugaugcagagcaccccggccgccggcuccgggagcgcgaucugcuccggcaucgccgucugcaaggugcugcaccucgagggcgaggugaacaagaucaagaacgcccugcuguccaccaacaaggccgucgugagccucuccaacggggugagcguccugaccuucaaggugcuggaccucaagaacuacaucgacaagcagcugcugcccauccugaacaagcagagcugcuccauccccaacaucgagaccgucaucgaguuccagcagaagaacaaccgccuccuggagaucacgcgggaguucagcgugaacgcgggcgugaccacccccgucuccaccuacaugcugacgaacagcgagcuccugucccugaucaacgacaugccgaucaccaacgaccagaagaagcucaugagcaacaacgugcagaucgugcgccagcaguccuacagcaucaugugcaucaucaaggaggagguccuggccuacguggugcagcugccccucuacggggucaucgacacccccugcuggaagcugcacaccagcccccugugcacgaccaacaccaaggagggcuccaacaucugccucacccggacggaccgcgggugguacugcgacaacgccggcagcguguccuucuucccgcaggccgagaccugcaagguccagagcaaccggguguucugcgacaccaugaacucccugacccugcccagcgaggugaaccucugcaacaucgacaucuucaaccccaaguacgacugcaagaucaugacguccaagaccgacgucagcuccagcgugaucaccucccugggcgccaucgugagcugcuacgggaagaccaagugcacggcgagcaacaagaaccgcggcaucaucaagaccuucuccaacgggugcgacuacgucagcaacaagggcguggacaccguguccgucggcaacacccuguacugcgugaacaagcaggagggccagagccucuacgugaagggggagcccaucaucaacuucuacgacccgcuggucuuccccuccgacgaguucgacgccagcaucucccaggugaacgagaagaucaaccagagccuggccuucauccggaaguccgacgagcuccugcacaacgugaacgucggcaagagcaccacgaacaucaugaucaccaccaucaucaucgugaucaucgugauccugcugcuccugaucgccgucgggcuguuccucuacugcaaggcccgcuccacccccgugacgcugagcaaggaccagcuguccgggaucaacaacaucgcguucagcaacugaggacuaguacuggcugcaucucccuuuccucuguccuccauccuucucccaggauggugaagggggaccugguacccagugauccccaccccaggauccuaaaucaugacuuaccugcuaauaaaaacucauuggaaaagugagaagaucuaaaaaaaaaaaaaaaaaaaaaaaaaaaaaaaaaaaaaaaaaaaaaaaaaaaaaaaaaaaaaaaaugcaucccccccccccccccccccccccccccccccaaaggcucuuuucagagccaccagaauu

SEQ ID NO: 14888 - RNA, 1977 nt, Artificial Sequence
  mRNA product Design e-6 comprising derived and/or modified sequence from HRSV(Memphis-37)__AIY60640.1__F_DSCav1_mut2 (opt1)
gggagagcggcucggccauuuugucccagucaguccggaggcugcggcugcagaaguaccgccugcggaguaacugcaaagaagcuuaccauggagcugcccauccucaagaccaacgccaucaccacgauccuggccgcggugacccugugcuucgccagcucccagaacaucaccgaggaguucuaccagagcacgugcuccgccgucagcaagggcuaccucggggcccugcgcaccggcugguacaccuccgugaucaccaucgagcugagcaacaucaaggagaacaagugcaacgggaccgacgccaaggugaagcucaucaagcaggagcuggacaaguacaagaacgcggucacggaccugcagcuccugaugcaguccaccccggccgccggcagcggguccgccaucugcagcggcaucgcggugugcaaggugcugcaccucgagggcgaggucaacaagaucaagaacgcccugcuguccaccaacaaggccguggugagccucuccaacggggucagcgugcugaccuucaaggugcuggaccucaagaacuacaucgacaagcagcugcugcccauccucaacaagcaguccugcagcauccccaacaucgagacggucaucgaguuccagcagaagaacaaccggcugcuggagaucacccgcgaguucuccgugaacgccggcgugaccacccccgucagcacguacaugcucaccaacuccgagcugcugagccucaucaacgacaugccgaucaccaacgaccagaagaagcugaugagcaacaacgugcagaucgugcggcagcaguccuacagcaucaugugcaucaucaaggaggagguccuggccuacguggugcagcucccccuguacggggucaucgacacccccugcuggaagcugcacacgagcccccucugcaccaccaacaccaaggagggcuccaacaucugccugacgcgcaccgaccgggggugguacugcgacaacgcgggcuccgugagcuucuucccgcaggccgagaccugcaaggugcaguccaaccgcgucuucugcgacaccaugaacagccugacgcuccccuccgaggugaaccugugcaacaucgacaucuucaaccccaaguacgacugcaagaucaugaccagcaagaccgacgucuccagcuccgugaucaccagccugggcgccaucguguccugcuacgggaagacgaagugcaccgccagcaacaagaaccggggcaucaucaagaccuucuccaacgggugcgacuacgucagcaacaagggcguggacaccguguccgucggcaacacgcucuacugcgugaacaagcaggaggggcagagccuguacgugaagggcgagcccaucaucaacuucuacgacccgcuggucuuccccagcgacgaguucgacgccuccaucagccaggugaacgagaagaucaaccagucccucgcguucauccgcaagagcgacgagcugcugcacaacgugaacgucgggaaguccaccaccaacaucaugaucaccaccaucaucaucgugaucaucgugauccuccugcugcucaucgccgucggccuguuccuguacugcaaggcccggagcacgcccgugacccuguccaaggaccagcucagcgggaucaacaacaucgccuucuccaacugaggacuaguacuggcugcaucucccuuuccucuguccuccauccuucucccaggauggugaagggggaccugguacccagugauccccaccccaggauccuaaaucaugacuuaccugcuaauaaaaacucauuggaaaagugagaagaucuaaaaaaaaaaaaaaaaaaaaaaaaaaaaaaaaaaaaaaaaaaaaaaaaaaaaaaaaaaaaaaaaugcaucccccccccccccccccccccccccccccccaaaggcucuuuucagagccaccagaauu

SEQ ID NO: 14889 - RNA, 1977 nt, Artificial Sequence
  mRNA product Design e-6 comprising derived and/or modified sequence from HRSV(Memphis-37)__AIY60640.1__F_DSCav1_mut2 (opt2)
gggagagcggcucggccauuuugucccagucaguccggaggcugcggcugcagaaguaccgccugcggaguaacugcaaagaagcuuaccauggagcuccccauccucaagaccaacgccaucaccaccauccucgccgccgucacccucugcuucgccuccucccagaacaucaccgaggaguucuaccaguccaccugcuccgccgucuccaagggcuaccucggcgcccuccgcaccggcugguacaccuccgucaucaccaucgagcucuccaacaucaaggagaacaagugcaacggcaccgacgccaaggucaagcucaucaagcaggagcucgacaaguacaagaacgccgucaccgaccuccagcuccucaugcaguccacccccgccgccggcuccggcuccgccaucugcuccggcaucgccgucugcaagguccuccaccucgagggcgaggucaacaagaucaagaacgcccuccucuccaccaacaaggccgucgucucccucuccaacggcgucuccguccucaccuucaagguccucgaccucaagaacuacaucgacaagcagcuccuccccauccucaacaagcaguccugcuccauccccaacaucgagaccgucaucgaguuccagcagaagaacaaccgccuccucgagaucacccgcgaguucuccgucaacgccggcgucaccacccccgucuccaccuacaugcucaccaacuccgagcuccucucccucaucaacgacaugcccaucaccaacgaccagaagaagcucauguccaacaacguccagaucguccgccagcaguccuacuccaucaugugcaucaucaaggaggagguccucgccuacgucguccagcucccccucuacggcgucaucgacacccccugcuggaagcuccacaccuccccccucugcaccaccaacaccaaggagggcuccaacaucugccucacccgcaccgaccgcggcugguacugcgacaacgccggcuccgucuccuucuucccccaggccgagaccugcaagguccaguccaaccgcgucuucugcgacaccaugaacucccucacccuccccuccgaggucaaccucugcaacaucgacaucuucaaccccaaguacgacugcaagaucaugaccuccaagaccgacgucuccuccuccgucaucaccucccucggcgccaucgucuccugcuacggcaagaccaagugcaccgccuccaacaagaaccgcggcaucaucaagaccuucuccaacggcugcgacuacgucuccaacaagggcgucgacaccgucuccgucggcaacacccucuacugcgucaacaagcaggagggccagucccucuacgucaagggcgagcccaucaucaacuucuacgacccccucgucuuccccuccgacgaguucgacgccuccaucucccaggucaacgagaagaucaaccagucccucgccuucauccgcaaguccgacgagcuccuccacaacgucaacgucggcaaguccaccaccaacaucaugaucaccaccaucaucaucgucaucaucgucauccuccuccuccucaucgccgucggccucuuccucuacugcaaggcccgcuccacccccgucacccucuccaaggaccagcucuccggcaucaacaacaucgccuucuccaacugaggacuaguacuggcugcaucucccuuuccucuguccuccauccuucucccaggauggugaagggggaccugguacccagugauccccaccccaggauccuaaaucaugacuuaccugcuaauaaaaacucauuggaaaagugagaagaucuaaaaaaaaaaaaaaaaaaaaaaaaaaaaaaaaaaaaaaaaaaaaaaaaaaaaaaaaaaaaaaaaugcaucccccccccccccccccccccccccccccccaaaggcucuuuucagagccaccagaauu

SEQ ID NO: 14890 - RNA, 1977 nt, Artificial Sequence
  mRNA product Design e-6 comprising derived and/or modified sequence from HRSV(Memphis-37)__AIY60640.1__F_DSCav1_mut2 (opt3)
gggagagcggcucggccauuuugucccagucaguccggaggcugcggcugcagaaguaccgccugcggaguaacugcaaagaagcuuaccauggagcugcccauccucaagaccaacgccauuacaacuauacuugcugcagugacgcugugcuucgccagcucccagaauaucaccgaagaguuuuaccaaucuacauguucagcggucaguaaaggcuauuugggggcuuuaagaacuggaugguacaccagcguuauuacaaucgaacuguccaacauuaaggagaauaaaugcaacgguaccgacgccaaggugaaacuaaucaagcaggaacucgauaaguauaaaaaugcaguaacugaccugcagcuucugaugcagucuacuccugccgcuggcucggggucagcaauauguagcggaaucgccgugugcaaggucuugcaccucgagggcgaggugaacaaaauuaagaaugcucugcugaguaccaacaaagccguugugucccucucuaauggugucagcguguuaacguucaagguacuggaucuuaagaacuacaucgacaaacaauugcugccaauucuaaauaagcaguccuguucaaucccgaacauagaaacuguuauugaguuucagcagaaaaauaacaggcuccuggaaaucacccgggaguucagugugaaugcgggggucacaacucccgugagcaccuauaugcuuacaaacucugagcuguugucccucauuaacgauaugccuaucaccaaugaccaaaagaaacugaugucaaacaaugugcagaucguccgccagcagagcuacaguauuaugugcauaaucaaggaagagguuuuagcauaugugguacaacugccacucuacggagugauugauacgcccuguuggaaacuucauacuucuccucugugcacaaccaacacuaaggaaggcuccaauaucuguuugacacgaaccgaccguggcugguacugcgauaacgccgggagcgucucguuuuucccacaggcugagacguguaaggugcagucuaauagaguuuucugcgacaccaugaacucccuaacacugcccucagaagugaaucucugcaacauagauauuuucaauccuaaauaugacuguaagaucaugacaaguaaaaccgaugucagcuccucugugaucacaagccugggagccauuguaucaugcuacgguaagacuaaauguaccgcaaguaacaagaauaggggcaucauuaagacauuuuccaacgggugcgacuauguuagcaauaaaggaguggacaccgucucugugggcaacacucuuuacugugucaacaagcaagagggucagucacuguaugugaaaggggagccaauaaucaauuucuacgauccguugguuuuucccagugacgaauuugaugcuagcauuucccaggugaacgagaagaucaaucagucucucgccuuuauccggaaaucggacgaacuguuacacaacguaaaugucggaaagagcacgacaaacauuaugauaaccacuaucauuaucgugauuaucguuauacugcuacuccugaucgcggugggccuuuucuuguauugcaaggcccgcuccaccccugucacacugucaaaagaucaacucaguggcauuaauaacaucgcauucucuaauugaggacuaguacuggcugcaucucccuuuccucuguccuccauccuucucccaggauggugaagggggaccugguacccagugauccccaccccaggauccuaaaucaugacuuaccugcuaauaaaaacucauuggaaaagugagaagaucuaaaaaaaaaaaaaaaaaaaaaaaaaaaaaaaaaaaaaaaaaaaaaaaaaaaaaaaaaaaaaaaaugcaucccccccccccccccccccccccccccccccaaaggcucuuuucagagccaccagaauu

SEQ ID NO: 14891 - RNA, 1977 nt, Artificial Sequence
  mRNA product Design e-6 comprising derived and/or modified sequence from HRSV(Memphis-37)__AIY60640.1__F_DSCav1_mut2 (opt4)
gggagagcggcucggccauuuugucccagucaguccggaggcugcggcugcagaaguaccgccugcggaguaacugcaaagaagcuuaccauggagcugcccauccugaagaccaacgccaucaccaccauccuggccgccgugacccugugcuucgccagcagccagaacaucaccgaggaguucuaccagagcaccugcagcgccgugagcaagggcuaccugggcgcccugagaaccggcugguacaccagcgugaucaccaucgagcugagcaacaucaaggagaacaagugcaacggcaccgacgccaaggugaagcugaucaagcaggagcuggacaaguacaagaacgccgugaccgaccugcagcugcugaugcagagcacccccgccgccggcagcggcagcgccaucugcagcggcaucgccgugugcaaggugcugcaccuggagggcgaggugaacaagaucaagaacgcccugcugagcaccaacaaggccguggugagccugagcaacggcgugagcgugcugaccuucaaggugcuggaccugaagaacuacaucgacaagcagcugcugcccauccugaacaagcagagcugcagcauccccaacaucgagaccgugaucgaguuccagcagaagaacaacagacugcuggagaucaccagagaguucagcgugaacgccggcgugaccacccccgugagcaccuacaugcugaccaacagcgagcugcugagccugaucaacgacaugcccaucaccaacgaccagaagaagcugaugagcaacaacgugcagaucgugagacagcagagcuacagcaucaugugcaucaucaaggaggaggugcuggccuacguggugcagcugccccuguacggcgugaucgacacccccugcuggaagcugcacaccagcccccugugcaccaccaacaccaaggagggcagcaacaucugccugaccagaaccgacagaggcugguacugcgacaacgccggcagcgugagcuucuucccccaggccgagaccugcaaggugcagagcaacagaguguucugcgacaccaugaacagccugacccugcccagcgaggugaaccugugcaacaucgacaucuucaaccccaaguacgacugcaagaucaugaccagcaagaccgacgugagcagcagcgugaucaccagccugggcgccaucgugagcugcuacggcaagaccaagugcaccgccagcaacaagaacagaggcaucaucaagaccuucagcaacggcugcgacuacgugagcaacaagggcguggacaccgugagcgugggcaacacccuguacugcgugaacaagcaggagggccagagccuguacgugaagggcgagcccaucaucaacuucuacgacccccugguguuccccagcgacgaguucgacgccagcaucagccaggugaacgagaagaucaaccagagccuggccuucaucagaaagagcgacgagcugcugcacaacgugaacgugggcaagagcaccaccaacaucaugaucaccaccaucaucaucgugaucaucgugauccugcugcugcugaucgccgugggccuguuccuguacugcaaggccagaagcacccccgugacccugagcaaggaccagcugagcggcaucaacaacaucgccuucagcaacugaggacuaguacuggcugcaucucccuuuccucuguccuccauccuucucccaggauggugaagggggaccugguacccagugauccccaccccaggauccuaaaucaugacuuaccugcuaauaaaaacucauuggaaaagugagaagaucuaaaaaaaaaaaaaaaaaaaaaaaaaaaaaaaaaaaaaaaaaaaaaaaaaaaaaaaaaaaaaaaaugcaucccccccccccccccccccccccccccccccaaaggcucuuuucagagccaccagaauu

SEQ ID NO: 14892 - RNA, 1977 nt, Artificial Sequence
  mRNA product Design e-6 comprising derived and/or modified sequence from HRSV(Memphis-37)__AIY60640.1__F_DSCav1_mut2 (opt5)
gggagagcggcucggccauuuugucccagucaguccggaggcugcggcugcagaaguaccgccugcggaguaacugcaaagaagcuuaccauggagcugcccauccucaagaccaacgccauuacaacgauccuggcugccgugacccuuugcuucgcgagcucccagaauauuacagaagaguuuuaccaaucuaccuguagcgcugucuccaaaggcuaucugggggcccucagaacaggaugguacaccucuguuaucacaauugaacugagcaacaucaaggagaauaaaugcaacggcaccgacgccaaggugaaacuuaucaagcaggaacuggauaaguauaaaaaugcugugacggaccuccagcugcugaugcaguccaccccugccgcugggucuggaagcgccauuuguuccggcaucgcggucugcaaggugcuccaccuggagggggagguuaacaaaauuaagaaugcccuucugagcacaaacaaagcuguggucucucucuccaauggagugagcguucugaccuucaaggugcuugaucugaagaacuacaucgacaaacaacuccugccgauucugaauaagcagucuuguuccauccccaacauugaaacagucaucgaguuucagcagaaaaauaaccggcuccuggaaaucacccgcgaguucagcgugaaugccggcgugacgacaccugucucuaccuauaugcuuacaaacuccgagcugcucagccugauuaacgauaugcccaucaccaaugaccaaaagaaacuuauguccaacaauguucagauugugagacagcagucuuacagcaucaugugcauuaucaaggaagaggugcuggcuuaugucgugcaacucccucuguacggcguuaucgauacccccuguuggaaacugcauacauccccucucugcacgaccaacacaaaggaagggagcaauauuugucugacccggacagaccgcggaugguacugcgauaacgccggcucuguguccuuuuucccgcaggcggagaccuguaagguccagagcaauagaguguuuugcgacacgaugaacucucuuacacugcccagcgaaguuaaucucugcaacaucgauauuuucaauccuaaauaugacuguaagaucaugaccuccaaaaccgaugugucuagcuccgucauuacaagccugggggccaucgugucuugcuacggaaagaccaaauguacagcuuccaacaagaaucggggcaucauuaagacguuuagcaacgggugcgacuaugucucuaauaaaggaguggacaccguuuccgugggcaacacacuuuacugugucaacaagcaagagggccagagccuguaugugaaaggggagcccaucauuaauuucuacgauccucucguuuuucccuccgacgaguucgaugccucuaucagccaggugaacgaaaagauuaaucagucccuggcuuuuauccgcaaaucugacgaacugcuccacaacgucaaugugggaaagagcaccacaaacauuaugaucaccacgaucauuaucgugauuaucguuauucugcuucugcucaucgccgucggccuguuccuguauugcaaggccagauccaccccggugacacuuagcaaagaucaacucucugggaucaauaacauugcuuucuccaauugaggacuaguacuggcugcaucucccuuuccucuguccuccauccuucucccaggauggugaagggggaccugguacccagugauccccaccccaggauccuaaaucaugacuuaccugcuaauaaaaacucauuggaaaagugagaagaucuaaaaaaaaaaaaaaaaaaaaaaaaaaaaaaaaaaaaaaaaaaaaaaaaaaaaaaaaaaaaaaaaugcaucccccccccccccccccccccccccccccccaaaggcucuuuucagagccaccagaauu

SEQ ID NO: 14893 - RNA, 1977 nt, Artificial Sequence
  mRNA product Design e-6 comprising derived and/or modified sequence from HRSV(Memphis-37)__AIY60640.1__F_DSCav1_mut2 (opt6)
gggagagcggcucggccauuuugucccagucaguccggaggcugcggcugcagaaguaccgccugcggaguaacugcaaagaagcuuaccauggagcuuccaauauuaaaaacaaacgcuauaacaacuauacucgcagcaguuacacucugcuucgcauccucacaaaacauaacugaagaauuuuaccaauccacuugcucagccguaucaaaaggauaucuaggagcacuuagaaccggaugguauacaucagugauaacaauagaacuaagcaacauaaaagaaaacaagugcaacggaacugacgcaaaagucaaacuaaucaaacaagaacuagacaaauacaaaaacgcaguaacagaccuacaauuacuaaugcaaucaacaccagcagcaggaucagguucagccauaugcucagguaucgcuguaugcaaaguccuucaccuagaaggugaaguaaacaaaauuaaaaacgcccuacucaguacaaauaaagcugucguaaguuuaucaaacggaguaucaguccuuacauucaaaguauuagaccuaaaaaauuauauagacaaacaauuacuaccaauacucaacaaacaaucaugcucaauaccaaauauagaaaccguaauagaauuucagcaaaaaaauaacagauuacuagaaauaaccagagaauuuucagucaacgcaggagucacaacacccgucucaaccuacaugcuaaccaacucagaacuucuaucucuuaucaacgacaugcccauaaccaaugaucaaaaaaaauuaaugucuaauaacguucaaauaguaagacaacaaucauacucaauaaugugcauaaucaaagaagaaguauuagcauacguaguacaacuaccccuauauggaguaauagacacacccugcuggaaacuacacacauccccccucuguacaacaaacacuaaagaaggaucaaacauuugccuaacaagaacagaccgcggaugguacugcgacaacgcaggcuccguaucuuucuuuccacaagccgaaacuuguaaaguucaaucaaacagaguauuuugcgauacaaugaacuccuuaacauuaccuucagaaguaaaccuaugcaacauagacaucuucaacccaaaauacgacugcaaaauaaugaccucaaaaacagacguauccucaucagucauaaccuccuuaggagcaauaguaucauguuacggaaaaacaaaauguacagcaucaaauaaaaauagaggaauaauaaaaaccuucuccaacggaugcgacuacguauccaauaaaggaguagacaccguaucaguaggaaacacacuauacuguguaaacaaacaagaaggccaaucucuauauguaaaaggcgaaccaaucauaaauuuuuacgacccacuugucuuccccuccgacgaauuugacgcaagcauaucacaaguaaacgaaaaaaucaaccaaagccuagccuucauaaggaaaucugacgaauuacuucauaacguaaauguuggaaaaucaaccacaaacauaaugauaaccaccaucauaauuguaauaauaguaauacuacuacuacuaauugcaguaggacucuuccuauauugcaaagcucgcucaacaccaguuaccuuaucaaaagaccaacuaucuggaauaaacaacauagccuuuuccaacuaaggacuaguacuggcugcaucucccuuuccucuguccuccauccuucucccaggauggugaagggggaccugguacccagugauccccaccccaggauccuaaaucaugacuuaccugcuaauaaaaacucauuggaaaagugagaagaucuaaaaaaaaaaaaaaaaaaaaaaaaaaaaaaaaaaaaaaaaaaaaaaaaaaaaaaaaaaaaaaaaugcaucccccccccccccccccccccccccccccccaaaggcucuuuucagagccaccagaauu

SEQ ID NO: 14894 - RNA, 1977 nt, Artificial Sequence
  mRNA product Design e-6 comprising derived and/or modified sequence from HRSV(Memphis-37)__AIY60640.1__F_DSCav1_mut2 (opt11)
gggagagcggcucggccauuuugucccagucaguccggaggcugcggcugcagaaguaccgccugcggaguaacugcaaagaagcuuaccauggaacucccaauccuaaaaaccaacgccaucaccaccauccucgccgcugucaccuuaugcuuugccagcagccaaaacaucaccgaagaauuuuaccaaucaacaugcuccgccgucucaaaaggauaccucggcgcccuacgcaccggcugguacacaagcgucauaaccaucgagcucuccaacaucaaggaaaacaaaugcaauggaaccgacgccaaagucaaacuaaucaaacaagaacuagacaaguacaagaacgcagucaccgaccuccaacuccucaugcaguccacccccgcagcaggcucuggcucagcaauaugcuccggcaucgcugucugcaaaguccuacaccucgaaggcgaagucaacaaaaucaaaaacgcccuacuguccacaaacaaagccgucgucucccuauccaacggcgucucgguccuaaccuuuaagguucucgaucucaaaaauuacauagacaaacaacuacuccccauccucaacaaacaaucuugcucaauccccaacaucgaaaccgucaucgaguuccaacagaaaaacaacagacuacucgaaaucacccgcgaguucucagucaacgcgggcgucacaacacccgucagcaccuacaugcuaaccaacuccgaacuccucagccucauuaacgacaugcccaucaccaacgaccaaaagaaacuuauguccaacaacguucaaaucguccgccaacaauccuacuccaucaugugcaucaucaaagaagaaguacucgccuacguaguccaacugccccucuacggcgucaucgauaccccaugcuggaaacuacacaccagcccccucugcaccaccaacaccaaagaaggcuccaauaucugcuuaacccgcacagaccguggcugguacugcgauaacgccggcuccgucuccuucuucccccaagcagaaaccugcaaaguacaauccaaccgagucuucugugacaccaugaacucccuaacccuuccaucagaagucaaccucugcaacaucgacaucuucaaccccaaguacgacugcaaaaucaugacauccaaaaccgaugucucaagcagcgucauaaccucacucggcgcuaucguaagcugcuacggcaaaaccaaaugcaccgcaucaaacaaaaaccgcggaaucaucaaaaccuucagcaacggaugcgacuacguuuccaacaaaggcguagacaccgucuccgucggaaacacccucuacugcguaaacaaacaggaaggccaaucccucuacgucaaaggcgaacccaucauaaacuucuacgauccccuugucuucccguccgaugaguucgacgccuccaucucgcaagucaacgaaaagauaaaccaaucacuagcauucauccguaaauccgacgaacuccuccacaacgucaacgucggaaaauccaccaccaacauaaugaucaccaccauaaucaucgucaucaucguaauacuauuacuccucauagccgucggccucuuccuauauugcaaagcccgaucaacccccguaacccuuucuaaagaccaacuguccggaaucaacaacaucgcuuucagcaacugaggacuaguacuggcugcaucucccuuuccucuguccuccauccuucucccaggauggugaagggggaccugguacccagugauccccaccccaggauccuaaaucaugacuuaccugcuaauaaaaacucauuggaaaagugagaagaucuaaaaaaaaaaaaaaaaaaaaaaaaaaaaaaaaaaaaaaaaaaaaaaaaaaaaaaaaaaaaaaaaugcaucccccccccccccccccccccccccccccccaaaggcucuuuucagagccaccagaauu

SEQ ID NO: 14895 - RNA, 2193 nt, Artificial Sequence
  mRNA product Design f-1 comprising derived and/or modified sequence from HRSV(Memphis-37)__AIY60640.1__F_DSCav1_mut2 (opt1)
gggagagcggcucggccauuuugucccagucaguccggaggcugcggcugcagaaguaccgccugcggaguaacugcaaagaagcuuaccauggagcugcccauccucaagaccaacgccaucaccacgauccuggccgcggugacccugugcuucgccagcucccagaacaucaccgaggaguucuaccagagcacgugcuccgccgucagcaagggcuaccucggcgcccugcgcaccgggugguacaccagcgugaucaccaucgagcuguccaacaucaaggagaacaagugcaacggcaccgacgccaaggugaagcucaucaagcaggagcuggacaaguacaagaacgcggucacggaccugcagcuccugaugcagagcaccccggccgccggcuccgggagcgcgaucugcuccggcaucgccgucugcaaggugcugcaccucgagggcgaggugaacaagaucaagaacgcccugcuguccaccaacaaggccgucgugagccucuccaacggggugagcguccugaccuucaaggugcuggaccucaagaacuacaucgacaagcagcugcugcccauccugaacaagcagagcugcuccauccccaacaucgagaccgucaucgaguuccagcagaagaacaaccgccuccuggagaucacgcgggaguucagcgugaacgcgggcgugaccacccccgucuccaccuacaugcugacgaacagcgagcuccugucccugaucaacgacaugccgaucaccaacgaccagaagaagcucaugagcaacaacgugcagaucgugcgccagcaguccuacagcaucaugugcaucaucaaggaggagguccuggccuacguggugcagcugccccucuacggggucaucgacacccccugcuggaagcugcacaccagcccccugugcacgaccaacaccaaggagggcuccaacaucugccucacccggacggaccgcgggugguacugcgacaacgccggcagcguguccuucuucccgcaggccgagaccugcaagguccagagcaaccggguguucugcgacaccaugaacucccugacccugcccagcgaggugaaccucugcaacaucgacaucuucaaccccaaguacgacugcaagaucaugacguccaagaccgacgucagcuccagcgugaucaccucccugggcgccaucgugagcugcuacgggaagaccaagugcacggcgagcaacaagaaccgcggcaucaucaagaccuucuccaacgggugcgacuacgucagcaacaagggcguggacaccguguccgucggcaacacccuguacugcgugaacaagcaggagggccagagccucuacgugaagggggagcccaucaucaacuucuacgacccgcuggucuuccccuccgacgaguucgacgccagcaucucccaggugaacgagaagaucaaccagagccuggccuucauccggaaguccgacgagcuccugcacaacgugaacgucggcaagagcaccacgaacaucaugaucaccaccaucaucaucgugaucaucgugauccugcugcuccugaucgccgucgggcuguuccucuacugcaaggcccgcuccacccccgugacgcugagcaaggaccagcuguccgggaucaacaacaucgcguucagcaacugaggacuagugaagggaacacccaaauuuaauucagccuuaagcacaauuaauuaagagugaaacguaauuguacaagcaguuggucacccaccauagggcaugaucaacaccgcaaccuuuccuuuuucccccagugauucugaaaaaccccucuucccuucagcuugcuuagauguuccaaauuuaguaagcuuaaggcggccuacagaagaaaaagaaaaaaaaggccacaaaaguucccucucacuuucaguaaauaaaauaaaagcagcaacagaaauaaagaaauaaaugaaauucaaaaugaaauaaauauuguguugugcagcauuaaaaaaucaauaaaaauuaaaaaugagcaagaucuaaaaaaaaaaaaaaaaaaaaaaaaaaaaaaaaaaaaaaaaaaaaaaaaaaaaaaaaaaaaaaaaugcaucccccccccccccccccccccccccccccccaaaggcucuuuucagagccaccagaauu

SEQ ID NO: 14896 - RNA, 2193 nt, Artificial Sequence
  mRNA product Design f-1 comprising derived and/or modified sequence from HRSV(Memphis-37)__AIY60640.1__F_DSCav1_mut2 (opt1)
gggagagcggcucggccauuuugucccagucaguccggaggcugcggcugcagaaguaccgccugcggaguaacugcaaagaagcuuaccauggagcugcccauccucaagaccaacgccaucaccacgauccuggccgcggugacccugugcuucgccagcucccagaacaucaccgaggaguucuaccagagcacgugcuccgccgucagcaagggcuaccucggggcccugcgcaccggcugguacaccuccgugaucaccaucgagcugagcaacaucaaggagaacaagugcaacgggaccgacgccaaggugaagcucaucaagcaggagcuggacaaguacaagaacgcggucacggaccugcagcuccugaugcaguccaccccggccgccggcagcggguccgccaucugcagcggcaucgcggugugcaaggugcugcaccucgagggcgaggucaacaagaucaagaacgcccugcuguccaccaacaaggccguggugagccucuccaacggggucagcgugcugaccuucaaggugcuggaccucaagaacuacaucgacaagcagcugcugcccauccucaacaagcaguccugcagcauccccaacaucgagacggucaucgaguuccagcagaagaacaaccggcugcuggagaucacccgcgaguucuccgugaacgccggcgugaccacccccgucagcacguacaugcucaccaacuccgagcugcugagccucaucaacgacaugccgaucaccaacgaccagaagaagcugaugagcaacaacgugcagaucgugcggcagcaguccuacagcaucaugugcaucaucaaggaggagguccuggccuacguggugcagcucccccuguacggggucaucgacacccccugcuggaagcugcacacgagcccccucugcaccaccaacaccaaggagggcuccaacaucugccugacgcgcaccgaccgggggugguacugcgacaacgcgggcuccgugagcuucuucccgcaggccgagaccugcaaggugcaguccaaccgcgucuucugcgacaccaugaacagccugacgcuccccuccgaggugaaccugugcaacaucgacaucuucaaccccaaguacgacugcaagaucaugaccagcaagaccgacgucuccagcuccgugaucaccagccugggcgccaucguguccugcuacgggaagacgaagugcaccgccagcaacaagaaccggggcaucaucaagaccuucuccaacgggugcgacuacgucagcaacaagggcguggacaccguguccgucggcaacacgcucuacugcgugaacaagcaggaggggcagagccuguacgugaagggcgagcccaucaucaacuucuacgacccgcuggucuuccccagcgacgaguucgacgccuccaucagccaggugaacgagaagaucaaccagucccucgcguucauccgcaagagcgacgagcugcugcacaacgugaacgucgggaaguccaccaccaacaucaugaucaccaccaucaucaucgugaucaucgugauccuccugcugcucaucgccgucggccuguuccuguacugcaaggcccggagcacgcccgugacccuguccaaggaccagcucagcgggaucaacaacaucgccuucuccaacugaggacuagugaagggaacacccaaauuuaauucagccuuaagcacaauuaauuaagagugaaacguaauuguacaagcaguuggucacccaccauagggcaugaucaacaccgcaaccuuuccuuuuucccccagugauucugaaaaaccccucuucccuucagcuugcuuagauguuccaaauuuaguaagcuuaaggcggccuacagaagaaaaagaaaaaaaaggccacaaaaguucccucucacuuucaguaaauaaaauaaaagcagcaacagaaauaaagaaauaaaugaaauucaaaaugaaauaaauauuguguugugcagcauuaaaaaaucaauaaaaauuaaaaaugagcaagaucuaaaaaaaaaaaaaaaaaaaaaaaaaaaaaaaaaaaaaaaaaaaaaaaaaaaaaaaaaaaaaaaaugcaucccccccccccccccccccccccccccccccaaaggcucuuuucagagccaccagaauu

SEQ ID NO: 14897 - RNA, 2193 nt, Artificial Sequence
  mRNA product Design f-1 comprising derived and/or modified sequence from HRSV(Memphis-37)__AIY60640.1__F_DSCav1_mut2 (opt2)
gggagagcggcucggccauuuugucccagucaguccggaggcugcggcugcagaaguaccgccugcggaguaacugcaaagaagcuuaccauggagcuccccauccucaagaccaacgccaucaccaccauccucgccgccgucacccucugcuucgccuccucccagaacaucaccgaggaguucuaccaguccaccugcuccgccgucuccaagggcuaccucggcgcccuccgcaccggcugguacaccuccgucaucaccaucgagcucuccaacaucaaggagaacaagugcaacggcaccgacgccaaggucaagcucaucaagcaggagcucgacaaguacaagaacgccgucaccgaccuccagcuccucaugcaguccacccccgccgccggcuccggcuccgccaucugcuccggcaucgccgucugcaagguccuccaccucgagggcgaggucaacaagaucaagaacgcccuccucuccaccaacaaggccgucgucucccucuccaacggcgucuccguccucaccuucaagguccucgaccucaagaacuacaucgacaagcagcuccuccccauccucaacaagcaguccugcuccauccccaacaucgagaccgucaucgaguuccagcagaagaacaaccgccuccucgagaucacccgcgaguucuccgucaacgccggcgucaccacccccgucuccaccuacaugcucaccaacuccgagcuccucucccucaucaacgacaugcccaucaccaacgaccagaagaagcucauguccaacaacguccagaucguccgccagcaguccuacuccaucaugugcaucaucaaggaggagguccucgccuacgucguccagcucccccucuacggcgucaucgacacccccugcuggaagcuccacaccuccccccucugcaccaccaacaccaaggagggcuccaacaucugccucacccgcaccgaccgcggcugguacugcgacaacgccggcuccgucuccuucuucccccaggccgagaccugcaagguccaguccaaccgcgucuucugcgacaccaugaacucccucacccuccccuccgaggucaaccucugcaacaucgacaucuucaaccccaaguacgacugcaagaucaugaccuccaagaccgacgucuccuccuccgucaucaccucccucggcgccaucgucuccugcuacggcaagaccaagugcaccgccuccaacaagaaccgcggcaucaucaagaccuucuccaacggcugcgacuacgucuccaacaagggcgucgacaccgucuccgucggcaacacccucuacugcgucaacaagcaggagggccagucccucuacgucaagggcgagcccaucaucaacuucuacgacccccucgucuuccccuccgacgaguucgacgccuccaucucccaggucaacgagaagaucaaccagucccucgccuucauccgcaaguccgacgagcuccuccacaacgucaacgucggcaaguccaccaccaacaucaugaucaccaccaucaucaucgucaucaucgucauccuccuccuccucaucgccgucggccucuuccucuacugcaaggcccgcuccacccccgucacccucuccaaggaccagcucuccggcaucaacaacaucgccuucuccaacugaggacuagugaagggaacacccaaauuuaauucagccuuaagcacaauuaauuaagagugaaacguaauuguacaagcaguuggucacccaccauagggcaugaucaacaccgcaaccuuuccuuuuucccccagugauucugaaaaaccccucuucccuucagcuugcuuagauguuccaaauuuaguaagcuuaaggcggccuacagaagaaaaagaaaaaaaaggccacaaaaguucccucucacuuucaguaaauaaaauaaaagcagcaacagaaauaaagaaauaaaugaaauucaaaaugaaauaaauauuguguugugcagcauuaaaaaaucaauaaaaauuaaaaaugagcaagaucuaaaaaaaaaaaaaaaaaaaaaaaaaaaaaaaaaaaaaaaaaaaaaaaaaaaaaaaaaaaaaaaaugcaucccccccccccccccccccccccccccccccaaaggcucuuuucagagccaccagaauu

SEQ ID NO: 14898 - RNA, 2193 nt, Artificial Sequence
  mRNA product Design f-1 comprising derived and/or modified sequence from HRSV(Memphis-37)__AIY60640.1__F_DSCav1_mut2 (opt3)
gggagagcggcucggccauuuugucccagucaguccggaggcugcggcugcagaaguaccgccugcggaguaacugcaaagaagcuuaccauggagcugcccauccucaagaccaacgccauuacaacuauacuugcugcagugacgcugugcuucgccagcucccagaauaucaccgaagaguuuuaccaaucuacauguucagcggucaguaaaggcuauuugggggcuuuaagaacuggaugguacaccagcguuauuacaaucgaacuguccaacauuaaggagaauaaaugcaacgguaccgacgccaaggugaaacuaaucaagcaggaacucgauaaguauaaaaaugcaguaacugaccugcagcuucugaugcagucuacuccugccgcuggcucggggucagcaauauguagcggaaucgccgugugcaaggucuugcaccucgagggcgaggugaacaaaauuaagaaugcucugcugaguaccaacaaagccguugugucccucucuaauggugucagcguguuaacguucaagguacuggaucuuaagaacuacaucgacaaacaauugcugccaauucuaaauaagcaguccuguucaaucccgaacauagaaacuguuauugaguuucagcagaaaaauaacaggcuccuggaaaucacccgggaguucagugugaaugcgggggucacaacucccgugagcaccuauaugcuuacaaacucugagcuguugucccucauuaacgauaugccuaucaccaaugaccaaaagaaacugaugucaaacaaugugcagaucguccgccagcagagcuacaguauuaugugcauaaucaaggaagagguuuuagcauaugugguacaacugccacucuacggagugauugauacgcccuguuggaaacuucauacuucuccucugugcacaaccaacacuaaggaaggcuccaauaucuguuugacacgaaccgaccguggcugguacugcgauaacgccgggagcgucucguuuuucccacaggcugagacguguaaggugcagucuaauagaguuuucugcgacaccaugaacucccuaacacugcccucagaagugaaucucugcaacauagauauuuucaauccuaaauaugacuguaagaucaugacaaguaaaaccgaugucagcuccucugugaucacaagccugggagccauuguaucaugcuacgguaagacuaaauguaccgcaaguaacaagaauaggggcaucauuaagacauuuuccaacgggugcgacuauguuagcaauaaaggaguggacaccgucucugugggcaacacucuuuacugugucaacaagcaagagggucagucacuguaugugaaaggggagccaauaaucaauuucuacgauccguugguuuuucccagugacgaauuugaugcuagcauuucccaggugaacgagaagaucaaucagucucucgccuuuauccggaaaucggacgaacuguuacacaacguaaaugucggaaagagcacgacaaacauuaugauaaccacuaucauuaucgugauuaucguuauacugcuacuccugaucgcggugggccuuuucuuguauugcaaggcccgcuccaccccugucacacugucaaaagaucaacucaguggcauuaauaacaucgcauucucuaauugaggacuagugaagggaacacccaaauuuaauucagccuuaagcacaauuaauuaagagugaaacguaauuguacaagcaguuggucacccaccauagggcaugaucaacaccgcaaccuuuccuuuuucccccagugauucugaaaaaccccucuucccuucagcuugcuuagauguuccaaauuuaguaagcuuaaggcggccuacagaagaaaaagaaaaaaaaggccacaaaaguucccucucacuuucaguaaauaaaauaaaagcagcaacagaaauaaagaaauaaaugaaauucaaaaugaaauaaauauuguguugugcagcauuaaaaaaucaauaaaaauuaaaaaugagcaagaucuaaaaaaaaaaaaaaaaaaaaaaaaaaaaaaaaaaaaaaaaaaaaaaaaaaaaaaaaaaaaaaaaugcaucccccccccccccccccccccccccccccccaaaggcucuuuucagagccaccagaauu

SEQ ID NO: 14899 - RNA, 2193 nt, Artificial Sequence
  mRNA product Design f-1 comprising derived and/or modified sequence from HRSV(Memphis-37)__AIY60640.1__F_DSCav1_mut2 (opt4)
gggagagcggcucggccauuuugucccagucaguccggaggcugcggcugcagaaguaccgccugcggaguaacugcaaagaagcuuaccauggagcugcccauccugaagaccaacgccaucaccaccauccuggccgccgugacccugugcuucgccagcagccagaacaucaccgaggaguucuaccagagcaccugcagcgccgugagcaagggcuaccugggcgcccugagaaccggcugguacaccagcgugaucaccaucgagcugagcaacaucaaggagaacaagugcaacggcaccgacgccaaggugaagcugaucaagcaggagcuggacaaguacaagaacgccgugaccgaccugcagcugcugaugcagagcacccccgccgccggcagcggcagcgccaucugcagcggcaucgccgugugcaaggugcugcaccuggagggcgaggugaacaagaucaagaacgcccugcugagcaccaacaaggccguggugagccugagcaacggcgugagcgugcugaccuucaaggugcuggaccugaagaacuacaucgacaagcagcugcugcccauccugaacaagcagagcugcagcauccccaacaucgagaccgugaucgaguuccagcagaagaacaacagacugcuggagaucaccagagaguucagcgugaacgccggcgugaccacccccgugagcaccuacaugcugaccaacagcgagcugcugagccugaucaacgacaugcccaucaccaacgaccagaagaagcugaugagcaacaacgugcagaucgugagacagcagagcuacagcaucaugugcaucaucaaggaggaggugcuggccuacguggugcagcugccccuguacggcgugaucgacacccccugcuggaagcugcacaccagcccccugugcaccaccaacaccaaggagggcagcaacaucugccugaccagaaccgacagaggcugguacugcgacaacgccggcagcgugagcuucuucccccaggccgagaccugcaaggugcagagcaacagaguguucugcgacaccaugaacagccugacccugcccagcgaggugaaccugugcaacaucgacaucuucaaccccaaguacgacugcaagaucaugaccagcaagaccgacgugagcagcagcgugaucaccagccugggcgccaucgugagcugcuacggcaagaccaagugcaccgccagcaacaagaacagaggcaucaucaagaccuucagcaacggcugcgacuacgugagcaacaagggcguggacaccgugagcgugggcaacacccuguacugcgugaacaagcaggagggccagagccuguacgugaagggcgagcccaucaucaacuucuacgacccccugguguuccccagcgacgaguucgacgccagcaucagccaggugaacgagaagaucaaccagagccuggccuucaucagaaagagcgacgagcugcugcacaacgugaacgugggcaagagcaccaccaacaucaugaucaccaccaucaucaucgugaucaucgugauccugcugcugcugaucgccgugggccuguuccuguacugcaaggccagaagcacccccgugacccugagcaaggaccagcugagcggcaucaacaacaucgccuucagcaacugaggacuagugaagggaacacccaaauuuaauucagccuuaagcacaauuaauuaagagugaaacguaauuguacaagcaguuggucacccaccauagggcaugaucaacaccgcaaccuuuccuuuuucccccagugauucugaaaaaccccucuucccuucagcuugcuuagauguuccaaauuuaguaagcuuaaggcggccuacagaagaaaaagaaaaaaaaggccacaaaaguucccucucacuuucaguaaauaaaauaaaagcagcaacagaaauaaagaaauaaaugaaauucaaaaugaaauaaauauuguguugugcagcauuaaaaaaucaauaaaaauuaaaaaugagcaagaucuaaaaaaaaaaaaaaaaaaaaaaaaaaaaaaaaaaaaaaaaaaaaaaaaaaaaaaaaaaaaaaaaugcaucccccccccccccccccccccccccccccccaaaggcucuuuucagagccaccagaauu

SEQ ID NO: 14900 - RNA, 2193 nt, Artificial Sequence
  mRNA product Design f-1 comprising derived and/or modified sequence from HRSV(Memphis-37)__AIY60640.1__F_DSCav1_mut2 (opt5)
gggagagcggcucggccauuuugucccagucaguccggaggcugcggcugcagaaguaccgccugcggaguaacugcaaagaagcuuaccauggagcugcccauccucaagaccaacgccauuacaacgauccuggcugccgugacccuuugcuucgcgagcucccagaauauuacagaagaguuuuaccaaucuaccuguagcgcugucuccaaaggcuaucugggggcccucagaacaggaugguacaccucuguuaucacaauugaacugagcaacaucaaggagaauaaaugcaacggcaccgacgccaaggugaaacuuaucaagcaggaacuggauaaguauaaaaaugcugugacggaccuccagcugcugaugcaguccaccccugccgcugggucuggaagcgccauuuguuccggcaucgcggucugcaaggugcuccaccuggagggggagguuaacaaaauuaagaaugcccuucugagcacaaacaaagcuguggucucucucuccaauggagugagcguucugaccuucaaggugcuugaucugaagaacuacaucgacaaacaacuccugccgauucugaauaagcagucuuguuccauccccaacauugaaacagucaucgaguuucagcagaaaaauaaccggcuccuggaaaucacccgcgaguucagcgugaaugccggcgugacgacaccugucucuaccuauaugcuuacaaacuccgagcugcucagccugauuaacgauaugcccaucaccaaugaccaaaagaaacuuauguccaacaauguucagauugugagacagcagucuuacagcaucaugugcauuaucaaggaagaggugcuggcuuaugucgugcaacucccucuguacggcguuaucgauacccccuguuggaaacugcauacauccccucucugcacgaccaacacaaaggaagggagcaauauuugucugacccggacagaccgcggaugguacugcgauaacgccggcucuguguccuuuuucccgcaggcggagaccuguaagguccagagcaauagaguguuuugcgacacgaugaacucucuuacacugcccagcgaaguuaaucucugcaacaucgauauuuucaauccuaaauaugacuguaagaucaugaccuccaaaaccgaugugucuagcuccgucauuacaagccugggggccaucgugucuugcuacggaaagaccaaauguacagcuuccaacaagaaucggggcaucauuaagacguuuagcaacgggugcgacuaugucucuaauaaaggaguggacaccguuuccgugggcaacacacuuuacugugucaacaagcaagagggccagagccuguaugugaaaggggagcccaucauuaauuucuacgauccucucguuuuucccuccgacgaguucgaugccucuaucagccaggugaacgaaaagauuaaucagucccuggcuuuuauccgcaaaucugacgaacugcuccacaacgucaaugugggaaagagcaccacaaacauuaugaucaccacgaucauuaucgugauuaucguuauucugcuucugcucaucgccgucggccuguuccuguauugcaaggccagauccaccccggugacacuuagcaaagaucaacucucugggaucaauaacauugcuuucuccaauugaggacuagugaagggaacacccaaauuuaauucagccuuaagcacaauuaauuaagagugaaacguaauuguacaagcaguuggucacccaccauagggcaugaucaacaccgcaaccuuuccuuuuucccccagugauucugaaaaaccccucuucccuucagcuugcuuagauguuccaaauuuaguaagcuuaaggcggccuacagaagaaaaagaaaaaaaaggccacaaaaguucccucucacuuucaguaaauaaaauaaaagcagcaacagaaauaaagaaauaaaugaaauucaaaaugaaauaaauauuguguugugcagcauuaaaaaaucaauaaaaauuaaaaaugagcaagaucuaaaaaaaaaaaaaaaaaaaaaaaaaaaaaaaaaaaaaaaaaaaaaaaaaaaaaaaaaaaaaaaaugcaucccccccccccccccccccccccccccccccaaaggcucuuuucagagccaccagaauu

SEQ ID NO: 14901 - RNA, 2193 nt, Artificial Sequence
  mRNA product Design f-1 comprising derived and/or modified sequence from HRSV(Memphis-37)__AIY60640.1__F_DSCav1_mut2 (opt6)
gggagagcggcucggccauuuugucccagucaguccggaggcugcggcugcagaaguaccgccugcggaguaacugcaaagaagcuuaccauggagcuuccaauauuaaaaacaaacgcuauaacaacuauacucgcagcaguuacacucugcuucgcauccucacaaaacauaacugaagaauuuuaccaauccacuugcucagccguaucaaaaggauaucuaggagcacuuagaaccggaugguauacaucagugauaacaauagaacuaagcaacauaaaagaaaacaagugcaacggaacugacgcaaaagucaaacuaaucaaacaagaacuagacaaauacaaaaacgcaguaacagaccuacaauuacuaaugcaaucaacaccagcagcaggaucagguucagccauaugcucagguaucgcuguaugcaaaguccuucaccuagaaggugaaguaaacaaaauuaaaaacgcccuacucaguacaaauaaagcugucguaaguuuaucaaacggaguaucaguccuuacauucaaaguauuagaccuaaaaaauuauauagacaaacaauuacuaccaauacucaacaaacaaucaugcucaauaccaaauauagaaaccguaauagaauuucagcaaaaaaauaacagauuacuagaaauaaccagagaauuuucagucaacgcaggagucacaacacccgucucaaccuacaugcuaaccaacucagaacuucuaucucuuaucaacgacaugcccauaaccaaugaucaaaaaaaauuaaugucuaauaacguucaaauaguaagacaacaaucauacucaauaaugugcauaaucaaagaagaaguauuagcauacguaguacaacuaccccuauauggaguaauagacacacccugcuggaaacuacacacauccccccucuguacaacaaacacuaaagaaggaucaaacauuugccuaacaagaacagaccgcggaugguacugcgacaacgcaggcuccguaucuuucuuuccacaagccgaaacuuguaaaguucaaucaaacagaguauuuugcgauacaaugaacuccuuaacauuaccuucagaaguaaaccuaugcaacauagacaucuucaacccaaaauacgacugcaaaauaaugaccucaaaaacagacguauccucaucagucauaaccuccuuaggagcaauaguaucauguuacggaaaaacaaaauguacagcaucaaauaaaaauagaggaauaauaaaaaccuucuccaacggaugcgacuacguauccaauaaaggaguagacaccguaucaguaggaaacacacuauacuguguaaacaaacaagaaggccaaucucuauauguaaaaggcgaaccaaucauaaauuuuuacgacccacuugucuuccccuccgacgaauuugacgcaagcauaucacaaguaaacgaaaaaaucaaccaaagccuagccuucauaaggaaaucugacgaauuacuucauaacguaaauguuggaaaaucaaccacaaacauaaugauaaccaccaucauaauuguaauaauaguaauacuacuacuacuaauugcaguaggacucuuccuauauugcaaagcucgcucaacaccaguuaccuuaucaaaagaccaacuaucuggaauaaacaacauagccuuuuccaacuaaggacuagugaagggaacacccaaauuuaauucagccuuaagcacaauuaauuaagagugaaacguaauuguacaagcaguuggucacccaccauagggcaugaucaacaccgcaaccuuuccuuuuucccccagugauucugaaaaaccccucuucccuucagcuugcuuagauguuccaaauuuaguaagcuuaaggcggccuacagaagaaaaagaaaaaaaaggccacaaaaguucccucucacuuucaguaaauaaaauaaaagcagcaacagaaauaaagaaauaaaugaaauucaaaaugaaauaaauauuguguugugcagcauuaaaaaaucaauaaaaauuaaaaaugagcaagaucuaaaaaaaaaaaaaaaaaaaaaaaaaaaaaaaaaaaaaaaaaaaaaaaaaaaaaaaaaaaaaaaaugcaucccccccccccccccccccccccccccccccaaaggcucuuuucagagccaccagaauu

SEQ ID NO: 14902 - RNA, 2193 nt, Artificial Sequence
  mRNA product Design f-1 comprising derived and/or modified sequence from HRSV(Memphis-37)__AIY60640.1__F_DSCav1_mut2 (opt11)
gggagagcggcucggccauuuugucccagucaguccggaggcugcggcugcagaaguaccgccugcggaguaacugcaaagaagcuuaccauggaacucccaauccuaaaaaccaacgccaucaccaccauccucgccgcugucaccuuaugcuuugccagcagccaaaacaucaccgaagaauuuuaccaaucaacaugcuccgccgucucaaaaggauaccucggcgcccuacgcaccggcugguacacaagcgucauaaccaucgagcucuccaacaucaaggaaaacaaaugcaauggaaccgacgccaaagucaaacuaaucaaacaagaacuagacaaguacaagaacgcagucaccgaccuccaacuccucaugcaguccacccccgcagcaggcucuggcucagcaauaugcuccggcaucgcugucugcaaaguccuacaccucgaaggcgaagucaacaaaaucaaaaacgcccuacuguccacaaacaaagccgucgucucccuauccaacggcgucucgguccuaaccuuuaagguucucgaucucaaaaauuacauagacaaacaacuacuccccauccucaacaaacaaucuugcucaauccccaacaucgaaaccgucaucgaguuccaacagaaaaacaacagacuacucgaaaucacccgcgaguucucagucaacgcgggcgucacaacacccgucagcaccuacaugcuaaccaacuccgaacuccucagccucauuaacgacaugcccaucaccaacgaccaaaagaaacuuauguccaacaacguucaaaucguccgccaacaauccuacuccaucaugugcaucaucaaagaagaaguacucgccuacguaguccaacugccccucuacggcgucaucgauaccccaugcuggaaacuacacaccagcccccucugcaccaccaacaccaaagaaggcuccaauaucugcuuaacccgcacagaccguggcugguacugcgauaacgccggcuccgucuccuucuucccccaagcagaaaccugcaaaguacaauccaaccgagucuucugugacaccaugaacucccuaacccuuccaucagaagucaaccucugcaacaucgacaucuucaaccccaaguacgacugcaaaaucaugacauccaaaaccgaugucucaagcagcgucauaaccucacucggcgcuaucguaagcugcuacggcaaaaccaaaugcaccgcaucaaacaaaaaccgcggaaucaucaaaaccuucagcaacggaugcgacuacguuuccaacaaaggcguagacaccgucuccgucggaaacacccucuacugcguaaacaaacaggaaggccaaucccucuacgucaaaggcgaacccaucauaaacuucuacgauccccuugucuucccguccgaugaguucgacgccuccaucucgcaagucaacgaaaagauaaaccaaucacuagcauucauccguaaauccgacgaacuccuccacaacgucaacgucggaaaauccaccaccaacauaaugaucaccaccauaaucaucgucaucaucguaauacuauuacuccucauagccgucggccucuuccuauauugcaaagcccgaucaacccccguaacccuuucuaaagaccaacuguccggaaucaacaacaucgcuuucagcaacugaggacuagugaagggaacacccaaauuuaauucagccuuaagcacaauuaauuaagagugaaacguaauuguacaagcaguuggucacccaccauagggcaugaucaacaccgcaaccuuuccuuuuucccccagugauucugaaaaaccccucuucccuucagcuugcuuagauguuccaaauuuaguaagcuuaaggcggccuacagaagaaaaagaaaaaaaaggccacaaaaguucccucucacuuucaguaaauaaaauaaaagcagcaacagaaauaaagaaauaaaugaaauucaaaaugaaauaaauauuguguugugcagcauuaaaaaaucaauaaaaauuaaaaaugagcaagaucuaaaaaaaaaaaaaaaaaaaaaaaaaaaaaaaaaaaaaaaaaaaaaaaaaaaaaaaaaaaaaaaaugcaucccccccccccccccccccccccccccccccaaaggcucuuuucagagccaccagaauu

SEQ ID NO: 14903 - RNA, 1973 nt, Artificial Sequence
  mRNA product Design f-2 comprising derived and/or modified sequence from HRSV(Memphis-37)__AIY60640.1__F_DSCav1_mut2 (opt1)
gggagagcggcucggccauuuugucccagucaguccggaggcugcggcugcagaaguaccgccugcggaguaacugcaaagaagcuuaccauggagcugcccauccucaagaccaacgccaucaccacgauccuggccgcggugacccugugcuucgccagcucccagaacaucaccgaggaguucuaccagagcacgugcuccgccgucagcaagggcuaccucggcgcccugcgcaccgggugguacaccagcgugaucaccaucgagcuguccaacaucaaggagaacaagugcaacggcaccgacgccaaggugaagcucaucaagcaggagcuggacaaguacaagaacgcggucacggaccugcagcuccugaugcagagcaccccggccgccggcuccgggagcgcgaucugcuccggcaucgccgucugcaaggugcugcaccucgagggcgaggugaacaagaucaagaacgcccugcuguccaccaacaaggccgucgugagccucuccaacggggugagcguccugaccuucaaggugcuggaccucaagaacuacaucgacaagcagcugcugcccauccugaacaagcagagcugcuccauccccaacaucgagaccgucaucgaguuccagcagaagaacaaccgccuccuggagaucacgcgggaguucagcgugaacgcgggcgugaccacccccgucuccaccuacaugcugacgaacagcgagcuccugucccugaucaacgacaugccgaucaccaacgaccagaagaagcucaugagcaacaacgugcagaucgugcgccagcaguccuacagcaucaugugcaucaucaaggaggagguccuggccuacguggugcagcugccccucuacggggucaucgacacccccugcuggaagcugcacaccagcccccugugcacgaccaacaccaaggagggcuccaacaucugccucacccggacggaccgcgggugguacugcgacaacgccggcagcguguccuucuucccgcaggccgagaccugcaagguccagagcaaccggguguucugcgacaccaugaacucccugacccugcccagcgaggugaaccucugcaacaucgacaucuucaaccccaaguacgacugcaagaucaugacguccaagaccgacgucagcuccagcgugaucaccucccugggcgccaucgugagcugcuacgggaagaccaagugcacggcgagcaacaagaaccgcggcaucaucaagaccuucuccaacgggugcgacuacgucagcaacaagggcguggacaccguguccgucggcaacacccuguacugcgugaacaagcaggagggccagagccucuacgugaagggggagcccaucaucaacuucuacgacccgcuggucuuccccuccgacgaguucgacgccagcaucucccaggugaacgagaagaucaaccagagccuggccuucauccggaaguccgacgagcuccugcacaacgugaacgucggcaagagcaccacgaacaucaugaucaccaccaucaucaucgugaucaucgugauccugcugcuccugaucgccgucgggcuguuccucuacugcaaggcccgcuccacccccgugacgcugagcaaggaccagcuguccgggaucaacaacaucgcguucagcaacugaggacuaguggaagcauuuuccuggcugauuaaaagaaauuacucagcuauggucaucuguuccuguuagaaggcuaugcagcauauuauauacuaugcgcauguuaugaaaugcauaauaaaaaauuuuaaaaaaucuaaaagaucuaaaaaaaaaaaaaaaaaaaaaaaaaaaaaaaaaaaaaaaaaaaaaaaaaaaaaaaaaaaaaaaaugcaucccccccccccccccccccccccccccccccaaaggcucuuuucagagccaccagaauu

SEQ ID NO: 14904 - RNA, 1973 nt, Artificial Sequence
  mRNA product Design f-2 comprising derived and/or modified sequence from HRSV(Memphis-37)__AIY60640.1__F_DSCav1_mut2 (opt1)
gggagagcggcucggccauuuugucccagucaguccggaggcugcggcugcagaaguaccgccugcggaguaacugcaaagaagcuuaccauggagcugcccauccucaagaccaacgccaucaccacgauccuggccgcggugacccugugcuucgccagcucccagaacaucaccgaggaguucuaccagagcacgugcuccgccgucagcaagggcuaccucggggcccugcgcaccggcugguacaccuccgugaucaccaucgagcugagcaacaucaaggagaacaagugcaacgggaccgacgccaaggugaagcucaucaagcaggagcuggacaaguacaagaacgcggucacggaccugcagcuccugaugcaguccaccccggccgccggcagcggguccgccaucugcagcggcaucgcggugugcaaggugcugcaccucgagggcgaggucaacaagaucaagaacgcccugcuguccaccaacaaggccguggugagccucuccaacggggucagcgugcugaccuucaaggugcuggaccucaagaacuacaucgacaagcagcugcugcccauccucaacaagcaguccugcagcauccccaacaucgagacggucaucgaguuccagcagaagaacaaccggcugcuggagaucacccgcgaguucuccgugaacgccggcgugaccacccccgucagcacguacaugcucaccaacuccgagcugcugagccucaucaacgacaugccgaucaccaacgaccagaagaagcugaugagcaacaacgugcagaucgugcggcagcaguccuacagcaucaugugcaucaucaaggaggagguccuggccuacguggugcagcucccccuguacggggucaucgacacccccugcuggaagcugcacacgagcccccucugcaccaccaacaccaaggagggcuccaacaucugccugacgcgcaccgaccgggggugguacugcgacaacgcgggcuccgugagcuucuucccgcaggccgagaccugcaaggugcaguccaaccgcgucuucugcgacaccaugaacagccugacgcuccccuccgaggugaaccugugcaacaucgacaucuucaaccccaaguacgacugcaagaucaugaccagcaagaccgacgucuccagcuccgugaucaccagccugggcgccaucguguccugcuacgggaagacgaagugcaccgccagcaacaagaaccggggcaucaucaagaccuucuccaacgggugcgacuacgucagcaacaagggcguggacaccguguccgucggcaacacgcucuacugcgugaacaagcaggaggggcagagccuguacgugaagggcgagcccaucaucaacuucuacgacccgcuggucuuccccagcgacgaguucgacgccuccaucagccaggugaacgagaagaucaaccagucccucgcguucauccgcaagagcgacgagcugcugcacaacgugaacgucgggaaguccaccaccaacaucaugaucaccaccaucaucaucgugaucaucgugauccuccugcugcucaucgccgucggccuguuccuguacugcaaggcccggagcacgcccgugacccuguccaaggaccagcucagcgggaucaacaacaucgccuucuccaacugaggacuaguggaagcauuuuccuggcugauuaaaagaaauuacucagcuauggucaucuguuccuguuagaaggcuaugcagcauauuauauacuaugcgcauguuaugaaaugcauaauaaaaaauuuuaaaaaaucuaaaagaucuaaaaaaaaaaaaaaaaaaaaaaaaaaaaaaaaaaaaaaaaaaaaaaaaaaaaaaaaaaaaaaaaugcaucccccccccccccccccccccccccccccccaaaggcucuuuucagagccaccagaauu

SEQ ID NO: 14905 - RNA, 1973 nt, Artificial Sequence
  mRNA product Design f-2 comprising derived and/or modified sequence from HRSV(Memphis-37)__AIY60640.1__F_DSCav1_mut2 (opt2)
gggagagcggcucggccauuuugucccagucaguccggaggcugcggcugcagaaguaccgccugcggaguaacugcaaagaagcuuaccauggagcuccccauccucaagaccaacgccaucaccaccauccucgccgccgucacccucugcuucgccuccucccagaacaucaccgaggaguucuaccaguccaccugcuccgccgucuccaagggcuaccucggcgcccuccgcaccggcugguacaccuccgucaucaccaucgagcucuccaacaucaaggagaacaagugcaacggcaccgacgccaaggucaagcucaucaagcaggagcucgacaaguacaagaacgccgucaccgaccuccagcuccucaugcaguccacccccgccgccggcuccggcuccgccaucugcuccggcaucgccgucugcaagguccuccaccucgagggcgaggucaacaagaucaagaacgcccuccucuccaccaacaaggccgucgucucccucuccaacggcgucuccguccucaccuucaagguccucgaccucaagaacuacaucgacaagcagcuccuccccauccucaacaagcaguccugcuccauccccaacaucgagaccgucaucgaguuccagcagaagaacaaccgccuccucgagaucacccgcgaguucuccgucaacgccggcgucaccacccccgucuccaccuacaugcucaccaacuccgagcuccucucccucaucaacgacaugcccaucaccaacgaccagaagaagcucauguccaacaacguccagaucguccgccagcaguccuacuccaucaugugcaucaucaaggaggagguccucgccuacgucguccagcucccccucuacggcgucaucgacacccccugcuggaagcuccacaccuccccccucugcaccaccaacaccaaggagggcuccaacaucugccucacccgcaccgaccgcggcugguacugcgacaacgccggcuccgucuccuucuucccccaggccgagaccugcaagguccaguccaaccgcgucuucugcgacaccaugaacucccucacccuccccuccgaggucaaccucugcaacaucgacaucuucaaccccaaguacgacugcaagaucaugaccuccaagaccgacgucuccuccuccgucaucaccucccucggcgccaucgucuccugcuacggcaagaccaagugcaccgccuccaacaagaaccgcggcaucaucaagaccuucuccaacggcugcgacuacgucuccaacaagggcgucgacaccgucuccgucggcaacacccucuacugcgucaacaagcaggagggccagucccucuacgucaagggcgagcccaucaucaacuucuacgacccccucgucuuccccuccgacgaguucgacgccuccaucucccaggucaacgagaagaucaaccagucccucgccuucauccgcaaguccgacgagcuccuccacaacgucaacgucggcaaguccaccaccaacaucaugaucaccaccaucaucaucgucaucaucgucauccuccuccuccucaucgccgucggccucuuccucuacugcaaggcccgcuccacccccgucacccucuccaaggaccagcucuccggcaucaacaacaucgccuucuccaacugaggacuaguggaagcauuuuccuggcugauuaaaagaaauuacucagcuauggucaucuguuccuguuagaaggcuaugcagcauauuauauacuaugcgcauguuaugaaaugcauaauaaaaaauuuuaaaaaaucuaaaagaucuaaaaaaaaaaaaaaaaaaaaaaaaaaaaaaaaaaaaaaaaaaaaaaaaaaaaaaaaaaaaaaaaugcaucccccccccccccccccccccccccccccccaaaggcucuuuucagagccaccagaauu

SEQ ID NO: 14906 - RNA, 1973 nt, Artificial Sequence
  mRNA product Design f-2 comprising derived and/or modified sequence from HRSV(Memphis-37)__AIY60640.1__F_DSCav1_mut2 (opt3)
gggagagcggcucggccauuuugucccagucaguccggaggcugcggcugcagaaguaccgccugcggaguaacugcaaagaagcuuaccauggagcugcccauccucaagaccaacgccauuacaacuauacuugcugcagugacgcugugcuucgccagcucccagaauaucaccgaagaguuuuaccaaucuacauguucagcggucaguaaaggcuauuugggggcuuuaagaacuggaugguacaccagcguuauuacaaucgaacuguccaacauuaaggagaauaaaugcaacgguaccgacgccaaggugaaacuaaucaagcaggaacucgauaaguauaaaaaugcaguaacugaccugcagcuucugaugcagucuacuccugccgcuggcucggggucagcaauauguagcggaaucgccgugugcaaggucuugcaccucgagggcgaggugaacaaaauuaagaaugcucugcugaguaccaacaaagccguugugucccucucuaauggugucagcguguuaacguucaagguacuggaucuuaagaacuacaucgacaaacaauugcugccaauucuaaauaagcaguccuguucaaucccgaacauagaaacuguuauugaguuucagcagaaaaauaacaggcuccuggaaaucacccgggaguucagugugaaugcgggggucacaacucccgugagcaccuauaugcuuacaaacucugagcuguugucccucauuaacgauaugccuaucaccaaugaccaaaagaaacugaugucaaacaaugugcagaucguccgccagcagagcuacaguauuaugugcauaaucaaggaagagguuuuagcauaugugguacaacugccacucuacggagugauugauacgcccuguuggaaacuucauacuucuccucugugcacaaccaacacuaaggaaggcuccaauaucuguuugacacgaaccgaccguggcugguacugcgauaacgccgggagcgucucguuuuucccacaggcugagacguguaaggugcagucuaauagaguuuucugcgacaccaugaacucccuaacacugcccucagaagugaaucucugcaacauagauauuuucaauccuaaauaugacuguaagaucaugacaaguaaaaccgaugucagcuccucugugaucacaagccugggagccauuguaucaugcuacgguaagacuaaauguaccgcaaguaacaagaauaggggcaucauuaagacauuuuccaacgggugcgacuauguuagcaauaaaggaguggacaccgucucugugggcaacacucuuuacugugucaacaagcaagagggucagucacuguaugugaaaggggagccaauaaucaauuucuacgauccguugguuuuucccagugacgaauuugaugcuagcauuucccaggugaacgagaagaucaaucagucucucgccuuuauccggaaaucggacgaacuguuacacaacguaaaugucggaaagagcacgacaaacauuaugauaaccacuaucauuaucgugauuaucguuauacugcuacuccugaucgcggugggccuuuucuuguauugcaaggcccgcuccaccccugucacacugucaaaagaucaacucaguggcauuaauaacaucgcauucucuaauugaggacuaguggaagcauuuuccuggcugauuaaaagaaauuacucagcuauggucaucuguuccuguuagaaggcuaugcagcauauuauauacuaugcgcauguuaugaaaugcauaauaaaaaauuuuaaaaaaucuaaaagaucuaaaaaaaaaaaaaaaaaaaaaaaaaaaaaaaaaaaaaaaaaaaaaaaaaaaaaaaaaaaaaaaaugcaucccccccccccccccccccccccccccccccaaaggcucuuuucagagccaccagaauu

SEQ ID NO: 14907 - RNA, 1973 nt, Artificial Sequence
  mRNA product Design f-2 comprising derived and/or modified sequence from HRSV(Memphis-37)__AIY60640.1__F_DSCav1_mut2 (opt4)
gggagagcggcucggccauuuugucccagucaguccggaggcugcggcugcagaaguaccgccugcggaguaacugcaaagaagcuuaccauggagcugcccauccugaagaccaacgccaucaccaccauccuggccgccgugacccugugcuucgccagcagccagaacaucaccgaggaguucuaccagagcaccugcagcgccgugagcaagggcuaccugggcgcccugagaaccggcugguacaccagcgugaucaccaucgagcugagcaacaucaaggagaacaagugcaacggcaccgacgccaaggugaagcugaucaagcaggagcuggacaaguacaagaacgccgugaccgaccugcagcugcugaugcagagcacccccgccgccggcagcggcagcgccaucugcagcggcaucgccgugugcaaggugcugcaccuggagggcgaggugaacaagaucaagaacgcccugcugagcaccaacaaggccguggugagccugagcaacggcgugagcgugcugaccuucaaggugcuggaccugaagaacuacaucgacaagcagcugcugcccauccugaacaagcagagcugcagcauccccaacaucgagaccgugaucgaguuccagcagaagaacaacagacugcuggagaucaccagagaguucagcgugaacgccggcgugaccacccccgugagcaccuacaugcugaccaacagcgagcugcugagccugaucaacgacaugcccaucaccaacgaccagaagaagcugaugagcaacaacgugcagaucgugagacagcagagcuacagcaucaugugcaucaucaaggaggaggugcuggccuacguggugcagcugccccuguacggcgugaucgacacccccugcuggaagcugcacaccagcccccugugcaccaccaacaccaaggagggcagcaacaucugccugaccagaaccgacagaggcugguacugcgacaacgccggcagcgugagcuucuucccccaggccgagaccugcaaggugcagagcaacagaguguucugcgacaccaugaacagccugacccugcccagcgaggugaaccugugcaacaucgacaucuucaaccccaaguacgacugcaagaucaugaccagcaagaccgacgugagcagcagcgugaucaccagccugggcgccaucgugagcugcuacggcaagaccaagugcaccgccagcaacaagaacagaggcaucaucaagaccuucagcaacggcugcgacuacgugagcaacaagggcguggacaccgugagcgugggcaacacccuguacugcgugaacaagcaggagggccagagccuguacgugaagggcgagcccaucaucaacuucuacgacccccugguguuccccagcgacgaguucgacgccagcaucagccaggugaacgagaagaucaaccagagccuggccuucaucagaaagagcgacgagcugcugcacaacgugaacgugggcaagagcaccaccaacaucaugaucaccaccaucaucaucgugaucaucgugauccugcugcugcugaucgccgugggccuguuccuguacugcaaggccagaagcacccccgugacccugagcaaggaccagcugagcggcaucaacaacaucgccuucagcaacugaggacuaguggaagcauuuuccuggcugauuaaaagaaauuacucagcuauggucaucuguuccuguuagaaggcuaugcagcauauuauauacuaugcgcauguuaugaaaugcauaauaaaaaauuuuaaaaaaucuaaaagaucuaaaaaaaaaaaaaaaaaaaaaaaaaaaaaaaaaaaaaaaaaaaaaaaaaaaaaaaaaaaaaaaaugcaucccccccccccccccccccccccccccccccaaaggcucuuuucagagccaccagaauu

SEQ ID NO: 14908 - RNA, 1973 nt, Artificial Sequence
  mRNA product Design f-2 comprising derived and/or modified sequence from HRSV(Memphis-37)__AIY60640.1__F_DSCav1_mut2 (opt5)
gggagagcggcucggccauuuugucccagucaguccggaggcugcggcugcagaaguaccgccugcggaguaacugcaaagaagcuuaccauggagcugcccauccucaagaccaacgccauuacaacgauccuggcugccgugacccuuugcuucgcgagcucccagaauauuacagaagaguuuuaccaaucuaccuguagcgcugucuccaaaggcuaucugggggcccucagaacaggaugguacaccucuguuaucacaauugaacugagcaacaucaaggagaauaaaugcaacggcaccgacgccaaggugaaacuuaucaagcaggaacuggauaaguauaaaaaugcugugacggaccuccagcugcugaugcaguccaccccugccgcugggucuggaagcgccauuuguuccggcaucgcggucugcaaggugcuccaccuggagggggagguuaacaaaauuaagaaugcccuucugagcacaaacaaagcuguggucucucucuccaauggagugagcguucugaccuucaaggugcuugaucugaagaacuacaucgacaaacaacuccugccgauucugaauaagcagucuuguuccauccccaacauugaaacagucaucgaguuucagcagaaaaauaaccggcuccuggaaaucacccgcgaguucagcgugaaugccggcgugacgacaccugucucuaccuauaugcuuacaaacuccgagcugcucagccugauuaacgauaugcccaucaccaaugaccaaaagaaacuuauguccaacaauguucagauugugagacagcagucuuacagcaucaugugcauuaucaaggaagaggugcuggcuuaugucgugcaacucccucuguacggcguuaucgauacccccuguuggaaacugcauacauccccucucugcacgaccaacacaaaggaagggagcaauauuugucugacccggacagaccgcggaugguacugcgauaacgccggcucuguguccuuuuucccgcaggcggagaccuguaagguccagagcaauagaguguuuugcgacacgaugaacucucuuacacugcccagcgaaguuaaucucugcaacaucgauauuuucaauccuaaauaugacuguaagaucaugaccuccaaaaccgaugugucuagcuccgucauuacaagccugggggccaucgugucuugcuacggaaagaccaaauguacagcuuccaacaagaaucggggcaucauuaagacguuuagcaacgggugcgacuaugucucuaauaaaggaguggacaccguuuccgugggcaacacacuuuacugugucaacaagcaagagggccagagccuguaugugaaaggggagcccaucauuaauuucuacgauccucucguuuuucccuccgacgaguucgaugccucuaucagccaggugaacgaaaagauuaaucagucccuggcuuuuauccgcaaaucugacgaacugcuccacaacgucaaugugggaaagagcaccacaaacauuaugaucaccacgaucauuaucgugauuaucguuauucugcuucugcucaucgccgucggccuguuccuguauugcaaggccagauccaccccggugacacuuagcaaagaucaacucucugggaucaauaacauugcuuucuccaauugaggacuaguggaagcauuuuccuggcugauuaaaagaaauuacucagcuauggucaucuguuccuguuagaaggcuaugcagcauauuauauacuaugcgcauguuaugaaaugcauaauaaaaaauuuuaaaaaaucuaaaagaucuaaaaaaaaaaaaaaaaaaaaaaaaaaaaaaaaaaaaaaaaaaaaaaaaaaaaaaaaaaaaaaaaugcaucccccccccccccccccccccccccccccccaaaggcucuuuucagagccaccagaauu

SEQ ID NO: 14909 - RNA, 1973 nt, Artificial Sequence
  mRNA product Design f-2 comprising derived and/or modified sequence from HRSV(Memphis-37)__AIY60640.1__F_DSCav1_mut2 (opt6)
gggagagcggcucggccauuuugucccagucaguccggaggcugcggcugcagaaguaccgccugcggaguaacugcaaagaagcuuaccauggagcuuccaauauuaaaaacaaacgcuauaacaacuauacucgcagcaguuacacucugcuucgcauccucacaaaacauaacugaagaauuuuaccaauccacuugcucagccguaucaaaaggauaucuaggagcacuuagaaccggaugguauacaucagugauaacaauagaacuaagcaacauaaaagaaaacaagugcaacggaacugacgcaaaagucaaacuaaucaaacaagaacuagacaaauacaaaaacgcaguaacagaccuacaauuacuaaugcaaucaacaccagcagcaggaucagguucagccauaugcucagguaucgcuguaugcaaaguccuucaccuagaaggugaaguaaacaaaauuaaaaacgcccuacucaguacaaauaaagcugucguaaguuuaucaaacggaguaucaguccuuacauucaaaguauuagaccuaaaaaauuauauagacaaacaauuacuaccaauacucaacaaacaaucaugcucaauaccaaauauagaaaccguaauagaauuucagcaaaaaaauaacagauuacuagaaauaaccagagaauuuucagucaacgcaggagucacaacacccgucucaaccuacaugcuaaccaacucagaacuucuaucucuuaucaacgacaugcccauaaccaaugaucaaaaaaaauuaaugucuaauaacguucaaauaguaagacaacaaucauacucaauaaugugcauaaucaaagaagaaguauuagcauacguaguacaacuaccccuauauggaguaauagacacacccugcuggaaacuacacacauccccccucuguacaacaaacacuaaagaaggaucaaacauuugccuaacaagaacagaccgcggaugguacugcgacaacgcaggcuccguaucuuucuuuccacaagccgaaacuuguaaaguucaaucaaacagaguauuuugcgauacaaugaacuccuuaacauuaccuucagaaguaaaccuaugcaacauagacaucuucaacccaaaauacgacugcaaaauaaugaccucaaaaacagacguauccucaucagucauaaccuccuuaggagcaauaguaucauguuacggaaaaacaaaauguacagcaucaaauaaaaauagaggaauaauaaaaaccuucuccaacggaugcgacuacguauccaauaaaggaguagacaccguaucaguaggaaacacacuauacuguguaaacaaacaagaaggccaaucucuauauguaaaaggcgaaccaaucauaaauuuuuacgacccacuugucuuccccuccgacgaauuugacgcaagcauaucacaaguaaacgaaaaaaucaaccaaagccuagccuucauaaggaaaucugacgaauuacuucauaacguaaauguuggaaaaucaaccacaaacauaaugauaaccaccaucauaauuguaauaauaguaauacuacuacuacuaauugcaguaggacucuuccuauauugcaaagcucgcucaacaccaguuaccuuaucaaaagaccaacuaucuggaauaaacaacauagccuuuuccaacuaaggacuaguggaagcauuuuccuggcugauuaaaagaaauuacucagcuauggucaucuguuccuguuagaaggcuaugcagcauauuauauacuaugcgcauguuaugaaaugcauaauaaaaaauuuuaaaaaaucuaaaagaucuaaaaaaaaaaaaaaaaaaaaaaaaaaaaaaaaaaaaaaaaaaaaaaaaaaaaaaaaaaaaaaaaugcaucccccccccccccccccccccccccccccccaaaggcucuuuucagagccaccagaauu

SEQ ID NO: 14910 - RNA, 1973 nt, Artificial Sequence
  mRNA product Design f-2 comprising derived and/or modified sequence from HRSV(Memphis-37)__AIY60640.1__F_DSCav1_mut2 (opt11)
gggagagcggcucggccauuuugucccagucaguccggaggcugcggcugcagaaguaccgccugcggaguaacugcaaagaagcuuaccauggaacucccaauccuaaaaaccaacgccaucaccaccauccucgccgcugucaccuuaugcuuugccagcagccaaaacaucaccgaagaauuuuaccaaucaacaugcuccgccgucucaaaaggauaccucggcgcccuacgcaccggcugguacacaagcgucauaaccaucgagcucuccaacaucaaggaaaacaaaugcaauggaaccgacgccaaagucaaacuaaucaaacaagaacuagacaaguacaagaacgcagucaccgaccuccaacuccucaugcaguccacccccgcagcaggcucuggcucagcaauaugcuccggcaucgcugucugcaaaguccuacaccucgaaggcgaagucaacaaaaucaaaaacgcccuacuguccacaaacaaagccgucgucucccuauccaacggcgucucgguccuaaccuuuaagguucucgaucucaaaaauuacauagacaaacaacuacuccccauccucaacaaacaaucuugcucaauccccaacaucgaaaccgucaucgaguuccaacagaaaaacaacagacuacucgaaaucacccgcgaguucucagucaacgcgggcgucacaacacccgucagcaccuacaugcuaaccaacuccgaacuccucagccucauuaacgacaugcccaucaccaacgaccaaaagaaacuuauguccaacaacguucaaaucguccgccaacaauccuacuccaucaugugcaucaucaaagaagaaguacucgccuacguaguccaacugccccucuacggcgucaucgauaccccaugcuggaaacuacacaccagcccccucugcaccaccaacaccaaagaaggcuccaauaucugcuuaacccgcacagaccguggcugguacugcgauaacgccggcuccgucuccuucuucccccaagcagaaaccugcaaaguacaauccaaccgagucuucugugacaccaugaacucccuaacccuuccaucagaagucaaccucugcaacaucgacaucuucaaccccaaguacgacugcaaaaucaugacauccaaaaccgaugucucaagcagcgucauaaccucacucggcgcuaucguaagcugcuacggcaaaaccaaaugcaccgcaucaaacaaaaaccgcggaaucaucaaaaccuucagcaacggaugcgacuacguuuccaacaaaggcguagacaccgucuccgucggaaacacccucuacugcguaaacaaacaggaaggccaaucccucuacgucaaaggcgaacccaucauaaacuucuacgauccccuugucuucccguccgaugaguucgacgccuccaucucgcaagucaacgaaaagauaaaccaaucacuagcauucauccguaaauccgacgaacuccuccacaacgucaacgucggaaaauccaccaccaacauaaugaucaccaccauaaucaucgucaucaucguaauacuauuacuccucauagccgucggccucuuccuauauugcaaagcccgaucaacccccguaacccuuucuaaagaccaacuguccggaaucaacaacaucgcuuucagcaacugaggacuaguggaagcauuuuccuggcugauuaaaagaaauuacucagcuauggucaucuguuccuguuagaaggcuaugcagcauauuauauacuaugcgcauguuaugaaaugcauaauaaaaaauuuuaaaaaaucuaaaagaucuaaaaaaaaaaaaaaaaaaaaaaaaaaaaaaaaaaaaaaaaaaaaaaaaaaaaaaaaaaaaaaaaugcaucccccccccccccccccccccccccccccccaaaggcucuuuucagagccaccagaauu

SEQ ID NO: 14911 - RNA, 1964 nt, Artificial Sequence
  mRNA product Design f-3 comprising derived and/or modified sequence from HRSV(Memphis-37)__AIY60640.1__F_DSCav1_mut2 (opt1)
gggagagucccgcagucggcguccagcggcucugcuuguucgugugugugucguugcaggccuuauucaagcuuaccauggagcugcccauccucaagaccaacgccaucaccacgauccuggccgcggugacccugugcuucgccagcucccagaacaucaccgaggaguucuaccagagcacgugcuccgccgucagcaagggcuaccucggcgcccugcgcaccgggugguacaccagcgugaucaccaucgagcuguccaacaucaaggagaacaagugcaacggcaccgacgccaaggugaagcucaucaagcaggagcuggacaaguacaagaacgcggucacggaccugcagcuccugaugcagagcaccccggccgccggcuccgggagcgcgaucugcuccggcaucgccgucugcaaggugcugcaccucgagggcgaggugaacaagaucaagaacgcccugcuguccaccaacaaggccgucgugagccucuccaacggggugagcguccugaccuucaaggugcuggaccucaagaacuacaucgacaagcagcugcugcccauccugaacaagcagagcugcuccauccccaacaucgagaccgucaucgaguuccagcagaagaacaaccgccuccuggagaucacgcgggaguucagcgugaacgcgggcgugaccacccccgucuccaccuacaugcugacgaacagcgagcuccugucccugaucaacgacaugccgaucaccaacgaccagaagaagcucaugagcaacaacgugcagaucgugcgccagcaguccuacagcaucaugugcaucaucaaggaggagguccuggccuacguggugcagcugccccucuacggggucaucgacacccccugcuggaagcugcacaccagcccccugugcacgaccaacaccaaggagggcuccaacaucugccucacccggacggaccgcgggugguacugcgacaacgccggcagcguguccuucuucccgcaggccgagaccugcaagguccagagcaaccggguguucugcgacaccaugaacucccugacccugcccagcgaggugaaccucugcaacaucgacaucuucaaccccaaguacgacugcaagaucaugacguccaagaccgacgucagcuccagcgugaucaccucccugggcgccaucgugagcugcuacgggaagaccaagugcacggcgagcaacaagaaccgcggcaucaucaagaccuucuccaacgggugcgacuacgucagcaacaagggcguggacaccguguccgucggcaacacccuguacugcgugaacaagcaggagggccagagccucuacgugaagggggagcccaucaucaacuucuacgacccgcuggucuuccccuccgacgaguucgacgccagcaucucccaggugaacgagaagaucaaccagagccuggccuucauccggaaguccgacgagcuccugcacaacgugaacgucggcaagagcaccacgaacaucaugaucaccaccaucaucaucgugaucaucgugauccugcugcuccugaucgccgucgggcuguuccucuacugcaaggcccgcuccacccccgugacgcugagcaaggaccagcuguccgggaucaacaacaucgcguucagcaacugaggacuaguacuggcugcaucucccuuuccucuguccuccauccuucucccaggauggugaagggggaccugguacccagugauccccaccccaggauccuaaaucaugacuuaccugcuaauaaaaacucauuggaaaagugagaagaucuaaaaaaaaaaaaaaaaaaaaaaaaaaaaaaaaaaaaaaaaaaaaaaaaaaaaaaaaaaaaaaaaugcaucccccccccccccccccccccccccccccccaaaggcucuuuucagagccaccagaauu

SEQ ID NO: 14912 - RNA, 1964 nt, Artificial Sequence
  mRNA product Design f-3 comprising derived and/or modified sequence from HRSV(Memphis-37)__AIY60640.1__F_DSCav1_mut2 (opt1)
gggagagucccgcagucggcguccagcggcucugcuuguucgugugugugucguugcaggccuuauucaagcuuaccauggagcugcccauccucaagaccaacgccaucaccacgauccuggccgcggugacccugugcuucgccagcucccagaacaucaccgaggaguucuaccagagcacgugcuccgccgucagcaagggcuaccucggggcccugcgcaccggcugguacaccuccgugaucaccaucgagcugagcaacaucaaggagaacaagugcaacgggaccgacgccaaggugaagcucaucaagcaggagcuggacaaguacaagaacgcggucacggaccugcagcuccugaugcaguccaccccggccgccggcagcggguccgccaucugcagcggcaucgcggugugcaaggugcugcaccucgagggcgaggucaacaagaucaagaacgcccugcuguccaccaacaaggccguggugagccucuccaacggggucagcgugcugaccuucaaggugcuggaccucaagaacuacaucgacaagcagcugcugcccauccucaacaagcaguccugcagcauccccaacaucgagacggucaucgaguuccagcagaagaacaaccggcugcuggagaucacccgcgaguucuccgugaacgccggcgugaccacccccgucagcacguacaugcucaccaacuccgagcugcugagccucaucaacgacaugccgaucaccaacgaccagaagaagcugaugagcaacaacgugcagaucgugcggcagcaguccuacagcaucaugugcaucaucaaggaggagguccuggccuacguggugcagcucccccuguacggggucaucgacacccccugcuggaagcugcacacgagcccccucugcaccaccaacaccaaggagggcuccaacaucugccugacgcgcaccgaccgggggugguacugcgacaacgcgggcuccgugagcuucuucccgcaggccgagaccugcaaggugcaguccaaccgcgucuucugcgacaccaugaacagccugacgcuccccuccgaggugaaccugugcaacaucgacaucuucaaccccaaguacgacugcaagaucaugaccagcaagaccgacgucuccagcuccgugaucaccagccugggcgccaucguguccugcuacgggaagacgaagugcaccgccagcaacaagaaccggggcaucaucaagaccuucuccaacgggugcgacuacgucagcaacaagggcguggacaccguguccgucggcaacacgcucuacugcgugaacaagcaggaggggcagagccuguacgugaagggcgagcccaucaucaacuucuacgacccgcuggucuuccccagcgacgaguucgacgccuccaucagccaggugaacgagaagaucaaccagucccucgcguucauccgcaagagcgacgagcugcugcacaacgugaacgucgggaaguccaccaccaacaucaugaucaccaccaucaucaucgugaucaucgugauccuccugcugcucaucgccgucggccuguuccuguacugcaaggcccggagcacgcccgugacccuguccaaggaccagcucagcgggaucaacaacaucgccuucuccaacugaggacuaguacuggcugcaucucccuuuccucuguccuccauccuucucccaggauggugaagggggaccugguacccagugauccccaccccaggauccuaaaucaugacuuaccugcuaauaaaaacucauuggaaaagugagaagaucuaaaaaaaaaaaaaaaaaaaaaaaaaaaaaaaaaaaaaaaaaaaaaaaaaaaaaaaaaaaaaaaaugcaucccccccccccccccccccccccccccccccaaaggcucuuuucagagccaccagaauu

SEQ ID NO: 14913 - RNA, 1964 nt, Artificial Sequence
  mRNA product Design f-3 comprising derived and/or modified sequence from HRSV(Memphis-37)__AIY60640.1__F_DSCav1_mut2 (opt2)
gggagagucccgcagucggcguccagcggcucugcuuguucgugugugugucguugcaggccuuauucaagcuuaccauggagcuccccauccucaagaccaacgccaucaccaccauccucgccgccgucacccucugcuucgccuccucccagaacaucaccgaggaguucuaccaguccaccugcuccgccgucuccaagggcuaccucggcgcccuccgcaccggcugguacaccuccgucaucaccaucgagcucuccaacaucaaggagaacaagugcaacggcaccgacgccaaggucaagcucaucaagcaggagcucgacaaguacaagaacgccgucaccgaccuccagcuccucaugcaguccacccccgccgccggcuccggcuccgccaucugcuccggcaucgccgucugcaagguccuccaccucgagggcgaggucaacaagaucaagaacgcccuccucuccaccaacaaggccgucgucucccucuccaacggcgucuccguccucaccuucaagguccucgaccucaagaacuacaucgacaagcagcuccuccccauccucaacaagcaguccugcuccauccccaacaucgagaccgucaucgaguuccagcagaagaacaaccgccuccucgagaucacccgcgaguucuccgucaacgccggcgucaccacccccgucuccaccuacaugcucaccaacuccgagcuccucucccucaucaacgacaugcccaucaccaacgaccagaagaagcucauguccaacaacguccagaucguccgccagcaguccuacuccaucaugugcaucaucaaggaggagguccucgccuacgucguccagcucccccucuacggcgucaucgacacccccugcuggaagcuccacaccuccccccucugcaccaccaacaccaaggagggcuccaacaucugccucacccgcaccgaccgcggcugguacugcgacaacgccggcuccgucuccuucuucccccaggccgagaccugcaagguccaguccaaccgcgucuucugcgacaccaugaacucccucacccuccccuccgaggucaaccucugcaacaucgacaucuucaaccccaaguacgacugcaagaucaugaccuccaagaccgacgucuccuccuccgucaucaccucccucggcgccaucgucuccugcuacggcaagaccaagugcaccgccuccaacaagaaccgcggcaucaucaagaccuucuccaacggcugcgacuacgucuccaacaagggcgucgacaccgucuccgucggcaacacccucuacugcgucaacaagcaggagggccagucccucuacgucaagggcgagcccaucaucaacuucuacgacccccucgucuuccccuccgacgaguucgacgccuccaucucccaggucaacgagaagaucaaccagucccucgccuucauccgcaaguccgacgagcuccuccacaacgucaacgucggcaaguccaccaccaacaucaugaucaccaccaucaucaucgucaucaucgucauccuccuccuccucaucgccgucggccucuuccucuacugcaaggcccgcuccacccccgucacccucuccaaggaccagcucuccggcaucaacaacaucgccuucuccaacugaggacuaguacuggcugcaucucccuuuccucuguccuccauccuucucccaggauggugaagggggaccugguacccagugauccccaccccaggauccuaaaucaugacuuaccugcuaauaaaaacucauuggaaaagugagaagaucuaaaaaaaaaaaaaaaaaaaaaaaaaaaaaaaaaaaaaaaaaaaaaaaaaaaaaaaaaaaaaaaaugcaucccccccccccccccccccccccccccccccaaaggcucuuuucagagccaccagaauu

SEQ ID NO: 14914 - RNA, 1964 nt, Artificial Sequence
  mRNA product Design f-3 comprising derived and/or modified sequence from HRSV(Memphis-37)__AIY60640.1__F_DSCav1_mut2 (opt3)
gggagagucccgcagucggcguccagcggcucugcuuguucgugugugugucguugcaggccuuauucaagcuuaccauggagcugcccauccucaagaccaacgccauuacaacuauacuugcugcagugacgcugugcuucgccagcucccagaauaucaccgaagaguuuuaccaaucuacauguucagcggucaguaaaggcuauuugggggcuuuaagaacuggaugguacaccagcguuauuacaaucgaacuguccaacauuaaggagaauaaaugcaacgguaccgacgccaaggugaaacuaaucaagcaggaacucgauaaguauaaaaaugcaguaacugaccugcagcuucugaugcagucuacuccugccgcuggcucggggucagcaauauguagcggaaucgccgugugcaaggucuugcaccucgagggcgaggugaacaaaauuaagaaugcucugcugaguaccaacaaagccguugugucccucucuaauggugucagcguguuaacguucaagguacuggaucuuaagaacuacaucgacaaacaauugcugccaauucuaaauaagcaguccuguucaaucccgaacauagaaacuguuauugaguuucagcagaaaaauaacaggcuccuggaaaucacccgggaguucagugugaaugcgggggucacaacucccgugagcaccuauaugcuuacaaacucugagcuguugucccucauuaacgauaugccuaucaccaaugaccaaaagaaacugaugucaaacaaugugcagaucguccgccagcagagcuacaguauuaugugcauaaucaaggaagagguuuuagcauaugugguacaacugccacucuacggagugauugauacgcccuguuggaaacuucauacuucuccucugugcacaaccaacacuaaggaaggcuccaauaucuguuugacacgaaccgaccguggcugguacugcgauaacgccgggagcgucucguuuuucccacaggcugagacguguaaggugcagucuaauagaguuuucugcgacaccaugaacucccuaacacugcccucagaagugaaucucugcaacauagauauuuucaauccuaaauaugacuguaagaucaugacaaguaaaaccgaugucagcuccucugugaucacaagccugggagccauuguaucaugcuacgguaagacuaaauguaccgcaaguaacaagaauaggggcaucauuaagacauuuuccaacgggugcgacuauguuagcaauaaaggaguggacaccgucucugugggcaacacucuuuacugugucaacaagcaagagggucagucacuguaugugaaaggggagccaauaaucaauuucuacgauccguugguuuuucccagugacgaauuugaugcuagcauuucccaggugaacgagaagaucaaucagucucucgccuuuauccggaaaucggacgaacuguuacacaacguaaaugucggaaagagcacgacaaacauuaugauaaccacuaucauuaucgugauuaucguuauacugcuacuccugaucgcggugggccuuuucuuguauugcaaggcccgcuccaccccugucacacugucaaaagaucaacucaguggcauuaauaacaucgcauucucuaauugaggacuaguacuggcugcaucucccuuuccucuguccuccauccuucucccaggauggugaagggggaccugguacccagugauccccaccccaggauccuaaaucaugacuuaccugcuaauaaaaacucauuggaaaagugagaagaucuaaaaaaaaaaaaaaaaaaaaaaaaaaaaaaaaaaaaaaaaaaaaaaaaaaaaaaaaaaaaaaaaugcaucccccccccccccccccccccccccccccccaaaggcucuuuucagagccaccagaauu

SEQ ID NO: 14915 - RNA, 1964 nt, Artificial Sequence
  mRNA product Design f-3 comprising derived and/or modified sequence from HRSV(Memphis-37)__AIY60640.1__F_DSCav1_mut2 (opt4)
gggagagucccgcagucggcguccagcggcucugcuuguucgugugugugucguugcaggccuuauucaagcuuaccauggagcugcccauccugaagaccaacgccaucaccaccauccuggccgccgugacccugugcuucgccagcagccagaacaucaccgaggaguucuaccagagcaccugcagcgccgugagcaagggcuaccugggcgcccugagaaccggcugguacaccagcgugaucaccaucgagcugagcaacaucaaggagaacaagugcaacggcaccgacgccaaggugaagcugaucaagcaggagcuggacaaguacaagaacgccgugaccgaccugcagcugcugaugcagagcacccccgccgccggcagcggcagcgccaucugcagcggcaucgccgugugcaaggugcugcaccuggagggcgaggugaacaagaucaagaacgcccugcugagcaccaacaaggccguggugagccugagcaacggcgugagcgugcugaccuucaaggugcuggaccugaagaacuacaucgacaagcagcugcugcccauccugaacaagcagagcugcagcauccccaacaucgagaccgugaucgaguuccagcagaagaacaacagacugcuggagaucaccagagaguucagcgugaacgccggcgugaccacccccgugagcaccuacaugcugaccaacagcgagcugcugagccugaucaacgacaugcccaucaccaacgaccagaagaagcugaugagcaacaacgugcagaucgugagacagcagagcuacagcaucaugugcaucaucaaggaggaggugcuggccuacguggugcagcugccccuguacggcgugaucgacacccccugcuggaagcugcacaccagcccccugugcaccaccaacaccaaggagggcagcaacaucugccugaccagaaccgacagaggcugguacugcgacaacgccggcagcgugagcuucuucccccaggccgagaccugcaaggugcagagcaacagaguguucugcgacaccaugaacagccugacccugcccagcgaggugaaccugugcaacaucgacaucuucaaccccaaguacgacugcaagaucaugaccagcaagaccgacgugagcagcagcgugaucaccagccugggcgccaucgugagcugcuacggcaagaccaagugcaccgccagcaacaagaacagaggcaucaucaagaccuucagcaacggcugcgacuacgugagcaacaagggcguggacaccgugagcgugggcaacacccuguacugcgugaacaagcaggagggccagagccuguacgugaagggcgagcccaucaucaacuucuacgacccccugguguuccccagcgacgaguucgacgccagcaucagccaggugaacgagaagaucaaccagagccuggccuucaucagaaagagcgacgagcugcugcacaacgugaacgugggcaagagcaccaccaacaucaugaucaccaccaucaucaucgugaucaucgugauccugcugcugcugaucgccgugggccuguuccuguacugcaaggccagaagcacccccgugacccugagcaaggaccagcugagcggcaucaacaacaucgccuucagcaacugaggacuaguacuggcugcaucucccuuuccucuguccuccauccuucucccaggauggugaagggggaccugguacccagugauccccaccccaggauccuaaaucaugacuuaccugcuaauaaaaacucauuggaaaagugagaagaucuaaaaaaaaaaaaaaaaaaaaaaaaaaaaaaaaaaaaaaaaaaaaaaaaaaaaaaaaaaaaaaaaugcaucccccccccccccccccccccccccccccccaaaggcucuuuucagagccaccagaauu

SEQ ID NO: 14916 - RNA, 1964 nt, Artificial Sequence
  mRNA product Design f-3 comprising derived and/or modified sequence from HRSV(Memphis-37)__AIY60640.1__F_DSCav1_mut2 (opt5)
gggagagucccgcagucggcguccagcggcucugcuuguucgugugugugucguugcaggccuuauucaagcuuaccauggagcugcccauccucaagaccaacgccauuacaacgauccuggcugccgugacccuuugcuucgcgagcucccagaauauuacagaagaguuuuaccaaucuaccuguagcgcugucuccaaaggcuaucugggggcccucagaacaggaugguacaccucuguuaucacaauugaacugagcaacaucaaggagaauaaaugcaacggcaccgacgccaaggugaaacuuaucaagcaggaacuggauaaguauaaaaaugcugugacggaccuccagcugcugaugcaguccaccccugccgcugggucuggaagcgccauuuguuccggcaucgcggucugcaaggugcuccaccuggagggggagguuaacaaaauuaagaaugcccuucugagcacaaacaaagcuguggucucucucuccaauggagugagcguucugaccuucaaggugcuugaucugaagaacuacaucgacaaacaacuccugccgauucugaauaagcagucuuguuccauccccaacauugaaacagucaucgaguuucagcagaaaaauaaccggcuccuggaaaucacccgcgaguucagcgugaaugccggcgugacgacaccugucucuaccuauaugcuuacaaacuccgagcugcucagccugauuaacgauaugcccaucaccaaugaccaaaagaaacuuauguccaacaauguucagauugugagacagcagucuuacagcaucaugugcauuaucaaggaagaggugcuggcuuaugucgugcaacucccucuguacggcguuaucgauacccccuguuggaaacugcauacauccccucucugcacgaccaacacaaaggaagggagcaauauuugucugacccggacagaccgcggaugguacugcgauaacgccggcucuguguccuuuuucccgcaggcggagaccuguaagguccagagcaauagaguguuuugcgacacgaugaacucucuuacacugcccagcgaaguuaaucucugcaacaucgauauuuucaauccuaaauaugacuguaagaucaugaccuccaaaaccgaugugucuagcuccgucauuacaagccugggggccaucgugucuugcuacggaaagaccaaauguacagcuuccaacaagaaucggggcaucauuaagacguuuagcaacgggugcgacuaugucucuaauaaaggaguggacaccguuuccgugggcaacacacuuuacugugucaacaagcaagagggccagagccuguaugugaaaggggagcccaucauuaauuucuacgauccucucguuuuucccuccgacgaguucgaugccucuaucagccaggugaacgaaaagauuaaucagucccuggcuuuuauccgcaaaucugacgaacugcuccacaacgucaaugugggaaagagcaccacaaacauuaugaucaccacgaucauuaucgugauuaucguuauucugcuucugcucaucgccgucggccuguuccuguauugcaaggccagauccaccccggugacacuuagcaaagaucaacucucugggaucaauaacauugcuuucuccaauugaggacuaguacuggcugcaucucccuuuccucuguccuccauccuucucccaggauggugaagggggaccugguacccagugauccccaccccaggauccuaaaucaugacuuaccugcuaauaaaaacucauuggaaaagugagaagaucuaaaaaaaaaaaaaaaaaaaaaaaaaaaaaaaaaaaaaaaaaaaaaaaaaaaaaaaaaaaaaaaaugcaucccccccccccccccccccccccccccccccaaaggcucuuuucagagccaccagaauu

SEQ ID NO: 14917 - RNA, 1964 nt, Artificial Sequence
  mRNA product Design f-3 comprising derived and/or modified sequence from HRSV(Memphis-37)__AIY60640.1__F_DSCav1_mut2 (opt6)
gggagagucccgcagucggcguccagcggcucugcuuguucgugugugugucguugcaggccuuauucaagcuuaccauggagcuuccaauauuaaaaacaaacgcuauaacaacuauacucgcagcaguuacacucugcuucgcauccucacaaaacauaacugaagaauuuuaccaauccacuugcucagccguaucaaaaggauaucuaggagcacuuagaaccggaugguauacaucagugauaacaauagaacuaagcaacauaaaagaaaacaagugcaacggaacugacgcaaaagucaaacuaaucaaacaagaacuagacaaauacaaaaacgcaguaacagaccuacaauuacuaaugcaaucaacaccagcagcaggaucagguucagccauaugcucagguaucgcuguaugcaaaguccuucaccuagaaggugaaguaaacaaaauuaaaaacgcccuacucaguacaaauaaagcugucguaaguuuaucaaacggaguaucaguccuuacauucaaaguauuagaccuaaaaaauuauauagacaaacaauuacuaccaauacucaacaaacaaucaugcucaauaccaaauauagaaaccguaauagaauuucagcaaaaaaauaacagauuacuagaaauaaccagagaauuuucagucaacgcaggagucacaacacccgucucaaccuacaugcuaaccaacucagaacuucuaucucuuaucaacgacaugcccauaaccaaugaucaaaaaaaauuaaugucuaauaacguucaaauaguaagacaacaaucauacucaauaaugugcauaaucaaagaagaaguauuagcauacguaguacaacuaccccuauauggaguaauagacacacccugcuggaaacuacacacauccccccucuguacaacaaacacuaaagaaggaucaaacauuugccuaacaagaacagaccgcggaugguacugcgacaacgcaggcuccguaucuuucuuuccacaagccgaaacuuguaaaguucaaucaaacagaguauuuugcgauacaaugaacuccuuaacauuaccuucagaaguaaaccuaugcaacauagacaucuucaacccaaaauacgacugcaaaauaaugaccucaaaaacagacguauccucaucagucauaaccuccuuaggagcaauaguaucauguuacggaaaaacaaaauguacagcaucaaauaaaaauagaggaauaauaaaaaccuucuccaacggaugcgacuacguauccaauaaaggaguagacaccguaucaguaggaaacacacuauacuguguaaacaaacaagaaggccaaucucuauauguaaaaggcgaaccaaucauaaauuuuuacgacccacuugucuuccccuccgacgaauuugacgcaagcauaucacaaguaaacgaaaaaaucaaccaaagccuagccuucauaaggaaaucugacgaauuacuucauaacguaaauguuggaaaaucaaccacaaacauaaugauaaccaccaucauaauuguaauaauaguaauacuacuacuacuaauugcaguaggacucuuccuauauugcaaagcucgcucaacaccaguuaccuuaucaaaagaccaacuaucuggaauaaacaacauagccuuuuccaacuaaggacuaguacuggcugcaucucccuuuccucuguccuccauccuucucccaggauggugaagggggaccugguacccagugauccccaccccaggauccuaaaucaugacuuaccugcuaauaaaaacucauuggaaaagugagaagaucuaaaaaaaaaaaaaaaaaaaaaaaaaaaaaaaaaaaaaaaaaaaaaaaaaaaaaaaaaaaaaaaaugcaucccccccccccccccccccccccccccccccaaaggcucuuuucagagccaccagaauu

SEQ ID NO: 14918 - RNA, 1964 nt, Artificial Sequence
  mRNA product Design f-3 comprising derived and/or modified sequence from HRSV(Memphis-37)__AIY60640.1__F_DSCav1_mut2 (opt11)
gggagagucccgcagucggcguccagcggcucugcuuguucgugugugugucguugcaggccuuauucaagcuuaccauggaacucccaauccuaaaaaccaacgccaucaccaccauccucgccgcugucaccuuaugcuuugccagcagccaaaacaucaccgaagaauuuuaccaaucaacaugcuccgccgucucaaaaggauaccucggcgcccuacgcaccggcugguacacaagcgucauaaccaucgagcucuccaacaucaaggaaaacaaaugcaauggaaccgacgccaaagucaaacuaaucaaacaagaacuagacaaguacaagaacgcagucaccgaccuccaacuccucaugcaguccacccccgcagcaggcucuggcucagcaauaugcuccggcaucgcugucugcaaaguccuacaccucgaaggcgaagucaacaaaaucaaaaacgcccuacuguccacaaacaaagccgucgucucccuauccaacggcgucucgguccuaaccuuuaagguucucgaucucaaaaauuacauagacaaacaacuacuccccauccucaacaaacaaucuugcucaauccccaacaucgaaaccgucaucgaguuccaacagaaaaacaacagacuacucgaaaucacccgcgaguucucagucaacgcgggcgucacaacacccgucagcaccuacaugcuaaccaacuccgaacuccucagccucauuaacgacaugcccaucaccaacgaccaaaagaaacuuauguccaacaacguucaaaucguccgccaacaauccuacuccaucaugugcaucaucaaagaagaaguacucgccuacguaguccaacugccccucuacggcgucaucgauaccccaugcuggaaacuacacaccagcccccucugcaccaccaacaccaaagaaggcuccaauaucugcuuaacccgcacagaccguggcugguacugcgauaacgccggcuccgucuccuucuucccccaagcagaaaccugcaaaguacaauccaaccgagucuucugugacaccaugaacucccuaacccuuccaucagaagucaaccucugcaacaucgacaucuucaaccccaaguacgacugcaaaaucaugacauccaaaaccgaugucucaagcagcgucauaaccucacucggcgcuaucguaagcugcuacggcaaaaccaaaugcaccgcaucaaacaaaaaccgcggaaucaucaaaaccuucagcaacggaugcgacuacguuuccaacaaaggcguagacaccgucuccgucggaaacacccucuacugcguaaacaaacaggaaggccaaucccucuacgucaaaggcgaacccaucauaaacuucuacgauccccuugucuucccguccgaugaguucgacgccuccaucucgcaagucaacgaaaagauaaaccaaucacuagcauucauccguaaauccgacgaacuccuccacaacgucaacgucggaaaauccaccaccaacauaaugaucaccaccauaaucaucgucaucaucguaauacuauuacuccucauagccgucggccucuuccuauauugcaaagcccgaucaacccccguaacccuuucuaaagaccaacuguccggaaucaacaacaucgcuuucagcaacugaggacuaguacuggcugcaucucccuuuccucuguccuccauccuucucccaggauggugaagggggaccugguacccagugauccccaccccaggauccuaaaucaugacuuaccugcuaauaaaaacucauuggaaaagugagaagaucuaaaaaaaaaaaaaaaaaaaaaaaaaaaaaaaaaaaaaaaaaaaaaaaaaaaaaaaaaaaaaaaaugcaucccccccccccccccccccccccccccccccaaaggcucuuuucagagccaccagaauu

SEQ ID NO: 14919 - RNA, 2180 nt, Artificial Sequence
  mRNA product Design f-4 comprising derived and/or modified sequence from HRSV(Memphis-37)__AIY60640.1__F_DSCav1_mut2 (opt1)
gggagagucccgcagucggcguccagcggcucugcuuguucgugugugugucguugcaggccuuauucaagcuuaccauggagcugcccauccucaagaccaacgccaucaccacgauccuggccgcggugacccugugcuucgccagcucccagaacaucaccgaggaguucuaccagagcacgugcuccgccgucagcaagggcuaccucggcgcccugcgcaccgggugguacaccagcgugaucaccaucgagcuguccaacaucaaggagaacaagugcaacggcaccgacgccaaggugaagcucaucaagcaggagcuggacaaguacaagaacgcggucacggaccugcagcuccugaugcagagcaccccggccgccggcuccgggagcgcgaucugcuccggcaucgccgucugcaaggugcugcaccucgagggcgaggugaacaagaucaagaacgcccugcuguccaccaacaaggccgucgugagccucuccaacggggugagcguccugaccuucaaggugcuggaccucaagaacuacaucgacaagcagcugcugcccauccugaacaagcagagcugcuccauccccaacaucgagaccgucaucgaguuccagcagaagaacaaccgccuccuggagaucacgcgggaguucagcgugaacgcgggcgugaccacccccgucuccaccuacaugcugacgaacagcgagcuccugucccugaucaacgacaugccgaucaccaacgaccagaagaagcucaugagcaacaacgugcagaucgugcgccagcaguccuacagcaucaugugcaucaucaaggaggagguccuggccuacguggugcagcugccccucuacggggucaucgacacccccugcuggaagcugcacaccagcccccugugcacgaccaacaccaaggagggcuccaacaucugccucacccggacggaccgcgggugguacugcgacaacgccggcagcguguccuucuucccgcaggccgagaccugcaagguccagagcaaccggguguucugcgacaccaugaacucccugacccugcccagcgaggugaaccucugcaacaucgacaucuucaaccccaaguacgacugcaagaucaugacguccaagaccgacgucagcuccagcgugaucaccucccugggcgccaucgugagcugcuacgggaagaccaagugcacggcgagcaacaagaaccgcggcaucaucaagaccuucuccaacgggugcgacuacgucagcaacaagggcguggacaccguguccgucggcaacacccuguacugcgugaacaagcaggagggccagagccucuacgugaagggggagcccaucaucaacuucuacgacccgcuggucuuccccuccgacgaguucgacgccagcaucucccaggugaacgagaagaucaaccagagccuggccuucauccggaaguccgacgagcuccugcacaacgugaacgucggcaagagcaccacgaacaucaugaucaccaccaucaucaucgugaucaucgugauccugcugcuccugaucgccgucgggcuguuccucuacugcaaggcccgcuccacccccgugacgcugagcaaggaccagcuguccgggaucaacaacaucgcguucagcaacugaggacuagugaagggaacacccaaauuuaauucagccuuaagcacaauuaauuaagagugaaacguaauuguacaagcaguuggucacccaccauagggcaugaucaacaccgcaaccuuuccuuuuucccccagugauucugaaaaaccccucuucccuucagcuugcuuagauguuccaaauuuaguaagcuuaaggcggccuacagaagaaaaagaaaaaaaaggccacaaaaguucccucucacuuucaguaaauaaaauaaaagcagcaacagaaauaaagaaauaaaugaaauucaaaaugaaauaaauauuguguugugcagcauuaaaaaaucaauaaaaauuaaaaaugagcaagaucuaaaaaaaaaaaaaaaaaaaaaaaaaaaaaaaaaaaaaaaaaaaaaaaaaaaaaaaaaaaaaaaaugcaucccccccccccccccccccccccccccccccaaaggcucuuuucagagccaccagaauu

SEQ ID NO: 14920 - RNA, 2180 nt, Artificial Sequence
  mRNA product Design f-4 comprising derived and/or modified sequence from HRSV(Memphis-37)__AIY60640.1__F_DSCav1_mut2 (opt1)
gggagagucccgcagucggcguccagcggcucugcuuguucgugugugugucguugcaggccuuauucaagcuuaccauggagcugcccauccucaagaccaacgccaucaccacgauccuggccgcggugacccugugcuucgccagcucccagaacaucaccgaggaguucuaccagagcacgugcuccgccgucagcaagggcuaccucggggcccugcgcaccggcugguacaccuccgugaucaccaucgagcugagcaacaucaaggagaacaagugcaacgggaccgacgccaaggugaagcucaucaagcaggagcuggacaaguacaagaacgcggucacggaccugcagcuccugaugcaguccaccccggccgccggcagcggguccgccaucugcagcggcaucgcggugugcaaggugcugcaccucgagggcgaggucaacaagaucaagaacgcccugcuguccaccaacaaggccguggugagccucuccaacggggucagcgugcugaccuucaaggugcuggaccucaagaacuacaucgacaagcagcugcugcccauccucaacaagcaguccugcagcauccccaacaucgagacggucaucgaguuccagcagaagaacaaccggcugcuggagaucacccgcgaguucuccgugaacgccggcgugaccacccccgucagcacguacaugcucaccaacuccgagcugcugagccucaucaacgacaugccgaucaccaacgaccagaagaagcugaugagcaacaacgugcagaucgugcggcagcaguccuacagcaucaugugcaucaucaaggaggagguccuggccuacguggugcagcucccccuguacggggucaucgacacccccugcuggaagcugcacacgagcccccucugcaccaccaacaccaaggagggcuccaacaucugccugacgcgcaccgaccgggggugguacugcgacaacgcgggcuccgugagcuucuucccgcaggccgagaccugcaaggugcaguccaaccgcgucuucugcgacaccaugaacagccugacgcuccccuccgaggugaaccugugcaacaucgacaucuucaaccccaaguacgacugcaagaucaugaccagcaagaccgacgucuccagcuccgugaucaccagccugggcgccaucguguccugcuacgggaagacgaagugcaccgccagcaacaagaaccggggcaucaucaagaccuucuccaacgggugcgacuacgucagcaacaagggcguggacaccguguccgucggcaacacgcucuacugcgugaacaagcaggaggggcagagccuguacgugaagggcgagcccaucaucaacuucuacgacccgcuggucuuccccagcgacgaguucgacgccuccaucagccaggugaacgagaagaucaaccagucccucgcguucauccgcaagagcgacgagcugcugcacaacgugaacgucgggaaguccaccaccaacaucaugaucaccaccaucaucaucgugaucaucgugauccuccugcugcucaucgccgucggccuguuccuguacugcaaggcccggagcacgcccgugacccuguccaaggaccagcucagcgggaucaacaacaucgccuucuccaacugaggacuagugaagggaacacccaaauuuaauucagccuuaagcacaauuaauuaagagugaaacguaauuguacaagcaguuggucacccaccauagggcaugaucaacaccgcaaccuuuccuuuuucccccagugauucugaaaaaccccucuucccuucagcuugcuuagauguuccaaauuuaguaagcuuaaggcggccuacagaagaaaaagaaaaaaaaggccacaaaaguucccucucacuuucaguaaauaaaauaaaagcagcaacagaaauaaagaaauaaaugaaauucaaaaugaaauaaauauuguguugugcagcauuaaaaaaucaauaaaaauuaaaaaugagcaagaucuaaaaaaaaaaaaaaaaaaaaaaaaaaaaaaaaaaaaaaaaaaaaaaaaaaaaaaaaaaaaaaaaugcaucccccccccccccccccccccccccccccccaaaggcucuuuucagagccaccagaauu

SEQ ID NO: 14921 - RNA, 2180 nt, Artificial Sequence
  mRNA product Design f-4 comprising derived and/or modified sequence from HRSV(Memphis-37)__AIY60640.1__F_DSCav1_mut2 (opt2)
gggagagucccgcagucggcguccagcggcucugcuuguucgugugugugucguugcaggccuuauucaagcuuaccauggagcuccccauccucaagaccaacgccaucaccaccauccucgccgccgucacccucugcuucgccuccucccagaacaucaccgaggaguucuaccaguccaccugcuccgccgucuccaagggcuaccucggcgcccuccgcaccggcugguacaccuccgucaucaccaucgagcucuccaacaucaaggagaacaagugcaacggcaccgacgccaaggucaagcucaucaagcaggagcucgacaaguacaagaacgccgucaccgaccuccagcuccucaugcaguccacccccgccgccggcuccggcuccgccaucugcuccggcaucgccgucugcaagguccuccaccucgagggcgaggucaacaagaucaagaacgcccuccucuccaccaacaaggccgucgucucccucuccaacggcgucuccguccucaccuucaagguccucgaccucaagaacuacaucgacaagcagcuccuccccauccucaacaagcaguccugcuccauccccaacaucgagaccgucaucgaguuccagcagaagaacaaccgccuccucgagaucacccgcgaguucuccgucaacgccggcgucaccacccccgucuccaccuacaugcucaccaacuccgagcuccucucccucaucaacgacaugcccaucaccaacgaccagaagaagcucauguccaacaacguccagaucguccgccagcaguccuacuccaucaugugcaucaucaaggaggagguccucgccuacgucguccagcucccccucuacggcgucaucgacacccccugcuggaagcuccacaccuccccccucugcaccaccaacaccaaggagggcuccaacaucugccucacccgcaccgaccgcggcugguacugcgacaacgccggcuccgucuccuucuucccccaggccgagaccugcaagguccaguccaaccgcgucuucugcgacaccaugaacucccucacccuccccuccgaggucaaccucugcaacaucgacaucuucaaccccaaguacgacugcaagaucaugaccuccaagaccgacgucuccuccuccgucaucaccucccucggcgccaucgucuccugcuacggcaagaccaagugcaccgccuccaacaagaaccgcggcaucaucaagaccuucuccaacggcugcgacuacgucuccaacaagggcgucgacaccgucuccgucggcaacacccucuacugcgucaacaagcaggagggccagucccucuacgucaagggcgagcccaucaucaacuucuacgacccccucgucuuccccuccgacgaguucgacgccuccaucucccaggucaacgagaagaucaaccagucccucgccuucauccgcaaguccgacgagcuccuccacaacgucaacgucggcaaguccaccaccaacaucaugaucaccaccaucaucaucgucaucaucgucauccuccuccuccucaucgccgucggccucuuccucuacugcaaggcccgcuccacccccgucacccucuccaaggaccagcucuccggcaucaacaacaucgccuucuccaacugaggacuagugaagggaacacccaaauuuaauucagccuuaagcacaauuaauuaagagugaaacguaauuguacaagcaguuggucacccaccauagggcaugaucaacaccgcaaccuuuccuuuuucccccagugauucugaaaaaccccucuucccuucagcuugcuuagauguuccaaauuuaguaagcuuaaggcggccuacagaagaaaaagaaaaaaaaggccacaaaaguucccucucacuuucaguaaauaaaauaaaagcagcaacagaaauaaagaaauaaaugaaauucaaaaugaaauaaauauuguguugugcagcauuaaaaaaucaauaaaaauuaaaaaugagcaagaucuaaaaaaaaaaaaaaaaaaaaaaaaaaaaaaaaaaaaaaaaaaaaaaaaaaaaaaaaaaaaaaaaugcaucccccccccccccccccccccccccccccccaaaggcucuuuucagagccaccagaauu

SEQ ID NO: 14922 - RNA, 2180 nt, Artificial Sequence
  mRNA product Design f-4 comprising derived and/or modified sequence from HRSV(Memphis-37)__AIY60640.1__F_DSCav1_mut2 (opt3)
gggagagucccgcagucggcguccagcggcucugcuuguucgugugugugucguugcaggccuuauucaagcuuaccauggagcugcccauccucaagaccaacgccauuacaacuauacuugcugcagugacgcugugcuucgccagcucccagaauaucaccgaagaguuuuaccaaucuacauguucagcggucaguaaaggcuauuugggggcuuuaagaacuggaugguacaccagcguuauuacaaucgaacuguccaacauuaaggagaauaaaugcaacgguaccgacgccaaggugaaacuaaucaagcaggaacucgauaaguauaaaaaugcaguaacugaccugcagcuucugaugcagucuacuccugccgcuggcucggggucagcaauauguagcggaaucgccgugugcaaggucuugcaccucgagggcgaggugaacaaaauuaagaaugcucugcugaguaccaacaaagccguugugucccucucuaauggugucagcguguuaacguucaagguacuggaucuuaagaacuacaucgacaaacaauugcugccaauucuaaauaagcaguccuguucaaucccgaacauagaaacuguuauugaguuucagcagaaaaauaacaggcuccuggaaaucacccgggaguucagugugaaugcgggggucacaacucccgugagcaccuauaugcuuacaaacucugagcuguugucccucauuaacgauaugccuaucaccaaugaccaaaagaaacugaugucaaacaaugugcagaucguccgccagcagagcuacaguauuaugugcauaaucaaggaagagguuuuagcauaugugguacaacugccacucuacggagugauugauacgcccuguuggaaacuucauacuucuccucugugcacaaccaacacuaaggaaggcuccaauaucuguuugacacgaaccgaccguggcugguacugcgauaacgccgggagcgucucguuuuucccacaggcugagacguguaaggugcagucuaauagaguuuucugcgacaccaugaacucccuaacacugcccucagaagugaaucucugcaacauagauauuuucaauccuaaauaugacuguaagaucaugacaaguaaaaccgaugucagcuccucugugaucacaagccugggagccauuguaucaugcuacgguaagacuaaauguaccgcaaguaacaagaauaggggcaucauuaagacauuuuccaacgggugcgacuauguuagcaauaaaggaguggacaccgucucugugggcaacacucuuuacugugucaacaagcaagagggucagucacuguaugugaaaggggagccaauaaucaauuucuacgauccguugguuuuucccagugacgaauuugaugcuagcauuucccaggugaacgagaagaucaaucagucucucgccuuuauccggaaaucggacgaacuguuacacaacguaaaugucggaaagagcacgacaaacauuaugauaaccacuaucauuaucgugauuaucguuauacugcuacuccugaucgcggugggccuuuucuuguauugcaaggcccgcuccaccccugucacacugucaaaagaucaacucaguggcauuaauaacaucgcauucucuaauugaggacuagugaagggaacacccaaauuuaauucagccuuaagcacaauuaauuaagagugaaacguaauuguacaagcaguuggucacccaccauagggcaugaucaacaccgcaaccuuuccuuuuucccccagugauucugaaaaaccccucuucccuucagcuugcuuagauguuccaaauuuaguaagcuuaaggcggccuacagaagaaaaagaaaaaaaaggccacaaaaguucccucucacuuucaguaaauaaaauaaaagcagcaacagaaauaaagaaauaaaugaaauucaaaaugaaauaaauauuguguugugcagcauuaaaaaaucaauaaaaauuaaaaaugagcaagaucuaaaaaaaaaaaaaaaaaaaaaaaaaaaaaaaaaaaaaaaaaaaaaaaaaaaaaaaaaaaaaaaaugcaucccccccccccccccccccccccccccccccaaaggcucuuuucagagccaccagaauu

SEQ ID NO: 14923 - RNA, 2180 nt, Artificial Sequence
  mRNA product Design f-4 comprising derived and/or modified sequence from HRSV(Memphis-37)__AIY60640.1__F_DSCav1_mut2 (opt4)
gggagagucccgcagucggcguccagcggcucugcuuguucgugugugugucguugcaggccuuauucaagcuuaccauggagcugcccauccugaagaccaacgccaucaccaccauccuggccgccgugacccugugcuucgccagcagccagaacaucaccgaggaguucuaccagagcaccugcagcgccgugagcaagggcuaccugggcgcccugagaaccggcugguacaccagcgugaucaccaucgagcugagcaacaucaaggagaacaagugcaacggcaccgacgccaaggugaagcugaucaagcaggagcuggacaaguacaagaacgccgugaccgaccugcagcugcugaugcagagcacccccgccgccggcagcggcagcgccaucugcagcggcaucgccgugugcaaggugcugcaccuggagggcgaggugaacaagaucaagaacgcccugcugagcaccaacaaggccguggugagccugagcaacggcgugagcgugcugaccuucaaggugcuggaccugaagaacuacaucgacaagcagcugcugcccauccugaacaagcagagcugcagcauccccaacaucgagaccgugaucgaguuccagcagaagaacaacagacugcuggagaucaccagagaguucagcgugaacgccggcgugaccacccccgugagcaccuacaugcugaccaacagcgagcugcugagccugaucaacgacaugcccaucaccaacgaccagaagaagcugaugagcaacaacgugcagaucgugagacagcagagcuacagcaucaugugcaucaucaaggaggaggugcuggccuacguggugcagcugccccuguacggcgugaucgacacccccugcuggaagcugcacaccagcccccugugcaccaccaacaccaaggagggcagcaacaucugccugaccagaaccgacagaggcugguacugcgacaacgccggcagcgugagcuucuucccccaggccgagaccugcaaggugcagagcaacagaguguucugcgacaccaugaacagccugacccugcccagcgaggugaaccugugcaacaucgacaucuucaaccccaaguacgacugcaagaucaugaccagcaagaccgacgugagcagcagcgugaucaccagccugggcgccaucgugagcugcuacggcaagaccaagugcaccgccagcaacaagaacagaggcaucaucaagaccuucagcaacggcugcgacuacgugagcaacaagggcguggacaccgugagcgugggcaacacccuguacugcgugaacaagcaggagggccagagccuguacgugaagggcgagcccaucaucaacuucuacgacccccugguguuccccagcgacgaguucgacgccagcaucagccaggugaacgagaagaucaaccagagccuggccuucaucagaaagagcgacgagcugcugcacaacgugaacgugggcaagagcaccaccaacaucaugaucaccaccaucaucaucgugaucaucgugauccugcugcugcugaucgccgugggccuguuccuguacugcaaggccagaagcacccccgugacccugagcaaggaccagcugagcggcaucaacaacaucgccuucagcaacugaggacuagugaagggaacacccaaauuuaauucagccuuaagcacaauuaauuaagagugaaacguaauuguacaagcaguuggucacccaccauagggcaugaucaacaccgcaaccuuuccuuuuucccccagugauucugaaaaaccccucuucccuucagcuugcuuagauguuccaaauuuaguaagcuuaaggcggccuacagaagaaaaagaaaaaaaaggccacaaaaguucccucucacuuucaguaaauaaaauaaaagcagcaacagaaauaaagaaauaaaugaaauucaaaaugaaauaaauauuguguugugcagcauuaaaaaaucaauaaaaauuaaaaaugagcaagaucuaaaaaaaaaaaaaaaaaaaaaaaaaaaaaaaaaaaaaaaaaaaaaaaaaaaaaaaaaaaaaaaaugcaucccccccccccccccccccccccccccccccaaaggcucuuuucagagccaccagaauu

SEQ ID NO: 14924 - RNA, 2180 nt, Artificial Sequence
  mRNA product Design f-4 comprising derived and/or modified sequence from HRSV(Memphis-37)__AIY60640.1__F_DSCav1_mut2 (opt5)
gggagagucccgcagucggcguccagcggcucugcuuguucgugugugugucguugcaggccuuauucaagcuuaccauggagcugcccauccucaagaccaacgccauuacaacgauccuggcugccgugacccuuugcuucgcgagcucccagaauauuacagaagaguuuuaccaaucuaccuguagcgcugucuccaaaggcuaucugggggcccucagaacaggaugguacaccucuguuaucacaauugaacugagcaacaucaaggagaauaaaugcaacggcaccgacgccaaggugaaacuuaucaagcaggaacuggauaaguauaaaaaugcugugacggaccuccagcugcugaugcaguccaccccugccgcugggucuggaagcgccauuuguuccggcaucgcggucugcaaggugcuccaccuggagggggagguuaacaaaauuaagaaugcccuucugagcacaaacaaagcuguggucucucucuccaauggagugagcguucugaccuucaaggugcuugaucugaagaacuacaucgacaaacaacuccugccgauucugaauaagcagucuuguuccauccccaacauugaaacagucaucgaguuucagcagaaaaauaaccggcuccuggaaaucacccgcgaguucagcgugaaugccggcgugacgacaccugucucuaccuauaugcuuacaaacuccgagcugcucagccugauuaacgauaugcccaucaccaaugaccaaaagaaacuuauguccaacaauguucagauugugagacagcagucuuacagcaucaugugcauuaucaaggaagaggugcuggcuuaugucgugcaacucccucuguacggcguuaucgauacccccuguuggaaacugcauacauccccucucugcacgaccaacacaaaggaagggagcaauauuugucugacccggacagaccgcggaugguacugcgauaacgccggcucuguguccuuuuucccgcaggcggagaccuguaagguccagagcaauagaguguuuugcgacacgaugaacucucuuacacugcccagcgaaguuaaucucugcaacaucgauauuuucaauccuaaauaugacuguaagaucaugaccuccaaaaccgaugugucuagcuccgucauuacaagccugggggccaucgugucuugcuacggaaagaccaaauguacagcuuccaacaagaaucggggcaucauuaagacguuuagcaacgggugcgacuaugucucuaauaaaggaguggacaccguuuccgugggcaacacacuuuacugugucaacaagcaagagggccagagccuguaugugaaaggggagcccaucauuaauuucuacgauccucucguuuuucccuccgacgaguucgaugccucuaucagccaggugaacgaaaagauuaaucagucccuggcuuuuauccgcaaaucugacgaacugcuccacaacgucaaugugggaaagagcaccacaaacauuaugaucaccacgaucauuaucgugauuaucguuauucugcuucugcucaucgccgucggccuguuccuguauugcaaggccagauccaccccggugacacuuagcaaagaucaacucucugggaucaauaacauugcuuucuccaauugaggacuagugaagggaacacccaaauuuaauucagccuuaagcacaauuaauuaagagugaaacguaauuguacaagcaguuggucacccaccauagggcaugaucaacaccgcaaccuuuccuuuuucccccagugauucugaaaaaccccucuucccuucagcuugcuuagauguuccaaauuuaguaagcuuaaggcggccuacagaagaaaaagaaaaaaaaggccacaaaaguucccucucacuuucaguaaauaaaauaaaagcagcaacagaaauaaagaaauaaaugaaauucaaaaugaaauaaauauuguguugugcagcauuaaaaaaucaauaaaaauuaaaaaugagcaagaucuaaaaaaaaaaaaaaaaaaaaaaaaaaaaaaaaaaaaaaaaaaaaaaaaaaaaaaaaaaaaaaaaugcaucccccccccccccccccccccccccccccccaaaggcucuuuucagagccaccagaauu

SEQ ID NO: 14925 - RNA, 2180 nt, Artificial Sequence
  mRNA product Design f-4 comprising derived and/or modified sequence from HRSV(Memphis-37)__AIY60640.1__F_DSCav1_mut2 (opt6)
gggagagucccgcagucggcguccagcggcucugcuuguucgugugugugucguugcaggccuuauucaagcuuaccauggagcuuccaauauuaaaaacaaacgcuauaacaacuauacucgcagcaguuacacucugcuucgcauccucacaaaacauaacugaagaauuuuaccaauccacuugcucagccguaucaaaaggauaucuaggagcacuuagaaccggaugguauacaucagugauaacaauagaacuaagcaacauaaaagaaaacaagugcaacggaacugacgcaaaagucaaacuaaucaaacaagaacuagacaaauacaaaaacgcaguaacagaccuacaauuacuaaugcaaucaacaccagcagcaggaucagguucagccauaugcucagguaucgcuguaugcaaaguccuucaccuagaaggugaaguaaacaaaauuaaaaacgcccuacucaguacaaauaaagcugucguaaguuuaucaaacggaguaucaguccuuacauucaaaguauuagaccuaaaaaauuauauagacaaacaauuacuaccaauacucaacaaacaaucaugcucaauaccaaauauagaaaccguaauagaauuucagcaaaaaaauaacagauuacuagaaauaaccagagaauuuucagucaacgcaggagucacaacacccgucucaaccuacaugcuaaccaacucagaacuucuaucucuuaucaacgacaugcccauaaccaaugaucaaaaaaaauuaaugucuaauaacguucaaauaguaagacaacaaucauacucaauaaugugcauaaucaaagaagaaguauuagcauacguaguacaacuaccccuauauggaguaauagacacacccugcuggaaacuacacacauccccccucuguacaacaaacacuaaagaaggaucaaacauuugccuaacaagaacagaccgcggaugguacugcgacaacgcaggcuccguaucuuucuuuccacaagccgaaacuuguaaaguucaaucaaacagaguauuuugcgauacaaugaacuccuuaacauuaccuucagaaguaaaccuaugcaacauagacaucuucaacccaaaauacgacugcaaaauaaugaccucaaaaacagacguauccucaucagucauaaccuccuuaggagcaauaguaucauguuacggaaaaacaaaauguacagcaucaaauaaaaauagaggaauaauaaaaaccuucuccaacggaugcgacuacguauccaauaaaggaguagacaccguaucaguaggaaacacacuauacuguguaaacaaacaagaaggccaaucucuauauguaaaaggcgaaccaaucauaaauuuuuacgacccacuugucuuccccuccgacgaauuugacgcaagcauaucacaaguaaacgaaaaaaucaaccaaagccuagccuucauaaggaaaucugacgaauuacuucauaacguaaauguuggaaaaucaaccacaaacauaaugauaaccaccaucauaauuguaauaauaguaauacuacuacuacuaauugcaguaggacucuuccuauauugcaaagcucgcucaacaccaguuaccuuaucaaaagaccaacuaucuggaauaaacaacauagccuuuuccaacuaaggacuagugaagggaacacccaaauuuaauucagccuuaagcacaauuaauuaagagugaaacguaauuguacaagcaguuggucacccaccauagggcaugaucaacaccgcaaccuuuccuuuuucccccagugauucugaaaaaccccucuucccuucagcuugcuuagauguuccaaauuuaguaagcuuaaggcggccuacagaagaaaaagaaaaaaaaggccacaaaaguucccucucacuuucaguaaauaaaauaaaagcagcaacagaaauaaagaaauaaaugaaauucaaaaugaaauaaauauuguguugugcagcauuaaaaaaucaauaaaaauuaaaaaugagcaagaucuaaaaaaaaaaaaaaaaaaaaaaaaaaaaaaaaaaaaaaaaaaaaaaaaaaaaaaaaaaaaaaaaugcaucccccccccccccccccccccccccccccccaaaggcucuuuucagagccaccagaauu

SEQ ID NO: 14926 - RNA, 2180 nt, Artificial Sequence
  mRNA product Design f-4 comprising derived and/or modified sequence from HRSV(Memphis-37)__AIY60640.1__F_DSCav1_mut2 (opt11)
gggagagucccgcagucggcguccagcggcucugcuuguucgugugugugucguugcaggccuuauucaagcuuaccauggaacucccaauccuaaaaaccaacgccaucaccaccauccucgccgcugucaccuuaugcuuugccagcagccaaaacaucaccgaagaauuuuaccaaucaacaugcuccgccgucucaaaaggauaccucggcgcccuacgcaccggcugguacacaagcgucauaaccaucgagcucuccaacaucaaggaaaacaaaugcaauggaaccgacgccaaagucaaacuaaucaaacaagaacuagacaaguacaagaacgcagucaccgaccuccaacuccucaugcaguccacccccgcagcaggcucuggcucagcaauaugcuccggcaucgcugucugcaaaguccuacaccucgaaggcgaagucaacaaaaucaaaaacgcccuacuguccacaaacaaagccgucgucucccuauccaacggcgucucgguccuaaccuuuaagguucucgaucucaaaaauuacauagacaaacaacuacuccccauccucaacaaacaaucuugcucaauccccaacaucgaaaccgucaucgaguuccaacagaaaaacaacagacuacucgaaaucacccgcgaguucucagucaacgcgggcgucacaacacccgucagcaccuacaugcuaaccaacuccgaacuccucagccucauuaacgacaugcccaucaccaacgaccaaaagaaacuuauguccaacaacguucaaaucguccgccaacaauccuacuccaucaugugcaucaucaaagaagaaguacucgccuacguaguccaacugccccucuacggcgucaucgauaccccaugcuggaaacuacacaccagcccccucugcaccaccaacaccaaagaaggcuccaauaucugcuuaacccgcacagaccguggcugguacugcgauaacgccggcuccgucuccuucuucccccaagcagaaaccugcaaaguacaauccaaccgagucuucugugacaccaugaacucccuaacccuuccaucagaagucaaccucugcaacaucgacaucuucaaccccaaguacgacugcaaaaucaugacauccaaaaccgaugucucaagcagcgucauaaccucacucggcgcuaucguaagcugcuacggcaaaaccaaaugcaccgcaucaaacaaaaaccgcggaaucaucaaaaccuucagcaacggaugcgacuacguuuccaacaaaggcguagacaccgucuccgucggaaacacccucuacugcguaaacaaacaggaaggccaaucccucuacgucaaaggcgaacccaucauaaacuucuacgauccccuugucuucccguccgaugaguucgacgccuccaucucgcaagucaacgaaaagauaaaccaaucacuagcauucauccguaaauccgacgaacuccuccacaacgucaacgucggaaaauccaccaccaacauaaugaucaccaccauaaucaucgucaucaucguaauacuauuacuccucauagccgucggccucuuccuauauugcaaagcccgaucaacccccguaacccuuucuaaagaccaacuguccggaaucaacaacaucgcuuucagcaacugaggacuagugaagggaacacccaaauuuaauucagccuuaagcacaauuaauuaagagugaaacguaauuguacaagcaguuggucacccaccauagggcaugaucaacaccgcaaccuuuccuuuuucccccagugauucugaaaaaccccucuucccuucagcuugcuuagauguuccaaauuuaguaagcuuaaggcggccuacagaagaaaaagaaaaaaaaggccacaaaaguucccucucacuuucaguaaauaaaauaaaagcagcaacagaaauaaagaaauaaaugaaauucaaaaugaaauaaauauuguguugugcagcauuaaaaaaucaauaaaaauuaaaaaugagcaagaucuaaaaaaaaaaaaaaaaaaaaaaaaaaaaaaaaaaaaaaaaaaaaaaaaaaaaaaaaaaaaaaaaugcaucccccccccccccccccccccccccccccccaaaggcucuuuucagagccaccagaauu

SEQ ID NO: 14927 - RNA, 1956 nt, Artificial Sequence
  mRNA product Design f-5 comprising derived and/or modified sequence from HRSV(Memphis-37)__AIY60640.1__F_DSCav1_mut2 (opt1)
gggagacuuucccauucuguagcagaauuugguguugccuguggucuuggucccgcggagaagcuuaccauggagcugcccauccucaagaccaacgccaucaccacgauccuggccgcggugacccugugcuucgccagcucccagaacaucaccgaggaguucuaccagagcacgugcuccgccgucagcaagggcuaccucggcgcccugcgcaccgggugguacaccagcgugaucaccaucgagcuguccaacaucaaggagaacaagugcaacggcaccgacgccaaggugaagcucaucaagcaggagcuggacaaguacaagaacgcggucacggaccugcagcuccugaugcagagcaccccggccgccggcuccgggagcgcgaucugcuccggcaucgccgucugcaaggugcugcaccucgagggcgaggugaacaagaucaagaacgcccugcuguccaccaacaaggccgucgugagccucuccaacggggugagcguccugaccuucaaggugcuggaccucaagaacuacaucgacaagcagcugcugcccauccugaacaagcagagcugcuccauccccaacaucgagaccgucaucgaguuccagcagaagaacaaccgccuccuggagaucacgcgggaguucagcgugaacgcgggcgugaccacccccgucuccaccuacaugcugacgaacagcgagcuccugucccugaucaacgacaugccgaucaccaacgaccagaagaagcucaugagcaacaacgugcagaucgugcgccagcaguccuacagcaucaugugcaucaucaaggaggagguccuggccuacguggugcagcugccccucuacggggucaucgacacccccugcuggaagcugcacaccagcccccugugcacgaccaacaccaaggagggcuccaacaucugccucacccggacggaccgcgggugguacugcgacaacgccggcagcguguccuucuucccgcaggccgagaccugcaagguccagagcaaccggguguucugcgacaccaugaacucccugacccugcccagcgaggugaaccucugcaacaucgacaucuucaaccccaaguacgacugcaagaucaugacguccaagaccgacgucagcuccagcgugaucaccucccugggcgccaucgugagcugcuacgggaagaccaagugcacggcgagcaacaagaaccgcggcaucaucaagaccuucuccaacgggugcgacuacgucagcaacaagggcguggacaccguguccgucggcaacacccuguacugcgugaacaagcaggagggccagagccucuacgugaagggggagcccaucaucaacuucuacgacccgcuggucuuccccuccgacgaguucgacgccagcaucucccaggugaacgagaagaucaaccagagccuggccuucauccggaaguccgacgagcuccugcacaacgugaacgucggcaagagcaccacgaacaucaugaucaccaccaucaucaucgugaucaucgugauccugcugcuccugaucgccgucgggcuguuccucuacugcaaggcccgcuccacccccgugacgcugagcaaggaccagcuguccgggaucaacaacaucgcguucagcaacugaggacuaguacuggcugcaucucccuuuccucuguccuccauccuucucccaggauggugaagggggaccugguacccagugauccccaccccaggauccuaaaucaugacuuaccugcuaauaaaaacucauuggaaaagugagaagaucuaaaaaaaaaaaaaaaaaaaaaaaaaaaaaaaaaaaaaaaaaaaaaaaaaaaaaaaaaaaaaaaaugcaucccccccccccccccccccccccccccccccaaaggcucuuuucagagccaccagaauu

SEQ ID NO: 14928 - RNA, 1956 nt, Artificial Sequence
  mRNA product Design f-5 comprising derived and/or modified sequence from HRSV(Memphis-37)__AIY60640.1__F_DSCav1_mut2 (opt1)
gggagacuuucccauucuguagcagaauuugguguugccuguggucuuggucccgcggagaagcuuaccauggagcugcccauccucaagaccaacgccaucaccacgauccuggccgcggugacccugugcuucgccagcucccagaacaucaccgaggaguucuaccagagcacgugcuccgccgucagcaagggcuaccucggggcccugcgcaccggcugguacaccuccgugaucaccaucgagcugagcaacaucaaggagaacaagugcaacgggaccgacgccaaggugaagcucaucaagcaggagcuggacaaguacaagaacgcggucacggaccugcagcuccugaugcaguccaccccggccgccggcagcggguccgccaucugcagcggcaucgcggugugcaaggugcugcaccucgagggcgaggucaacaagaucaagaacgcccugcuguccaccaacaaggccguggugagccucuccaacggggucagcgugcugaccuucaaggugcuggaccucaagaacuacaucgacaagcagcugcugcccauccucaacaagcaguccugcagcauccccaacaucgagacggucaucgaguuccagcagaagaacaaccggcugcuggagaucacccgcgaguucuccgugaacgccggcgugaccacccccgucagcacguacaugcucaccaacuccgagcugcugagccucaucaacgacaugccgaucaccaacgaccagaagaagcugaugagcaacaacgugcagaucgugcggcagcaguccuacagcaucaugugcaucaucaaggaggagguccuggccuacguggugcagcucccccuguacggggucaucgacacccccugcuggaagcugcacacgagcccccucugcaccaccaacaccaaggagggcuccaacaucugccugacgcgcaccgaccgggggugguacugcgacaacgcgggcuccgugagcuucuucccgcaggccgagaccugcaaggugcaguccaaccgcgucuucugcgacaccaugaacagccugacgcuccccuccgaggugaaccugugcaacaucgacaucuucaaccccaaguacgacugcaagaucaugaccagcaagaccgacgucuccagcuccgugaucaccagccugggcgccaucguguccugcuacgggaagacgaagugcaccgccagcaacaagaaccggggcaucaucaagaccuucuccaacgggugcgacuacgucagcaacaagggcguggacaccguguccgucggcaacacgcucuacugcgugaacaagcaggaggggcagagccuguacgugaagggcgagcccaucaucaacuucuacgacccgcuggucuuccccagcgacgaguucgacgccuccaucagccaggugaacgagaagaucaaccagucccucgcguucauccgcaagagcgacgagcugcugcacaacgugaacgucgggaaguccaccaccaacaucaugaucaccaccaucaucaucgugaucaucgugauccuccugcugcucaucgccgucggccuguuccuguacugcaaggcccggagcacgcccgugacccuguccaaggaccagcucagcgggaucaacaacaucgccuucuccaacugaggacuaguacuggcugcaucucccuuuccucuguccuccauccuucucccaggauggugaagggggaccugguacccagugauccccaccccaggauccuaaaucaugacuuaccugcuaauaaaaacucauuggaaaagugagaagaucuaaaaaaaaaaaaaaaaaaaaaaaaaaaaaaaaaaaaaaaaaaaaaaaaaaaaaaaaaaaaaaaaugcaucccccccccccccccccccccccccccccccaaaggcucuuuucagagccaccagaauu

SEQ ID NO: 14929 - RNA, 1956 nt, Artificial Sequence
  mRNA product Design f-5 comprising derived and/or modified sequence from HRSV(Memphis-37)__AIY60640.1__F_DSCav1_mut2 (opt2)
gggagacuuucccauucuguagcagaauuugguguugccuguggucuuggucccgcggagaagcuuaccauggagcuccccauccucaagaccaacgccaucaccaccauccucgccgccgucacccucugcuucgccuccucccagaacaucaccgaggaguucuaccaguccaccugcuccgccgucuccaagggcuaccucggcgcccuccgcaccggcugguacaccuccgucaucaccaucgagcucuccaacaucaaggagaacaagugcaacggcaccgacgccaaggucaagcucaucaagcaggagcucgacaaguacaagaacgccgucaccgaccuccagcuccucaugcaguccacccccgccgccggcuccggcuccgccaucugcuccggcaucgccgucugcaagguccuccaccucgagggcgaggucaacaagaucaagaacgcccuccucuccaccaacaaggccgucgucucccucuccaacggcgucuccguccucaccuucaagguccucgaccucaagaacuacaucgacaagcagcuccuccccauccucaacaagcaguccugcuccauccccaacaucgagaccgucaucgaguuccagcagaagaacaaccgccuccucgagaucacccgcgaguucuccgucaacgccggcgucaccacccccgucuccaccuacaugcucaccaacuccgagcuccucucccucaucaacgacaugcccaucaccaacgaccagaagaagcucauguccaacaacguccagaucguccgccagcaguccuacuccaucaugugcaucaucaaggaggagguccucgccuacgucguccagcucccccucuacggcgucaucgacacccccugcuggaagcuccacaccuccccccucugcaccaccaacaccaaggagggcuccaacaucugccucacccgcaccgaccgcggcugguacugcgacaacgccggcuccgucuccuucuucccccaggccgagaccugcaagguccaguccaaccgcgucuucugcgacaccaugaacucccucacccuccccuccgaggucaaccucugcaacaucgacaucuucaaccccaaguacgacugcaagaucaugaccuccaagaccgacgucuccuccuccgucaucaccucccucggcgccaucgucuccugcuacggcaagaccaagugcaccgccuccaacaagaaccgcggcaucaucaagaccuucuccaacggcugcgacuacgucuccaacaagggcgucgacaccgucuccgucggcaacacccucuacugcgucaacaagcaggagggccagucccucuacgucaagggcgagcccaucaucaacuucuacgacccccucgucuuccccuccgacgaguucgacgccuccaucucccaggucaacgagaagaucaaccagucccucgccuucauccgcaaguccgacgagcuccuccacaacgucaacgucggcaaguccaccaccaacaucaugaucaccaccaucaucaucgucaucaucgucauccuccuccuccucaucgccgucggccucuuccucuacugcaaggcccgcuccacccccgucacccucuccaaggaccagcucuccggcaucaacaacaucgccuucuccaacugaggacuaguacuggcugcaucucccuuuccucuguccuccauccuucucccaggauggugaagggggaccugguacccagugauccccaccccaggauccuaaaucaugacuuaccugcuaauaaaaacucauuggaaaagugagaagaucuaaaaaaaaaaaaaaaaaaaaaaaaaaaaaaaaaaaaaaaaaaaaaaaaaaaaaaaaaaaaaaaaugcaucccccccccccccccccccccccccccccccaaaggcucuuuucagagccaccagaauu

SEQ ID NO: 14930 - RNA, 1956 nt, Artificial Sequence
  mRNA product Design f-5 comprising derived and/or modified sequence from HRSV(Memphis-37)__AIY60640.1__F_DSCav1_mut2 (opt3)
gggagacuuucccauucuguagcagaauuugguguugccuguggucuuggucccgcggagaagcuuaccauggagcugcccauccucaagaccaacgccauuacaacuauacuugcugcagugacgcugugcuucgccagcucccagaauaucaccgaagaguuuuaccaaucuacauguucagcggucaguaaaggcuauuugggggcuuuaagaacuggaugguacaccagcguuauuacaaucgaacuguccaacauuaaggagaauaaaugcaacgguaccgacgccaaggugaaacuaaucaagcaggaacucgauaaguauaaaaaugcaguaacugaccugcagcuucugaugcagucuacuccugccgcuggcucggggucagcaauauguagcggaaucgccgugugcaaggucuugcaccucgagggcgaggugaacaaaauuaagaaugcucugcugaguaccaacaaagccguugugucccucucuaauggugucagcguguuaacguucaagguacuggaucuuaagaacuacaucgacaaacaauugcugccaauucuaaauaagcaguccuguucaaucccgaacauagaaacuguuauugaguuucagcagaaaaauaacaggcuccuggaaaucacccgggaguucagugugaaugcgggggucacaacucccgugagcaccuauaugcuuacaaacucugagcuguugucccucauuaacgauaugccuaucaccaaugaccaaaagaaacugaugucaaacaaugugcagaucguccgccagcagagcuacaguauuaugugcauaaucaaggaagagguuuuagcauaugugguacaacugccacucuacggagugauugauacgcccuguuggaaacuucauacuucuccucugugcacaaccaacacuaaggaaggcuccaauaucuguuugacacgaaccgaccguggcugguacugcgauaacgccgggagcgucucguuuuucccacaggcugagacguguaaggugcagucuaauagaguuuucugcgacaccaugaacucccuaacacugcccucagaagugaaucucugcaacauagauauuuucaauccuaaauaugacuguaagaucaugacaaguaaaaccgaugucagcuccucugugaucacaagccugggagccauuguaucaugcuacgguaagacuaaauguaccgcaaguaacaagaauaggggcaucauuaagacauuuuccaacgggugcgacuauguuagcaauaaaggaguggacaccgucucugugggcaacacucuuuacugugucaacaagcaagagggucagucacuguaugugaaaggggagccaauaaucaauuucuacgauccguugguuuuucccagugacgaauuugaugcuagcauuucccaggugaacgagaagaucaaucagucucucgccuuuauccggaaaucggacgaacuguuacacaacguaaaugucggaaagagcacgacaaacauuaugauaaccacuaucauuaucgugauuaucguuauacugcuacuccugaucgcggugggccuuuucuuguauugcaaggcccgcuccaccccugucacacugucaaaagaucaacucaguggcauuaauaacaucgcauucucuaauugaggacuaguacuggcugcaucucccuuuccucuguccuccauccuucucccaggauggugaagggggaccugguacccagugauccccaccccaggauccuaaaucaugacuuaccugcuaauaaaaacucauuggaaaagugagaagaucuaaaaaaaaaaaaaaaaaaaaaaaaaaaaaaaaaaaaaaaaaaaaaaaaaaaaaaaaaaaaaaaaugcaucccccccccccccccccccccccccccccccaaaggcucuuuucagagccaccagaauu

SEQ ID NO: 14931 - RNA, 1956 nt, Artificial Sequence
  mRNA product Design f-5 comprising derived and/or modified sequence from HRSV(Memphis-37)__AIY60640.1__F_DSCav1_mut2 (opt4)
gggagacuuucccauucuguagcagaauuugguguugccuguggucuuggucccgcggagaagcuuaccauggagcugcccauccugaagaccaacgccaucaccaccauccuggccgccgugacccugugcuucgccagcagccagaacaucaccgaggaguucuaccagagcaccugcagcgccgugagcaagggcuaccugggcgcccugagaaccggcugguacaccagcgugaucaccaucgagcugagcaacaucaaggagaacaagugcaacggcaccgacgccaaggugaagcugaucaagcaggagcuggacaaguacaagaacgccgugaccgaccugcagcugcugaugcagagcacccccgccgccggcagcggcagcgccaucugcagcggcaucgccgugugcaaggugcugcaccuggagggcgaggugaacaagaucaagaacgcccugcugagcaccaacaaggccguggugagccugagcaacggcgugagcgugcugaccuucaaggugcuggaccugaagaacuacaucgacaagcagcugcugcccauccugaacaagcagagcugcagcauccccaacaucgagaccgugaucgaguuccagcagaagaacaacagacugcuggagaucaccagagaguucagcgugaacgccggcgugaccacccccgugagcaccuacaugcugaccaacagcgagcugcugagccugaucaacgacaugcccaucaccaacgaccagaagaagcugaugagcaacaacgugcagaucgugagacagcagagcuacagcaucaugugcaucaucaaggaggaggugcuggccuacguggugcagcugccccuguacggcgugaucgacacccccugcuggaagcugcacaccagcccccugugcaccaccaacaccaaggagggcagcaacaucugccugaccagaaccgacagaggcugguacugcgacaacgccggcagcgugagcuucuucccccaggccgagaccugcaaggugcagagcaacagaguguucugcgacaccaugaacagccugacccugcccagcgaggugaaccugugcaacaucgacaucuucaaccccaaguacgacugcaagaucaugaccagcaagaccgacgugagcagcagcgugaucaccagccugggcgccaucgugagcugcuacggcaagaccaagugcaccgccagcaacaagaacagaggcaucaucaagaccuucagcaacggcugcgacuacgugagcaacaagggcguggacaccgugagcgugggcaacacccuguacugcgugaacaagcaggagggccagagccuguacgugaagggcgagcccaucaucaacuucuacgacccccugguguuccccagcgacgaguucgacgccagcaucagccaggugaacgagaagaucaaccagagccuggccuucaucagaaagagcgacgagcugcugcacaacgugaacgugggcaagagcaccaccaacaucaugaucaccaccaucaucaucgugaucaucgugauccugcugcugcugaucgccgugggccuguuccuguacugcaaggccagaagcacccccgugacccugagcaaggaccagcugagcggcaucaacaacaucgccuucagcaacugaggacuaguacuggcugcaucucccuuuccucuguccuccauccuucucccaggauggugaagggggaccugguacccagugauccccaccccaggauccuaaaucaugacuuaccugcuaauaaaaacucauuggaaaagugagaagaucuaaaaaaaaaaaaaaaaaaaaaaaaaaaaaaaaaaaaaaaaaaaaaaaaaaaaaaaaaaaaaaaaugcaucccccccccccccccccccccccccccccccaaaggcucuuuucagagccaccagaauu

SEQ ID NO: 14932 - RNA, 1956 nt, Artificial Sequence
  mRNA product Design f-5 comprising derived and/or modified sequence from HRSV(Memphis-37)__AIY60640.1__F_DSCav1_mut2 (opt5)
gggagacuuucccauucuguagcagaauuugguguugccuguggucuuggucccgcggagaagcuuaccauggagcugcccauccucaagaccaacgccauuacaacgauccuggcugccgugacccuuugcuucgcgagcucccagaauauuacagaagaguuuuaccaaucuaccuguagcgcugucuccaaaggcuaucugggggcccucagaacaggaugguacaccucuguuaucacaauugaacugagcaacaucaaggagaauaaaugcaacggcaccgacgccaaggugaaacuuaucaagcaggaacuggauaaguauaaaaaugcugugacggaccuccagcugcugaugcaguccaccccugccgcugggucuggaagcgccauuuguuccggcaucgcggucugcaaggugcuccaccuggagggggagguuaacaaaauuaagaaugcccuucugagcacaaacaaagcuguggucucucucuccaauggagugagcguucugaccuucaaggugcuugaucugaagaacuacaucgacaaacaacuccugccgauucugaauaagcagucuuguuccauccccaacauugaaacagucaucgaguuucagcagaaaaauaaccggcuccuggaaaucacccgcgaguucagcgugaaugccggcgugacgacaccugucucuaccuauaugcuuacaaacuccgagcugcucagccugauuaacgauaugcccaucaccaaugaccaaaagaaacuuauguccaacaauguucagauugugagacagcagucuuacagcaucaugugcauuaucaaggaagaggugcuggcuuaugucgugcaacucccucuguacggcguuaucgauacccccuguuggaaacugcauacauccccucucugcacgaccaacacaaaggaagggagcaauauuugucugacccggacagaccgcggaugguacugcgauaacgccggcucuguguccuuuuucccgcaggcggagaccuguaagguccagagcaauagaguguuuugcgacacgaugaacucucuuacacugcccagcgaaguuaaucucugcaacaucgauauuuucaauccuaaauaugacuguaagaucaugaccuccaaaaccgaugugucuagcuccgucauuacaagccugggggccaucgugucuugcuacggaaagaccaaauguacagcuuccaacaagaaucggggcaucauuaagacguuuagcaacgggugcgacuaugucucuaauaaaggaguggacaccguuuccgugggcaacacacuuuacugugucaacaagcaagagggccagagccuguaugugaaaggggagcccaucauuaauuucuacgauccucucguuuuucccuccgacgaguucgaugccucuaucagccaggugaacgaaaagauuaaucagucccuggcuuuuauccgcaaaucugacgaacugcuccacaacgucaaugugggaaagagcaccacaaacauuaugaucaccacgaucauuaucgugauuaucguuauucugcuucugcucaucgccgucggccuguuccuguauugcaaggccagauccaccccggugacacuuagcaaagaucaacucucugggaucaauaacauugcuuucuccaauugaggacuaguacuggcugcaucucccuuuccucuguccuccauccuucucccaggauggugaagggggaccugguacccagugauccccaccccaggauccuaaaucaugacuuaccugcuaauaaaaacucauuggaaaagugagaagaucuaaaaaaaaaaaaaaaaaaaaaaaaaaaaaaaaaaaaaaaaaaaaaaaaaaaaaaaaaaaaaaaaugcaucccccccccccccccccccccccccccccccaaaggcucuuuucagagccaccagaauu

SEQ ID NO: 14933 - RNA, 1956 nt, Artificial Sequence
  mRNA product Design f-5 comprising derived and/or modified sequence from HRSV(Memphis-37)__AIY60640.1__F_DSCav1_mut2 (opt6)
gggagacuuucccauucuguagcagaauuugguguugccuguggucuuggucccgcggagaagcuuaccauggagcuuccaauauuaaaaacaaacgcuauaacaacuauacucgcagcaguuacacucugcuucgcauccucacaaaacauaacugaagaauuuuaccaauccacuugcucagccguaucaaaaggauaucuaggagcacuuagaaccggaugguauacaucagugauaacaauagaacuaagcaacauaaaagaaaacaagugcaacggaacugacgcaaaagucaaacuaaucaaacaagaacuagacaaauacaaaaacgcaguaacagaccuacaauuacuaaugcaaucaacaccagcagcaggaucagguucagccauaugcucagguaucgcuguaugcaaaguccuucaccuagaaggugaaguaaacaaaauuaaaaacgcccuacucaguacaaauaaagcugucguaaguuuaucaaacggaguaucaguccuuacauucaaaguauuagaccuaaaaaauuauauagacaaacaauuacuaccaauacucaacaaacaaucaugcucaauaccaaauauagaaaccguaauagaauuucagcaaaaaaauaacagauuacuagaaauaaccagagaauuuucagucaacgcaggagucacaacacccgucucaaccuacaugcuaaccaacucagaacuucuaucucuuaucaacgacaugcccauaaccaaugaucaaaaaaaauuaaugucuaauaacguucaaauaguaagacaacaaucauacucaauaaugugcauaaucaaagaagaaguauuagcauacguaguacaacuaccccuauauggaguaauagacacacccugcuggaaacuacacacauccccccucuguacaacaaacacuaaagaaggaucaaacauuugccuaacaagaacagaccgcggaugguacugcgacaacgcaggcuccguaucuuucuuuccacaagccgaaacuuguaaaguucaaucaaacagaguauuuugcgauacaaugaacuccuuaacauuaccuucagaaguaaaccuaugcaacauagacaucuucaacccaaaauacgacugcaaaauaaugaccucaaaaacagacguauccucaucagucauaaccuccuuaggagcaauaguaucauguuacggaaaaacaaaauguacagcaucaaauaaaaauagaggaauaauaaaaaccuucuccaacggaugcgacuacguauccaauaaaggaguagacaccguaucaguaggaaacacacuauacuguguaaacaaacaagaaggccaaucucuauauguaaaaggcgaaccaaucauaaauuuuuacgacccacuugucuuccccuccgacgaauuugacgcaagcauaucacaaguaaacgaaaaaaucaaccaaagccuagccuucauaaggaaaucugacgaauuacuucauaacguaaauguuggaaaaucaaccacaaacauaaugauaaccaccaucauaauuguaauaauaguaauacuacuacuacuaauugcaguaggacucuuccuauauugcaaagcucgcucaacaccaguuaccuuaucaaaagaccaacuaucuggaauaaacaacauagccuuuuccaacuaaggacuaguacuggcugcaucucccuuuccucuguccuccauccuucucccaggauggugaagggggaccugguacccagugauccccaccccaggauccuaaaucaugacuuaccugcuaauaaaaacucauuggaaaagugagaagaucuaaaaaaaaaaaaaaaaaaaaaaaaaaaaaaaaaaaaaaaaaaaaaaaaaaaaaaaaaaaaaaaaugcaucccccccccccccccccccccccccccccccaaaggcucuuuucagagccaccagaauu

SEQ ID NO: 14934 - RNA, 1956 nt, Artificial Sequence
  mRNA product Design f-5 comprising derived and/or modified sequence from HRSV(Memphis-37)__AIY60640.1__F_DSCav1_mut2 (opt11)
gggagacuuucccauucuguagcagaauuugguguugccuguggucuuggucccgcggagaagcuuaccauggaacucccaauccuaaaaaccaacgccaucaccaccauccucgccgcugucaccuuaugcuuugccagcagccaaaacaucaccgaagaauuuuaccaaucaacaugcuccgccgucucaaaaggauaccucggcgcccuacgcaccggcugguacacaagcgucauaaccaucgagcucuccaacaucaaggaaaacaaaugcaauggaaccgacgccaaagucaaacuaaucaaacaagaacuagacaaguacaagaacgcagucaccgaccuccaacuccucaugcaguccacccccgcagcaggcucuggcucagcaauaugcuccggcaucgcugucugcaaaguccuacaccucgaaggcgaagucaacaaaaucaaaaacgcccuacuguccacaaacaaagccgucgucucccuauccaacggcgucucgguccuaaccuuuaagguucucgaucucaaaaauuacauagacaaacaacuacuccccauccucaacaaacaaucuugcucaauccccaacaucgaaaccgucaucgaguuccaacagaaaaacaacagacuacucgaaaucacccgcgaguucucagucaacgcgggcgucacaacacccgucagcaccuacaugcuaaccaacuccgaacuccucagccucauuaacgacaugcccaucaccaacgaccaaaagaaacuuauguccaacaacguucaaaucguccgccaacaauccuacuccaucaugugcaucaucaaagaagaaguacucgccuacguaguccaacugccccucuacggcgucaucgauaccccaugcuggaaacuacacaccagcccccucugcaccaccaacaccaaagaaggcuccaauaucugcuuaacccgcacagaccguggcugguacugcgauaacgccggcuccgucuccuucuucccccaagcagaaaccugcaaaguacaauccaaccgagucuucugugacaccaugaacucccuaacccuuccaucagaagucaaccucugcaacaucgacaucuucaaccccaaguacgacugcaaaaucaugacauccaaaaccgaugucucaagcagcgucauaaccucacucggcgcuaucguaagcugcuacggcaaaaccaaaugcaccgcaucaaacaaaaaccgcggaaucaucaaaaccuucagcaacggaugcgacuacguuuccaacaaaggcguagacaccgucuccgucggaaacacccucuacugcguaaacaaacaggaaggccaaucccucuacgucaaaggcgaacccaucauaaacuucuacgauccccuugucuucccguccgaugaguucgacgccuccaucucgcaagucaacgaaaagauaaaccaaucacuagcauucauccguaaauccgacgaacuccuccacaacgucaacgucggaaaauccaccaccaacauaaugaucaccaccauaaucaucgucaucaucguaauacuauuacuccucauagccgucggccucuuccuauauugcaaagcccgaucaacccccguaacccuuucuaaagaccaacuguccggaaucaacaacaucgcuuucagcaacugaggacuaguacuggcugcaucucccuuuccucuguccuccauccuucucccaggauggugaagggggaccugguacccagugauccccaccccaggauccuaaaucaugacuuaccugcuaauaaaaacucauuggaaaagugagaagaucuaaaaaaaaaaaaaaaaaaaaaaaaaaaaaaaaaaaaaaaaaaaaaaaaaaaaaaaaaaaaaaaaugcaucccccccccccccccccccccccccccccccaaaggcucuuuucagagccaccagaauu

SEQ ID NO: 14935 - RNA, 1952 nt, Artificial Sequence
  mRNA product Design g-1 comprising derived and/or modified sequence from HRSV(Memphis-37)__AIY60640.1__F_DSCav1_mut2 (opt1)
gggagacuuucccauucuguagcagaauuugguguugccuguggucuuggucccgcggagaagcuuaccauggagcugcccauccucaagaccaacgccaucaccacgauccuggccgcggugacccugugcuucgccagcucccagaacaucaccgaggaguucuaccagagcacgugcuccgccgucagcaagggcuaccucggcgcccugcgcaccgggugguacaccagcgugaucaccaucgagcuguccaacaucaaggagaacaagugcaacggcaccgacgccaaggugaagcucaucaagcaggagcuggacaaguacaagaacgcggucacggaccugcagcuccugaugcagagcaccccggccgccggcuccgggagcgcgaucugcuccggcaucgccgucugcaaggugcugcaccucgagggcgaggugaacaagaucaagaacgcccugcuguccaccaacaaggccgucgugagccucuccaacggggugagcguccugaccuucaaggugcuggaccucaagaacuacaucgacaagcagcugcugcccauccugaacaagcagagcugcuccauccccaacaucgagaccgucaucgaguuccagcagaagaacaaccgccuccuggagaucacgcgggaguucagcgugaacgcgggcgugaccacccccgucuccaccuacaugcugacgaacagcgagcuccugucccugaucaacgacaugccgaucaccaacgaccagaagaagcucaugagcaacaacgugcagaucgugcgccagcaguccuacagcaucaugugcaucaucaaggaggagguccuggccuacguggugcagcugccccucuacggggucaucgacacccccugcuggaagcugcacaccagcccccugugcacgaccaacaccaaggagggcuccaacaucugccucacccggacggaccgcgggugguacugcgacaacgccggcagcguguccuucuucccgcaggccgagaccugcaagguccagagcaaccggguguucugcgacaccaugaacucccugacccugcccagcgaggugaaccucugcaacaucgacaucuucaaccccaaguacgacugcaagaucaugacguccaagaccgacgucagcuccagcgugaucaccucccugggcgccaucgugagcugcuacgggaagaccaagugcacggcgagcaacaagaaccgcggcaucaucaagaccuucuccaacgggugcgacuacgucagcaacaagggcguggacaccguguccgucggcaacacccuguacugcgugaacaagcaggagggccagagccucuacgugaagggggagcccaucaucaacuucuacgacccgcuggucuuccccuccgacgaguucgacgccagcaucucccaggugaacgagaagaucaaccagagccuggccuucauccggaaguccgacgagcuccugcacaacgugaacgucggcaagagcaccacgaacaucaugaucaccaccaucaucaucgugaucaucgugauccugcugcuccugaucgccgucgggcuguuccucuacugcaaggcccgcuccacccccgugacgcugagcaaggaccagcuguccgggaucaacaacaucgcguucagcaacugaggacuaguggaagcauuuuccuggcugauuaaaagaaauuacucagcuauggucaucuguuccuguuagaaggcuaugcagcauauuauauacuaugcgcauguuaugaaaugcauaauaaaaaauuuuaaaaaaucuaaaagaucuaaaaaaaaaaaaaaaaaaaaaaaaaaaaaaaaaaaaaaaaaaaaaaaaaaaaaaaaaaaaaaaaugcaucccccccccccccccccccccccccccccccaaaggcucuuuucagagccaccagaauu

SEQ ID NO: 14936 - RNA, 1952 nt, Artificial Sequence
  mRNA product Design g-1 comprising derived and/or modified sequence from HRSV(Memphis-37)__AIY60640.1__F_DSCav1_mut2 (opt1)
gggagacuuucccauucuguagcagaauuugguguugccuguggucuuggucccgcggagaagcuuaccauggagcugcccauccucaagaccaacgccaucaccacgauccuggccgcggugacccugugcuucgccagcucccagaacaucaccgaggaguucuaccagagcacgugcuccgccgucagcaagggcuaccucggggcccugcgcaccggcugguacaccuccgugaucaccaucgagcugagcaacaucaaggagaacaagugcaacgggaccgacgccaaggugaagcucaucaagcaggagcuggacaaguacaagaacgcggucacggaccugcagcuccugaugcaguccaccccggccgccggcagcggguccgccaucugcagcggcaucgcggugugcaaggugcugcaccucgagggcgaggucaacaagaucaagaacgcccugcuguccaccaacaaggccguggugagccucuccaacggggucagcgugcugaccuucaaggugcuggaccucaagaacuacaucgacaagcagcugcugcccauccucaacaagcaguccugcagcauccccaacaucgagacggucaucgaguuccagcagaagaacaaccggcugcuggagaucacccgcgaguucuccgugaacgccggcgugaccacccccgucagcacguacaugcucaccaacuccgagcugcugagccucaucaacgacaugccgaucaccaacgaccagaagaagcugaugagcaacaacgugcagaucgugcggcagcaguccuacagcaucaugugcaucaucaaggaggagguccuggccuacguggugcagcucccccuguacggggucaucgacacccccugcuggaagcugcacacgagcccccucugcaccaccaacaccaaggagggcuccaacaucugccugacgcgcaccgaccgggggugguacugcgacaacgcgggcuccgugagcuucuucccgcaggccgagaccugcaaggugcaguccaaccgcgucuucugcgacaccaugaacagccugacgcuccccuccgaggugaaccugugcaacaucgacaucuucaaccccaaguacgacugcaagaucaugaccagcaagaccgacgucuccagcuccgugaucaccagccugggcgccaucguguccugcuacgggaagacgaagugcaccgccagcaacaagaaccggggcaucaucaagaccuucuccaacgggugcgacuacgucagcaacaagggcguggacaccguguccgucggcaacacgcucuacugcgugaacaagcaggaggggcagagccuguacgugaagggcgagcccaucaucaacuucuacgacccgcuggucuuccccagcgacgaguucgacgccuccaucagccaggugaacgagaagaucaaccagucccucgcguucauccgcaagagcgacgagcugcugcacaacgugaacgucgggaaguccaccaccaacaucaugaucaccaccaucaucaucgugaucaucgugauccuccugcugcucaucgccgucggccuguuccuguacugcaaggcccggagcacgcccgugacccuguccaaggaccagcucagcgggaucaacaacaucgccuucuccaacugaggacuaguggaagcauuuuccuggcugauuaaaagaaauuacucagcuauggucaucuguuccuguuagaaggcuaugcagcauauuauauacuaugcgcauguuaugaaaugcauaauaaaaaauuuuaaaaaaucuaaaagaucuaaaaaaaaaaaaaaaaaaaaaaaaaaaaaaaaaaaaaaaaaaaaaaaaaaaaaaaaaaaaaaaaugcaucccccccccccccccccccccccccccccccaaaggcucuuuucagagccaccagaauu

SEQ ID NO: 14937 - RNA, 1952 nt, Artificial Sequence
  mRNA product Design g-1 comprising derived and/or modified sequence from HRSV(Memphis-37)__AIY60640.1__F_DSCav1_mut2 (opt2)
gggagacuuucccauucuguagcagaauuugguguugccuguggucuuggucccgcggagaagcuuaccauggagcuccccauccucaagaccaacgccaucaccaccauccucgccgccgucacccucugcuucgccuccucccagaacaucaccgaggaguucuaccaguccaccugcuccgccgucuccaagggcuaccucggcgcccuccgcaccggcugguacaccuccgucaucaccaucgagcucuccaacaucaaggagaacaagugcaacggcaccgacgccaaggucaagcucaucaagcaggagcucgacaaguacaagaacgccgucaccgaccuccagcuccucaugcaguccacccccgccgccggcuccggcuccgccaucugcuccggcaucgccgucugcaagguccuccaccucgagggcgaggucaacaagaucaagaacgcccuccucuccaccaacaaggccgucgucucccucuccaacggcgucuccguccucaccuucaagguccucgaccucaagaacuacaucgacaagcagcuccuccccauccucaacaagcaguccugcuccauccccaacaucgagaccgucaucgaguuccagcagaagaacaaccgccuccucgagaucacccgcgaguucuccgucaacgccggcgucaccacccccgucuccaccuacaugcucaccaacuccgagcuccucucccucaucaacgacaugcccaucaccaacgaccagaagaagcucauguccaacaacguccagaucguccgccagcaguccuacuccaucaugugcaucaucaaggaggagguccucgccuacgucguccagcucccccucuacggcgucaucgacacccccugcuggaagcuccacaccuccccccucugcaccaccaacaccaaggagggcuccaacaucugccucacccgcaccgaccgcggcugguacugcgacaacgccggcuccgucuccuucuucccccaggccgagaccugcaagguccaguccaaccgcgucuucugcgacaccaugaacucccucacccuccccuccgaggucaaccucugcaacaucgacaucuucaaccccaaguacgacugcaagaucaugaccuccaagaccgacgucuccuccuccgucaucaccucccucggcgccaucgucuccugcuacggcaagaccaagugcaccgccuccaacaagaaccgcggcaucaucaagaccuucuccaacggcugcgacuacgucuccaacaagggcgucgacaccgucuccgucggcaacacccucuacugcgucaacaagcaggagggccagucccucuacgucaagggcgagcccaucaucaacuucuacgacccccucgucuuccccuccgacgaguucgacgccuccaucucccaggucaacgagaagaucaaccagucccucgccuucauccgcaaguccgacgagcuccuccacaacgucaacgucggcaaguccaccaccaacaucaugaucaccaccaucaucaucgucaucaucgucauccuccuccuccucaucgccgucggccucuuccucuacugcaaggcccgcuccacccccgucacccucuccaaggaccagcucuccggcaucaacaacaucgccuucuccaacugaggacuaguggaagcauuuuccuggcugauuaaaagaaauuacucagcuauggucaucuguuccuguuagaaggcuaugcagcauauuauauacuaugcgcauguuaugaaaugcauaauaaaaaauuuuaaaaaaucuaaaagaucuaaaaaaaaaaaaaaaaaaaaaaaaaaaaaaaaaaaaaaaaaaaaaaaaaaaaaaaaaaaaaaaaugcaucccccccccccccccccccccccccccccccaaaggcucuuuucagagccaccagaauu

SEQ ID NO: 14938 - RNA, 1952 nt, Artificial Sequence
  mRNA product Design g-1 comprising derived and/or modified sequence from HRSV(Memphis-37)__AIY60640.1__F_DSCav1_mut2 (opt3)
gggagacuuucccauucuguagcagaauuugguguugccuguggucuuggucccgcggagaagcuuaccauggagcugcccauccucaagaccaacgccauuacaacuauacuugcugcagugacgcugugcuucgccagcucccagaauaucaccgaagaguuuuaccaaucuacauguucagcggucaguaaaggcuauuugggggcuuuaagaacuggaugguacaccagcguuauuacaaucgaacuguccaacauuaaggagaauaaaugcaacgguaccgacgccaaggugaaacuaaucaagcaggaacucgauaaguauaaaaaugcaguaacugaccugcagcuucugaugcagucuacuccugccgcuggcucggggucagcaauauguagcggaaucgccgugugcaaggucuugcaccucgagggcgaggugaacaaaauuaagaaugcucugcugaguaccaacaaagccguugugucccucucuaauggugucagcguguuaacguucaagguacuggaucuuaagaacuacaucgacaaacaauugcugccaauucuaaauaagcaguccuguucaaucccgaacauagaaacuguuauugaguuucagcagaaaaauaacaggcuccuggaaaucacccgggaguucagugugaaugcgggggucacaacucccgugagcaccuauaugcuuacaaacucugagcuguugucccucauuaacgauaugccuaucaccaaugaccaaaagaaacugaugucaaacaaugugcagaucguccgccagcagagcuacaguauuaugugcauaaucaaggaagagguuuuagcauaugugguacaacugccacucuacggagugauugauacgcccuguuggaaacuucauacuucuccucugugcacaaccaacacuaaggaaggcuccaauaucuguuugacacgaaccgaccguggcugguacugcgauaacgccgggagcgucucguuuuucccacaggcugagacguguaaggugcagucuaauagaguuuucugcgacaccaugaacucccuaacacugcccucagaagugaaucucugcaacauagauauuuucaauccuaaauaugacuguaagaucaugacaaguaaaaccgaugucagcuccucugugaucacaagccugggagccauuguaucaugcuacgguaagacuaaauguaccgcaaguaacaagaauaggggcaucauuaagacauuuuccaacgggugcgacuauguuagcaauaaaggaguggacaccgucucugugggcaacacucuuuacugugucaacaagcaagagggucagucacuguaugugaaaggggagccaauaaucaauuucuacgauccguugguuuuucccagugacgaauuugaugcuagcauuucccaggugaacgagaagaucaaucagucucucgccuuuauccggaaaucggacgaacuguuacacaacguaaaugucggaaagagcacgacaaacauuaugauaaccacuaucauuaucgugauuaucguuauacugcuacuccugaucgcggugggccuuuucuuguauugcaaggcccgcuccaccccugucacacugucaaaagaucaacucaguggcauuaauaacaucgcauucucuaauugaggacuaguggaagcauuuuccuggcugauuaaaagaaauuacucagcuauggucaucuguuccuguuagaaggcuaugcagcauauuauauacuaugcgcauguuaugaaaugcauaauaaaaaauuuuaaaaaaucuaaaagaucuaaaaaaaaaaaaaaaaaaaaaaaaaaaaaaaaaaaaaaaaaaaaaaaaaaaaaaaaaaaaaaaaugcaucccccccccccccccccccccccccccccccaaaggcucuuuucagagccaccagaauu

SEQ ID NO: 14939 - RNA, 1952 nt, Artificial Sequence
  mRNA product Design g-1 comprising derived and/or modified sequence from HRSV(Memphis-37)__AIY60640.1__F_DSCav1_mut2 (opt4)
gggagacuuucccauucuguagcagaauuugguguugccuguggucuuggucccgcggagaagcuuaccauggagcugcccauccugaagaccaacgccaucaccaccauccuggccgccgugacccugugcuucgccagcagccagaacaucaccgaggaguucuaccagagcaccugcagcgccgugagcaagggcuaccugggcgcccugagaaccggcugguacaccagcgugaucaccaucgagcugagcaacaucaaggagaacaagugcaacggcaccgacgccaaggugaagcugaucaagcaggagcuggacaaguacaagaacgccgugaccgaccugcagcugcugaugcagagcacccccgccgccggcagcggcagcgccaucugcagcggcaucgccgugugcaaggugcugcaccuggagggcgaggugaacaagaucaagaacgcccugcugagcaccaacaaggccguggugagccugagcaacggcgugagcgugcugaccuucaaggugcuggaccugaagaacuacaucgacaagcagcugcugcccauccugaacaagcagagcugcagcauccccaacaucgagaccgugaucgaguuccagcagaagaacaacagacugcuggagaucaccagagaguucagcgugaacgccggcgugaccacccccgugagcaccuacaugcugaccaacagcgagcugcugagccugaucaacgacaugcccaucaccaacgaccagaagaagcugaugagcaacaacgugcagaucgugagacagcagagcuacagcaucaugugcaucaucaaggaggaggugcuggccuacguggugcagcugccccuguacggcgugaucgacacccccugcuggaagcugcacaccagcccccugugcaccaccaacaccaaggagggcagcaacaucugccugaccagaaccgacagaggcugguacugcgacaacgccggcagcgugagcuucuucccccaggccgagaccugcaaggugcagagcaacagaguguucugcgacaccaugaacagccugacccugcccagcgaggugaaccugugcaacaucgacaucuucaaccccaaguacgacugcaagaucaugaccagcaagaccgacgugagcagcagcgugaucaccagccugggcgccaucgugagcugcuacggcaagaccaagugcaccgccagcaacaagaacagaggcaucaucaagaccuucagcaacggcugcgacuacgugagcaacaagggcguggacaccgugagcgugggcaacacccuguacugcgugaacaagcaggagggccagagccuguacgugaagggcgagcccaucaucaacuucuacgacccccugguguuccccagcgacgaguucgacgccagcaucagccaggugaacgagaagaucaaccagagccuggccuucaucagaaagagcgacgagcugcugcacaacgugaacgugggcaagagcaccaccaacaucaugaucaccaccaucaucaucgugaucaucgugauccugcugcugcugaucgccgugggccuguuccuguacugcaaggccagaagcacccccgugacccugagcaaggaccagcugagcggcaucaacaacaucgccuucagcaacugaggacuaguggaagcauuuuccuggcugauuaaaagaaauuacucagcuauggucaucuguuccuguuagaaggcuaugcagcauauuauauacuaugcgcauguuaugaaaugcauaauaaaaaauuuuaaaaaaucuaaaagaucuaaaaaaaaaaaaaaaaaaaaaaaaaaaaaaaaaaaaaaaaaaaaaaaaaaaaaaaaaaaaaaaaugcaucccccccccccccccccccccccccccccccaaaggcucuuuucagagccaccagaauu

SEQ ID NO: 14940 - RNA, 1952 nt, Artificial Sequence
  mRNA product Design g-1 comprising derived and/or modified sequence from HRSV(Memphis-37)__AIY60640.1__F_DSCav1_mut2 (opt5)
gggagacuuucccauucuguagcagaauuugguguugccuguggucuuggucccgcggagaagcuuaccauggagcugcccauccucaagaccaacgccauuacaacgauccuggcugccgugacccuuugcuucgcgagcucccagaauauuacagaagaguuuuaccaaucuaccuguagcgcugucuccaaaggcuaucugggggcccucagaacaggaugguacaccucuguuaucacaauugaacugagcaacaucaaggagaauaaaugcaacggcaccgacgccaaggugaaacuuaucaagcaggaacuggauaaguauaaaaaugcugugacggaccuccagcugcugaugcaguccaccccugccgcugggucuggaagcgccauuuguuccggcaucgcggucugcaaggugcuccaccuggagggggagguuaacaaaauuaagaaugcccuucugagcacaaacaaagcuguggucucucucuccaauggagugagcguucugaccuucaaggugcuugaucugaagaacuacaucgacaaacaacuccugccgauucugaauaagcagucuuguuccauccccaacauugaaacagucaucgaguuucagcagaaaaauaaccggcuccuggaaaucacccgcgaguucagcgugaaugccggcgugacgacaccugucucuaccuauaugcuuacaaacuccgagcugcucagccugauuaacgauaugcccaucaccaaugaccaaaagaaacuuauguccaacaauguucagauugugagacagcagucuuacagcaucaugugcauuaucaaggaagaggugcuggcuuaugucgugcaacucccucuguacggcguuaucgauacccccuguuggaaacugcauacauccccucucugcacgaccaacacaaaggaagggagcaauauuugucugacccggacagaccgcggaugguacugcgauaacgccggcucuguguccuuuuucccgcaggcggagaccuguaagguccagagcaauagaguguuuugcgacacgaugaacucucuuacacugcccagcgaaguuaaucucugcaacaucgauauuuucaauccuaaauaugacuguaagaucaugaccuccaaaaccgaugugucuagcuccgucauuacaagccugggggccaucgugucuugcuacggaaagaccaaauguacagcuuccaacaagaaucggggcaucauuaagacguuuagcaacgggugcgacuaugucucuaauaaaggaguggacaccguuuccgugggcaacacacuuuacugugucaacaagcaagagggccagagccuguaugugaaaggggagcccaucauuaauuucuacgauccucucguuuuucccuccgacgaguucgaugccucuaucagccaggugaacgaaaagauuaaucagucccuggcuuuuauccgcaaaucugacgaacugcuccacaacgucaaugugggaaagagcaccacaaacauuaugaucaccacgaucauuaucgugauuaucguuauucugcuucugcucaucgccgucggccuguuccuguauugcaaggccagauccaccccggugacacuuagcaaagaucaacucucugggaucaauaacauugcuuucuccaauugaggacuaguggaagcauuuuccuggcugauuaaaagaaauuacucagcuauggucaucuguuccuguuagaaggcuaugcagcauauuauauacuaugcgcauguuaugaaaugcauaauaaaaaauuuuaaaaaaucuaaaagaucuaaaaaaaaaaaaaaaaaaaaaaaaaaaaaaaaaaaaaaaaaaaaaaaaaaaaaaaaaaaaaaaaugcaucccccccccccccccccccccccccccccccaaaggcucuuuucagagccaccagaauu

SEQ ID NO: 14941 - RNA, 1952 nt, Artificial Sequence
  mRNA product Design g-1 comprising derived and/or modified sequence from HRSV(Memphis-37)__AIY60640.1__F_DSCav1_mut2 (opt6)
gggagacuuucccauucuguagcagaauuugguguugccuguggucuuggucccgcggagaagcuuaccauggagcuuccaauauuaaaaacaaacgcuauaacaacuauacucgcagcaguuacacucugcuucgcauccucacaaaacauaacugaagaauuuuaccaauccacuugcucagccguaucaaaaggauaucuaggagcacuuagaaccggaugguauacaucagugauaacaauagaacuaagcaacauaaaagaaaacaagugcaacggaacugacgcaaaagucaaacuaaucaaacaagaacuagacaaauacaaaaacgcaguaacagaccuacaauuacuaaugcaaucaacaccagcagcaggaucagguucagccauaugcucagguaucgcuguaugcaaaguccuucaccuagaaggugaaguaaacaaaauuaaaaacgcccuacucaguacaaauaaagcugucguaaguuuaucaaacggaguaucaguccuuacauucaaaguauuagaccuaaaaaauuauauagacaaacaauuacuaccaauacucaacaaacaaucaugcucaauaccaaauauagaaaccguaauagaauuucagcaaaaaaauaacagauuacuagaaauaaccagagaauuuucagucaacgcaggagucacaacacccgucucaaccuacaugcuaaccaacucagaacuucuaucucuuaucaacgacaugcccauaaccaaugaucaaaaaaaauuaaugucuaauaacguucaaauaguaagacaacaaucauacucaauaaugugcauaaucaaagaagaaguauuagcauacguaguacaacuaccccuauauggaguaauagacacacccugcuggaaacuacacacauccccccucuguacaacaaacacuaaagaaggaucaaacauuugccuaacaagaacagaccgcggaugguacugcgacaacgcaggcuccguaucuuucuuuccacaagccgaaacuuguaaaguucaaucaaacagaguauuuugcgauacaaugaacuccuuaacauuaccuucagaaguaaaccuaugcaacauagacaucuucaacccaaaauacgacugcaaaauaaugaccucaaaaacagacguauccucaucagucauaaccuccuuaggagcaauaguaucauguuacggaaaaacaaaauguacagcaucaaauaaaaauagaggaauaauaaaaaccuucuccaacggaugcgacuacguauccaauaaaggaguagacaccguaucaguaggaaacacacuauacuguguaaacaaacaagaaggccaaucucuauauguaaaaggcgaaccaaucauaaauuuuuacgacccacuugucuuccccuccgacgaauuugacgcaagcauaucacaaguaaacgaaaaaaucaaccaaagccuagccuucauaaggaaaucugacgaauuacuucauaacguaaauguuggaaaaucaaccacaaacauaaugauaaccaccaucauaauuguaauaauaguaauacuacuacuacuaauugcaguaggacucuuccuauauugcaaagcucgcucaacaccaguuaccuuaucaaaagaccaacuaucuggaauaaacaacauagccuuuuccaacuaaggacuaguggaagcauuuuccuggcugauuaaaagaaauuacucagcuauggucaucuguuccuguuagaaggcuaugcagcauauuauauacuaugcgcauguuaugaaaugcauaauaaaaaauuuuaaaaaaucuaaaagaucuaaaaaaaaaaaaaaaaaaaaaaaaaaaaaaaaaaaaaaaaaaaaaaaaaaaaaaaaaaaaaaaaugcaucccccccccccccccccccccccccccccccaaaggcucuuuucagagccaccagaauu

SEQ ID NO: 14942 - RNA, 1952 nt, Artificial Sequence
  mRNA product Design g-1 comprising derived and/or modified sequence from HRSV(Memphis-37)__AIY60640.1__F_DSCav1_mut2 (opt11)
gggagacuuucccauucuguagcagaauuugguguugccuguggucuuggucccgcggagaagcuuaccauggaacucccaauccuaaaaaccaacgccaucaccaccauccucgccgcugucaccuuaugcuuugccagcagccaaaacaucaccgaagaauuuuaccaaucaacaugcuccgccgucucaaaaggauaccucggcgcccuacgcaccggcugguacacaagcgucauaaccaucgagcucuccaacaucaaggaaaacaaaugcaauggaaccgacgccaaagucaaacuaaucaaacaagaacuagacaaguacaagaacgcagucaccgaccuccaacuccucaugcaguccacccccgcagcaggcucuggcucagcaauaugcuccggcaucgcugucugcaaaguccuacaccucgaaggcgaagucaacaaaaucaaaaacgcccuacuguccacaaacaaagccgucgucucccuauccaacggcgucucgguccuaaccuuuaagguucucgaucucaaaaauuacauagacaaacaacuacuccccauccucaacaaacaaucuugcucaauccccaacaucgaaaccgucaucgaguuccaacagaaaaacaacagacuacucgaaaucacccgcgaguucucagucaacgcgggcgucacaacacccgucagcaccuacaugcuaaccaacuccgaacuccucagccucauuaacgacaugcccaucaccaacgaccaaaagaaacuuauguccaacaacguucaaaucguccgccaacaauccuacuccaucaugugcaucaucaaagaagaaguacucgccuacguaguccaacugccccucuacggcgucaucgauaccccaugcuggaaacuacacaccagcccccucugcaccaccaacaccaaagaaggcuccaauaucugcuuaacccgcacagaccguggcugguacugcgauaacgccggcuccgucuccuucuucccccaagcagaaaccugcaaaguacaauccaaccgagucuucugugacaccaugaacucccuaacccuuccaucagaagucaaccucugcaacaucgacaucuucaaccccaaguacgacugcaaaaucaugacauccaaaaccgaugucucaagcagcgucauaaccucacucggcgcuaucguaagcugcuacggcaaaaccaaaugcaccgcaucaaacaaaaaccgcggaaucaucaaaaccuucagcaacggaugcgacuacguuuccaacaaaggcguagacaccgucuccgucggaaacacccucuacugcguaaacaaacaggaaggccaaucccucuacgucaaaggcgaacccaucauaaacuucuacgauccccuugucuucccguccgaugaguucgacgccuccaucucgcaagucaacgaaaagauaaaccaaucacuagcauucauccguaaauccgacgaacuccuccacaacgucaacgucggaaaauccaccaccaacauaaugaucaccaccauaaucaucgucaucaucguaauacuauuacuccucauagccgucggccucuuccuauauugcaaagcccgaucaacccccguaacccuuucuaaagaccaacuguccggaaucaacaacaucgcuuucagcaacugaggacuaguggaagcauuuuccuggcugauuaaaagaaauuacucagcuauggucaucuguuccuguuagaaggcuaugcagcauauuauauacuaugcgcauguuaugaaaugcauaauaaaaaauuuuaaaaaaucuaaaagaucuaaaaaaaaaaaaaaaaaaaaaaaaaaaaaaaaaaaaaaaaaaaaaaaaaaaaaaaaaaaaaaaaugcaucccccccccccccccccccccccccccccccaaaggcucuuuucagagccaccagaauu

SEQ ID NO: 14943 - RNA, 1967 nt, Artificial Sequence
  mRNA product Design g-2 comprising derived and/or modified sequence from HRSV(Memphis-37)__AIY60640.1__F_DSCav1_mut2 (opt1)
gggagaguccgcucagccagguugcagaagcggcuuagcguguguccuaaucuucucucugcguguagguaggccugugccgcaaacaagcuuaccauggagcugcccauccucaagaccaacgccaucaccacgauccuggccgcggugacccugugcuucgccagcucccagaacaucaccgaggaguucuaccagagcacgugcuccgccgucagcaagggcuaccucggcgcccugcgcaccgggugguacaccagcgugaucaccaucgagcuguccaacaucaaggagaacaagugcaacggcaccgacgccaaggugaagcucaucaagcaggagcuggacaaguacaagaacgcggucacggaccugcagcuccugaugcagagcaccccggccgccggcuccgggagcgcgaucugcuccggcaucgccgucugcaaggugcugcaccucgagggcgaggugaacaagaucaagaacgcccugcuguccaccaacaaggccgucgugagccucuccaacggggugagcguccugaccuucaaggugcuggaccucaagaacuacaucgacaagcagcugcugcccauccugaacaagcagagcugcuccauccccaacaucgagaccgucaucgaguuccagcagaagaacaaccgccuccuggagaucacgcgggaguucagcgugaacgcgggcgugaccacccccgucuccaccuacaugcugacgaacagcgagcuccugucccugaucaacgacaugccgaucaccaacgaccagaagaagcucaugagcaacaacgugcagaucgugcgccagcaguccuacagcaucaugugcaucaucaaggaggagguccuggccuacguggugcagcugccccucuacggggucaucgacacccccugcuggaagcugcacaccagcccccugugcacgaccaacaccaaggagggcuccaacaucugccucacccggacggaccgcgggugguacugcgacaacgccggcagcguguccuucuucccgcaggccgagaccugcaagguccagagcaaccggguguucugcgacaccaugaacucccugacccugcccagcgaggugaaccucugcaacaucgacaucuucaaccccaaguacgacugcaagaucaugacguccaagaccgacgucagcuccagcgugaucaccucccugggcgccaucgugagcugcuacgggaagaccaagugcacggcgagcaacaagaaccgcggcaucaucaagaccuucuccaacgggugcgacuacgucagcaacaagggcguggacaccguguccgucggcaacacccuguacugcgugaacaagcaggagggccagagccucuacgugaagggggagcccaucaucaacuucuacgacccgcuggucuuccccuccgacgaguucgacgccagcaucucccaggugaacgagaagaucaaccagagccuggccuucauccggaaguccgacgagcuccugcacaacgugaacgucggcaagagcaccacgaacaucaugaucaccaccaucaucaucgugaucaucgugauccugcugcuccugaucgccgucgggcuguuccucuacugcaaggcccgcuccacccccgugacgcugagcaaggaccagcuguccgggaucaacaacaucgcguucagcaacugaggacuaguaauaaggaaacuguaugaaugucugugggcaggaagugaagagauccuucuguaaagguuuuuggaauuaugucugcugaauaauaaacuuuuuugaaauaauaaaucugguagaaaaaugagaucuaaaaaaaaaaaaaaaaaaaaaaaaaaaaaaaaaaaaaaaaaaaaaaaaaaaaaaaaaaaaaaaaugcaucccccccccccccccccccccccccccccccaaaggcucuuuucagagccaccagaauu

SEQ ID NO: 14944 - RNA, 1967 nt, Artificial Sequence
  mRNA product Design g-2 comprising derived and/or modified sequence from HRSV(Memphis-37)__AIY60640.1__F_DSCav1_mut2 (opt1)
gggagaguccgcucagccagguugcagaagcggcuuagcguguguccuaaucuucucucugcguguagguaggccugugccgcaaacaagcuuaccauggagcugcccauccucaagaccaacgccaucaccacgauccuggccgcggugacccugugcuucgccagcucccagaacaucaccgaggaguucuaccagagcacgugcuccgccgucagcaagggcuaccucggggcccugcgcaccggcugguacaccuccgugaucaccaucgagcugagcaacaucaaggagaacaagugcaacgggaccgacgccaaggugaagcucaucaagcaggagcuggacaaguacaagaacgcggucacggaccugcagcuccugaugcaguccaccccggccgccggcagcggguccgccaucugcagcggcaucgcggugugcaaggugcugcaccucgagggcgaggucaacaagaucaagaacgcccugcuguccaccaacaaggccguggugagccucuccaacggggucagcgugcugaccuucaaggugcuggaccucaagaacuacaucgacaagcagcugcugcccauccucaacaagcaguccugcagcauccccaacaucgagacggucaucgaguuccagcagaagaacaaccggcugcuggagaucacccgcgaguucuccgugaacgccggcgugaccacccccgucagcacguacaugcucaccaacuccgagcugcugagccucaucaacgacaugccgaucaccaacgaccagaagaagcugaugagcaacaacgugcagaucgugcggcagcaguccuacagcaucaugugcaucaucaaggaggagguccuggccuacguggugcagcucccccuguacggggucaucgacacccccugcuggaagcugcacacgagcccccucugcaccaccaacaccaaggagggcuccaacaucugccugacgcgcaccgaccgggggugguacugcgacaacgcgggcuccgugagcuucuucccgcaggccgagaccugcaaggugcaguccaaccgcgucuucugcgacaccaugaacagccugacgcuccccuccgaggugaaccugugcaacaucgacaucuucaaccccaaguacgacugcaagaucaugaccagcaagaccgacgucuccagcuccgugaucaccagccugggcgccaucguguccugcuacgggaagacgaagugcaccgccagcaacaagaaccggggcaucaucaagaccuucuccaacgggugcgacuacgucagcaacaagggcguggacaccguguccgucggcaacacgcucuacugcgugaacaagcaggaggggcagagccuguacgugaagggcgagcccaucaucaacuucuacgacccgcuggucuuccccagcgacgaguucgacgccuccaucagccaggugaacgagaagaucaaccagucccucgcguucauccgcaagagcgacgagcugcugcacaacgugaacgucgggaaguccaccaccaacaucaugaucaccaccaucaucaucgugaucaucgugauccuccugcugcucaucgccgucggccuguuccuguacugcaaggcccggagcacgcccgugacccuguccaaggaccagcucagcgggaucaacaacaucgccuucuccaacugaggacuaguaauaaggaaacuguaugaaugucugugggcaggaagugaagagauccuucuguaaagguuuuuggaauuaugucugcugaauaauaaacuuuuuugaaauaauaaaucugguagaaaaaugagaucuaaaaaaaaaaaaaaaaaaaaaaaaaaaaaaaaaaaaaaaaaaaaaaaaaaaaaaaaaaaaaaaaugcaucccccccccccccccccccccccccccccccaaaggcucuuuucagagccaccagaauu

SEQ ID NO: 14945 - RNA, 1967 nt, Artificial Sequence
  mRNA product Design g-2 comprising derived and/or modified sequence from HRSV(Memphis-37)__AIY60640.1__F_DSCav1_mut2 (opt2)
gggagaguccgcucagccagguugcagaagcggcuuagcguguguccuaaucuucucucugcguguagguaggccugugccgcaaacaagcuuaccauggagcuccccauccucaagaccaacgccaucaccaccauccucgccgccgucacccucugcuucgccuccucccagaacaucaccgaggaguucuaccaguccaccugcuccgccgucuccaagggcuaccucggcgcccuccgcaccggcugguacaccuccgucaucaccaucgagcucuccaacaucaaggagaacaagugcaacggcaccgacgccaaggucaagcucaucaagcaggagcucgacaaguacaagaacgccgucaccgaccuccagcuccucaugcaguccacccccgccgccggcuccggcuccgccaucugcuccggcaucgccgucugcaagguccuccaccucgagggcgaggucaacaagaucaagaacgcccuccucuccaccaacaaggccgucgucucccucuccaacggcgucuccguccucaccuucaagguccucgaccucaagaacuacaucgacaagcagcuccuccccauccucaacaagcaguccugcuccauccccaacaucgagaccgucaucgaguuccagcagaagaacaaccgccuccucgagaucacccgcgaguucuccgucaacgccggcgucaccacccccgucuccaccuacaugcucaccaacuccgagcuccucucccucaucaacgacaugcccaucaccaacgaccagaagaagcucauguccaacaacguccagaucguccgccagcaguccuacuccaucaugugcaucaucaaggaggagguccucgccuacgucguccagcucccccucuacggcgucaucgacacccccugcuggaagcuccacaccuccccccucugcaccaccaacaccaaggagggcuccaacaucugccucacccgcaccgaccgcggcugguacugcgacaacgccggcuccgucuccuucuucccccaggccgagaccugcaagguccaguccaaccgcgucuucugcgacaccaugaacucccucacccuccccuccgaggucaaccucugcaacaucgacaucuucaaccccaaguacgacugcaagaucaugaccuccaagaccgacgucuccuccuccgucaucaccucccucggcgccaucgucuccugcuacggcaagaccaagugcaccgccuccaacaagaaccgcggcaucaucaagaccuucuccaacggcugcgacuacgucuccaacaagggcgucgacaccgucuccgucggcaacacccucuacugcgucaacaagcaggagggccagucccucuacgucaagggcgagcccaucaucaacuucuacgacccccucgucuuccccuccgacgaguucgacgccuccaucucccaggucaacgagaagaucaaccagucccucgccuucauccgcaaguccgacgagcuccuccacaacgucaacgucggcaaguccaccaccaacaucaugaucaccaccaucaucaucgucaucaucgucauccuccuccuccucaucgccgucggccucuuccucuacugcaaggcccgcuccacccccgucacccucuccaaggaccagcucuccggcaucaacaacaucgccuucuccaacugaggacuaguaauaaggaaacuguaugaaugucugugggcaggaagugaagagauccuucuguaaagguuuuuggaauuaugucugcugaauaauaaacuuuuuugaaauaauaaaucugguagaaaaaugagaucuaaaaaaaaaaaaaaaaaaaaaaaaaaaaaaaaaaaaaaaaaaaaaaaaaaaaaaaaaaaaaaaaugcaucccccccccccccccccccccccccccccccaaaggcucuuuucagagccaccagaauu

SEQ ID NO: 14946 - RNA, 1967 nt, Artificial Sequence
  mRNA product Design g-2 comprising derived and/or modified sequence from HRSV(Memphis-37)__AIY60640.1__F_DSCav1_mut2 (opt3)
gggagaguccgcucagccagguugcagaagcggcuuagcguguguccuaaucuucucucugcguguagguaggccugugccgcaaacaagcuuaccauggagcugcccauccucaagaccaacgccauuacaacuauacuugcugcagugacgcugugcuucgccagcucccagaauaucaccgaagaguuuuaccaaucuacauguucagcggucaguaaaggcuauuugggggcuuuaagaacuggaugguacaccagcguuauuacaaucgaacuguccaacauuaaggagaauaaaugcaacgguaccgacgccaaggugaaacuaaucaagcaggaacucgauaaguauaaaaaugcaguaacugaccugcagcuucugaugcagucuacuccugccgcuggcucggggucagcaauauguagcggaaucgccgugugcaaggucuugcaccucgagggcgaggugaacaaaauuaagaaugcucugcugaguaccaacaaagccguugugucccucucuaauggugucagcguguuaacguucaagguacuggaucuuaagaacuacaucgacaaacaauugcugccaauucuaaauaagcaguccuguucaaucccgaacauagaaacuguuauugaguuucagcagaaaaauaacaggcuccuggaaaucacccgggaguucagugugaaugcgggggucacaacucccgugagcaccuauaugcuuacaaacucugagcuguugucccucauuaacgauaugccuaucaccaaugaccaaaagaaacugaugucaaacaaugugcagaucguccgccagcagagcuacaguauuaugugcauaaucaaggaagagguuuuagcauaugugguacaacugccacucuacggagugauugauacgcccuguuggaaacuucauacuucuccucugugcacaaccaacacuaaggaaggcuccaauaucuguuugacacgaaccgaccguggcugguacugcgauaacgccgggagcgucucguuuuucccacaggcugagacguguaaggugcagucuaauagaguuuucugcgacaccaugaacucccuaacacugcccucagaagugaaucucugcaacauagauauuuucaauccuaaauaugacuguaagaucaugacaaguaaaaccgaugucagcuccucugugaucacaagccugggagccauuguaucaugcuacgguaagacuaaauguaccgcaaguaacaagaauaggggcaucauuaagacauuuuccaacgggugcgacuauguuagcaauaaaggaguggacaccgucucugugggcaacacucuuuacugugucaacaagcaagagggucagucacuguaugugaaaggggagccaauaaucaauuucuacgauccguugguuuuucccagugacgaauuugaugcuagcauuucccaggugaacgagaagaucaaucagucucucgccuuuauccggaaaucggacgaacuguuacacaacguaaaugucggaaagagcacgacaaacauuaugauaaccacuaucauuaucgugauuaucguuauacugcuacuccugaucgcggugggccuuuucuuguauugcaaggcccgcuccaccccugucacacugucaaaagaucaacucaguggcauuaauaacaucgcauucucuaauugaggacuaguaauaaggaaacuguaugaaugucugugggcaggaagugaagagauccuucuguaaagguuuuuggaauuaugucugcugaauaauaaacuuuuuugaaauaauaaaucugguagaaaaaugagaucuaaaaaaaaaaaaaaaaaaaaaaaaaaaaaaaaaaaaaaaaaaaaaaaaaaaaaaaaaaaaaaaaugcaucccccccccccccccccccccccccccccccaaaggcucuuuucagagccaccagaauu

SEQ ID NO: 14947 - RNA, 1967 nt, Artificial Sequence
  mRNA product Design g-2 comprising derived and/or modified sequence from HRSV(Memphis-37)__AIY60640.1__F_DSCav1_mut2 (opt4)
gggagaguccgcucagccagguugcagaagcggcuuagcguguguccuaaucuucucucugcguguagguaggccugugccgcaaacaagcuuaccauggagcugcccauccugaagaccaacgccaucaccaccauccuggccgccgugacccugugcuucgccagcagccagaacaucaccgaggaguucuaccagagcaccugcagcgccgugagcaagggcuaccugggcgcccugagaaccggcugguacaccagcgugaucaccaucgagcugagcaacaucaaggagaacaagugcaacggcaccgacgccaaggugaagcugaucaagcaggagcuggacaaguacaagaacgccgugaccgaccugcagcugcugaugcagagcacccccgccgccggcagcggcagcgccaucugcagcggcaucgccgugugcaaggugcugcaccuggagggcgaggugaacaagaucaagaacgcccugcugagcaccaacaaggccguggugagccugagcaacggcgugagcgugcugaccuucaaggugcuggaccugaagaacuacaucgacaagcagcugcugcccauccugaacaagcagagcugcagcauccccaacaucgagaccgugaucgaguuccagcagaagaacaacagacugcuggagaucaccagagaguucagcgugaacgccggcgugaccacccccgugagcaccuacaugcugaccaacagcgagcugcugagccugaucaacgacaugcccaucaccaacgaccagaagaagcugaugagcaacaacgugcagaucgugagacagcagagcuacagcaucaugugcaucaucaaggaggaggugcuggccuacguggugcagcugccccuguacggcgugaucgacacccccugcuggaagcugcacaccagcccccugugcaccaccaacaccaaggagggcagcaacaucugccugaccagaaccgacagaggcugguacugcgacaacgccggcagcgugagcuucuucccccaggccgagaccugcaaggugcagagcaacagaguguucugcgacaccaugaacagccugacccugcccagcgaggugaaccugugcaacaucgacaucuucaaccccaaguacgacugcaagaucaugaccagcaagaccgacgugagcagcagcgugaucaccagccugggcgccaucgugagcugcuacggcaagaccaagugcaccgccagcaacaagaacagaggcaucaucaagaccuucagcaacggcugcgacuacgugagcaacaagggcguggacaccgugagcgugggcaacacccuguacugcgugaacaagcaggagggccagagccuguacgugaagggcgagcccaucaucaacuucuacgacccccugguguuccccagcgacgaguucgacgccagcaucagccaggugaacgagaagaucaaccagagccuggccuucaucagaaagagcgacgagcugcugcacaacgugaacgugggcaagagcaccaccaacaucaugaucaccaccaucaucaucgugaucaucgugauccugcugcugcugaucgccgugggccuguuccuguacugcaaggccagaagcacccccgugacccugagcaaggaccagcugagcggcaucaacaacaucgccuucagcaacugaggacuaguaauaaggaaacuguaugaaugucugugggcaggaagugaagagauccuucuguaaagguuuuuggaauuaugucugcugaauaauaaacuuuuuugaaauaauaaaucugguagaaaaaugagaucuaaaaaaaaaaaaaaaaaaaaaaaaaaaaaaaaaaaaaaaaaaaaaaaaaaaaaaaaaaaaaaaaugcaucccccccccccccccccccccccccccccccaaaggcucuuuucagagccaccagaauu

SEQ ID NO: 14948 - RNA, 1967 nt, Artificial Sequence
  mRNA product Design g-2 comprising derived and/or modified sequence from HRSV(Memphis-37)__AIY60640.1__F_DSCav1_mut2 (opt5)
gggagaguccgcucagccagguugcagaagcggcuuagcguguguccuaaucuucucucugcguguagguaggccugugccgcaaacaagcuuaccauggagcugcccauccucaagaccaacgccauuacaacgauccuggcugccgugacccuuugcuucgcgagcucccagaauauuacagaagaguuuuaccaaucuaccuguagcgcugucuccaaaggcuaucugggggcccucagaacaggaugguacaccucuguuaucacaauugaacugagcaacaucaaggagaauaaaugcaacggcaccgacgccaaggugaaacuuaucaagcaggaacuggauaaguauaaaaaugcugugacggaccuccagcugcugaugcaguccaccccugccgcugggucuggaagcgccauuuguuccggcaucgcggucugcaaggugcuccaccuggagggggagguuaacaaaauuaagaaugcccuucugagcacaaacaaagcuguggucucucucuccaauggagugagcguucugaccuucaaggugcuugaucugaagaacuacaucgacaaacaacuccugccgauucugaauaagcagucuuguuccauccccaacauugaaacagucaucgaguuucagcagaaaaauaaccggcuccuggaaaucacccgcgaguucagcgugaaugccggcgugacgacaccugucucuaccuauaugcuuacaaacuccgagcugcucagccugauuaacgauaugcccaucaccaaugaccaaaagaaacuuauguccaacaauguucagauugugagacagcagucuuacagcaucaugugcauuaucaaggaagaggugcuggcuuaugucgugcaacucccucuguacggcguuaucgauacccccuguuggaaacugcauacauccccucucugcacgaccaacacaaaggaagggagcaauauuugucugacccggacagaccgcggaugguacugcgauaacgccggcucuguguccuuuuucccgcaggcggagaccuguaagguccagagcaauagaguguuuugcgacacgaugaacucucuuacacugcccagcgaaguuaaucucugcaacaucgauauuuucaauccuaaauaugacuguaagaucaugaccuccaaaaccgaugugucuagcuccgucauuacaagccugggggccaucgugucuugcuacggaaagaccaaauguacagcuuccaacaagaaucggggcaucauuaagacguuuagcaacgggugcgacuaugucucuaauaaaggaguggacaccguuuccgugggcaacacacuuuacugugucaacaagcaagagggccagagccuguaugugaaaggggagcccaucauuaauuucuacgauccucucguuuuucccuccgacgaguucgaugccucuaucagccaggugaacgaaaagauuaaucagucccuggcuuuuauccgcaaaucugacgaacugcuccacaacgucaaugugggaaagagcaccacaaacauuaugaucaccacgaucauuaucgugauuaucguuauucugcuucugcucaucgccgucggccuguuccuguauugcaaggccagauccaccccggugacacuuagcaaagaucaacucucugggaucaauaacauugcuuucuccaauugaggacuaguaauaaggaaacuguaugaaugucugugggcaggaagugaagagauccuucuguaaagguuuuuggaauuaugucugcugaauaauaaacuuuuuugaaauaauaaaucugguagaaaaaugagaucuaaaaaaaaaaaaaaaaaaaaaaaaaaaaaaaaaaaaaaaaaaaaaaaaaaaaaaaaaaaaaaaaugcaucccccccccccccccccccccccccccccccaaaggcucuuuucagagccaccagaauu

SEQ ID NO: 14949 - RNA, 1967 nt, Artificial Sequence
  mRNA product Design g-2 comprising derived and/or modified sequence from HRSV(Memphis-37)__AIY60640.1__F_DSCav1_mut2 (opt6)
gggagaguccgcucagccagguugcagaagcggcuuagcguguguccuaaucuucucucugcguguagguaggccugugccgcaaacaagcuuaccauggagcuuccaauauuaaaaacaaacgcuauaacaacuauacucgcagcaguuacacucugcuucgcauccucacaaaacauaacugaagaauuuuaccaauccacuugcucagccguaucaaaaggauaucuaggagcacuuagaaccggaugguauacaucagugauaacaauagaacuaagcaacauaaaagaaaacaagugcaacggaacugacgcaaaagucaaacuaaucaaacaagaacuagacaaauacaaaaacgcaguaacagaccuacaauuacuaaugcaaucaacaccagcagcaggaucagguucagccauaugcucagguaucgcuguaugcaaaguccuucaccuagaaggugaaguaaacaaaauuaaaaacgcccuacucaguacaaauaaagcugucguaaguuuaucaaacggaguaucaguccuuacauucaaaguauuagaccuaaaaaauuauauagacaaacaauuacuaccaauacucaacaaacaaucaugcucaauaccaaauauagaaaccguaauagaauuucagcaaaaaaauaacagauuacuagaaauaaccagagaauuuucagucaacgcaggagucacaacacccgucucaaccuacaugcuaaccaacucagaacuucuaucucuuaucaacgacaugcccauaaccaaugaucaaaaaaaauuaaugucuaauaacguucaaauaguaagacaacaaucauacucaauaaugugcauaaucaaagaagaaguauuagcauacguaguacaacuaccccuauauggaguaauagacacacccugcuggaaacuacacacauccccccucuguacaacaaacacuaaagaaggaucaaacauuugccuaacaagaacagaccgcggaugguacugcgacaacgcaggcuccguaucuuucuuuccacaagccgaaacuuguaaaguucaaucaaacagaguauuuugcgauacaaugaacuccuuaacauuaccuucagaaguaaaccuaugcaacauagacaucuucaacccaaaauacgacugcaaaauaaugaccucaaaaacagacguauccucaucagucauaaccuccuuaggagcaauaguaucauguuacggaaaaacaaaauguacagcaucaaauaaaaauagaggaauaauaaaaaccuucuccaacggaugcgacuacguauccaauaaaggaguagacaccguaucaguaggaaacacacuauacuguguaaacaaacaagaaggccaaucucuauauguaaaaggcgaaccaaucauaaauuuuuacgacccacuugucuuccccuccgacgaauuugacgcaagcauaucacaaguaaacgaaaaaaucaaccaaagccuagccuucauaaggaaaucugacgaauuacuucauaacguaaauguuggaaaaucaaccacaaacauaaugauaaccaccaucauaauuguaauaauaguaauacuacuacuacuaauugcaguaggacucuuccuauauugcaaagcucgcucaacaccaguuaccuuaucaaaagaccaacuaucuggaauaaacaacauagccuuuuccaacuaaggacuaguaauaaggaaacuguaugaaugucugugggcaggaagugaagagauccuucuguaaagguuuuuggaauuaugucugcugaauaauaaacuuuuuugaaauaauaaaucugguagaaaaaugagaucuaaaaaaaaaaaaaaaaaaaaaaaaaaaaaaaaaaaaaaaaaaaaaaaaaaaaaaaaaaaaaaaaugcaucccccccccccccccccccccccccccccccaaaggcucuuuucagagccaccagaauu

SEQ ID NO: 14950 - RNA, 1967 nt, Artificial Sequence
  mRNA product Design g-2 comprising derived and/or modified sequence from HRSV(Memphis-37)__AIY60640.1__F_DSCav1_mut2 (opt11)
gggagaguccgcucagccagguugcagaagcggcuuagcguguguccuaaucuucucucugcguguagguaggccugugccgcaaacaagcuuaccauggaacucccaauccuaaaaaccaacgccaucaccaccauccucgccgcugucaccuuaugcuuugccagcagccaaaacaucaccgaagaauuuuaccaaucaacaugcuccgccgucucaaaaggauaccucggcgcccuacgcaccggcugguacacaagcgucauaaccaucgagcucuccaacaucaaggaaaacaaaugcaauggaaccgacgccaaagucaaacuaaucaaacaagaacuagacaaguacaagaacgcagucaccgaccuccaacuccucaugcaguccacccccgcagcaggcucuggcucagcaauaugcuccggcaucgcugucugcaaaguccuacaccucgaaggcgaagucaacaaaaucaaaaacgcccuacuguccacaaacaaagccgucgucucccuauccaacggcgucucgguccuaaccuuuaagguucucgaucucaaaaauuacauagacaaacaacuacuccccauccucaacaaacaaucuugcucaauccccaacaucgaaaccgucaucgaguuccaacagaaaaacaacagacuacucgaaaucacccgcgaguucucagucaacgcgggcgucacaacacccgucagcaccuacaugcuaaccaacuccgaacuccucagccucauuaacgacaugcccaucaccaacgaccaaaagaaacuuauguccaacaacguucaaaucguccgccaacaauccuacuccaucaugugcaucaucaaagaagaaguacucgccuacguaguccaacugccccucuacggcgucaucgauaccccaugcuggaaacuacacaccagcccccucugcaccaccaacaccaaagaaggcuccaauaucugcuuaacccgcacagaccguggcugguacugcgauaacgccggcuccgucuccuucuucccccaagcagaaaccugcaaaguacaauccaaccgagucuucugugacaccaugaacucccuaacccuuccaucagaagucaaccucugcaacaucgacaucuucaaccccaaguacgacugcaaaaucaugacauccaaaaccgaugucucaagcagcgucauaaccucacucggcgcuaucguaagcugcuacggcaaaaccaaaugcaccgcaucaaacaaaaaccgcggaaucaucaaaaccuucagcaacggaugcgacuacguuuccaacaaaggcguagacaccgucuccgucggaaacacccucuacugcguaaacaaacaggaaggccaaucccucuacgucaaaggcgaacccaucauaaacuucuacgauccccuugucuucccguccgaugaguucgacgccuccaucucgcaagucaacgaaaagauaaaccaaucacuagcauucauccguaaauccgacgaacuccuccacaacgucaacgucggaaaauccaccaccaacauaaugaucaccaccauaaucaucgucaucaucguaauacuauuacuccucauagccgucggccucuuccuauauugcaaagcccgaucaacccccguaacccuuucuaaagaccaacuguccggaaucaacaacaucgcuuucagcaacugaggacuaguaauaaggaaacuguaugaaugucugugggcaggaagugaagagauccuucuguaaagguuuuuggaauuaugucugcugaauaauaaacuuuuuugaaauaauaaaucugguagaaaaaugagaucuaaaaaaaaaaaaaaaaaaaaaaaaaaaaaaaaaaaaaaaaaaaaaaaaaaaaaaaaaaaaaaaaugcaucccccccccccccccccccccccccccccccaaaggcucuuuucagagccaccagaauu

SEQ ID NO: 14951 - RNA, 2199 nt, Artificial Sequence
  mRNA product Design g-3 comprising derived and/or modified sequence from HRSV(Memphis-37)__AIY60640.1__F_DSCav1_mut2 (opt1)
gggagaguccgcucagccagguugcagaagcggcuuagcguguguccuaaucuucucucugcguguagguaggccugugccgcaaacaagcuuaccauggagcugcccauccucaagaccaacgccaucaccacgauccuggccgcggugacccugugcuucgccagcucccagaacaucaccgaggaguucuaccagagcacgugcuccgccgucagcaagggcuaccucggcgcccugcgcaccgggugguacaccagcgugaucaccaucgagcuguccaacaucaaggagaacaagugcaacggcaccgacgccaaggugaagcucaucaagcaggagcuggacaaguacaagaacgcggucacggaccugcagcuccugaugcagagcaccccggccgccggcuccgggagcgcgaucugcuccggcaucgccgucugcaaggugcugcaccucgagggcgaggugaacaagaucaagaacgcccugcuguccaccaacaaggccgucgugagccucuccaacggggugagcguccugaccuucaaggugcuggaccucaagaacuacaucgacaagcagcugcugcccauccugaacaagcagagcugcuccauccccaacaucgagaccgucaucgaguuccagcagaagaacaaccgccuccuggagaucacgcgggaguucagcgugaacgcgggcgugaccacccccgucuccaccuacaugcugacgaacagcgagcuccugucccugaucaacgacaugccgaucaccaacgaccagaagaagcucaugagcaacaacgugcagaucgugcgccagcaguccuacagcaucaugugcaucaucaaggaggagguccuggccuacguggugcagcugccccucuacggggucaucgacacccccugcuggaagcugcacaccagcccccugugcacgaccaacaccaaggagggcuccaacaucugccucacccggacggaccgcgggugguacugcgacaacgccggcagcguguccuucuucccgcaggccgagaccugcaagguccagagcaaccggguguucugcgacaccaugaacucccugacccugcccagcgaggugaaccucugcaacaucgacaucuucaaccccaaguacgacugcaagaucaugacguccaagaccgacgucagcuccagcgugaucaccucccugggcgccaucgugagcugcuacgggaagaccaagugcacggcgagcaacaagaaccgcggcaucaucaagaccuucuccaacgggugcgacuacgucagcaacaagggcguggacaccguguccgucggcaacacccuguacugcgugaacaagcaggagggccagagccucuacgugaagggggagcccaucaucaacuucuacgacccgcuggucuuccccuccgacgaguucgacgccagcaucucccaggugaacgagaagaucaaccagagccuggccuucauccggaaguccgacgagcuccugcacaacgugaacgucggcaagagcaccacgaacaucaugaucaccaccaucaucaucgugaucaucgugauccugcugcuccugaucgccgucgggcuguuccucuacugcaaggcccgcuccacccccgugacgcugagcaaggaccagcuguccgggaucaacaacaucgcguucagcaacugaggacuagugaagggaacacccaaauuuaauucagccuuaagcacaauuaauuaagagugaaacguaauuguacaagcaguuggucacccaccauagggcaugaucaacaccgcaaccuuuccuuuuucccccagugauucugaaaaaccccucuucccuucagcuugcuuagauguuccaaauuuaguaagcuuaaggcggccuacagaagaaaaagaaaaaaaaggccacaaaaguucccucucacuuucaguaaauaaaauaaaagcagcaacagaaauaaagaaauaaaugaaauucaaaaugaaauaaauauuguguugugcagcauuaaaaaaucaauaaaaauuaaaaaugagcaagaucuaaaaaaaaaaaaaaaaaaaaaaaaaaaaaaaaaaaaaaaaaaaaaaaaaaaaaaaaaaaaaaaaugcaucccccccccccccccccccccccccccccccaaaggcucuuuucagagccaccagaauu

SEQ ID NO: 14952 - RNA, 2199 nt, Artificial Sequence
  mRNA product Design g-3 comprising derived and/or modified sequence from HRSV(Memphis-37)__AIY60640.1__F_DSCav1_mut2 (opt1)
gggagaguccgcucagccagguugcagaagcggcuuagcguguguccuaaucuucucucugcguguagguaggccugugccgcaaacaagcuuaccauggagcugcccauccucaagaccaacgccaucaccacgauccuggccgcggugacccugugcuucgccagcucccagaacaucaccgaggaguucuaccagagcacgugcuccgccgucagcaagggcuaccucggggcccugcgcaccggcugguacaccuccgugaucaccaucgagcugagcaacaucaaggagaacaagugcaacgggaccgacgccaaggugaagcucaucaagcaggagcuggacaaguacaagaacgcggucacggaccugcagcuccugaugcaguccaccccggccgccggcagcggguccgccaucugcagcggcaucgcggugugcaaggugcugcaccucgagggcgaggucaacaagaucaagaacgcccugcuguccaccaacaaggccguggugagccucuccaacggggucagcgugcugaccuucaaggugcuggaccucaagaacuacaucgacaagcagcugcugcccauccucaacaagcaguccugcagcauccccaacaucgagacggucaucgaguuccagcagaagaacaaccggcugcuggagaucacccgcgaguucuccgugaacgccggcgugaccacccccgucagcacguacaugcucaccaacuccgagcugcugagccucaucaacgacaugccgaucaccaacgaccagaagaagcugaugagcaacaacgugcagaucgugcggcagcaguccuacagcaucaugugcaucaucaaggaggagguccuggccuacguggugcagcucccccuguacggggucaucgacacccccugcuggaagcugcacacgagcccccucugcaccaccaacaccaaggagggcuccaacaucugccugacgcgcaccgaccgggggugguacugcgacaacgcgggcuccgugagcuucuucccgcaggccgagaccugcaaggugcaguccaaccgcgucuucugcgacaccaugaacagccugacgcuccccuccgaggugaaccugugcaacaucgacaucuucaaccccaaguacgacugcaagaucaugaccagcaagaccgacgucuccagcuccgugaucaccagccugggcgccaucguguccugcuacgggaagacgaagugcaccgccagcaacaagaaccggggcaucaucaagaccuucuccaacgggugcgacuacgucagcaacaagggcguggacaccguguccgucggcaacacgcucuacugcgugaacaagcaggaggggcagagccuguacgugaagggcgagcccaucaucaacuucuacgacccgcuggucuuccccagcgacgaguucgacgccuccaucagccaggugaacgagaagaucaaccagucccucgcguucauccgcaagagcgacgagcugcugcacaacgugaacgucgggaaguccaccaccaacaucaugaucaccaccaucaucaucgugaucaucgugauccuccugcugcucaucgccgucggccuguuccuguacugcaaggcccggagcacgcccgugacccuguccaaggaccagcucagcgggaucaacaacaucgccuucuccaacugaggacuagugaagggaacacccaaauuuaauucagccuuaagcacaauuaauuaagagugaaacguaauuguacaagcaguuggucacccaccauagggcaugaucaacaccgcaaccuuuccuuuuucccccagugauucugaaaaaccccucuucccuucagcuugcuuagauguuccaaauuuaguaagcuuaaggcggccuacagaagaaaaagaaaaaaaaggccacaaaaguucccucucacuuucaguaaauaaaauaaaagcagcaacagaaauaaagaaauaaaugaaauucaaaaugaaauaaauauuguguugugcagcauuaaaaaaucaauaaaaauuaaaaaugagcaagaucuaaaaaaaaaaaaaaaaaaaaaaaaaaaaaaaaaaaaaaaaaaaaaaaaaaaaaaaaaaaaaaaaugcaucccccccccccccccccccccccccccccccaaaggcucuuuucagagccaccagaauu

SEQ ID NO: 14953 - RNA, 2199 nt, Artificial Sequence
  mRNA product Design g-3 comprising derived and/or modified sequence from HRSV(Memphis-37)__AIY60640.1__F_DSCav1_mut2 (opt2)
gggagaguccgcucagccagguugcagaagcggcuuagcguguguccuaaucuucucucugcguguagguaggccugugccgcaaacaagcuuaccauggagcuccccauccucaagaccaacgccaucaccaccauccucgccgccgucacccucugcuucgccuccucccagaacaucaccgaggaguucuaccaguccaccugcuccgccgucuccaagggcuaccucggcgcccuccgcaccggcugguacaccuccgucaucaccaucgagcucuccaacaucaaggagaacaagugcaacggcaccgacgccaaggucaagcucaucaagcaggagcucgacaaguacaagaacgccgucaccgaccuccagcuccucaugcaguccacccccgccgccggcuccggcuccgccaucugcuccggcaucgccgucugcaagguccuccaccucgagggcgaggucaacaagaucaagaacgcccuccucuccaccaacaaggccgucgucucccucuccaacggcgucuccguccucaccuucaagguccucgaccucaagaacuacaucgacaagcagcuccuccccauccucaacaagcaguccugcuccauccccaacaucgagaccgucaucgaguuccagcagaagaacaaccgccuccucgagaucacccgcgaguucuccgucaacgccggcgucaccacccccgucuccaccuacaugcucaccaacuccgagcuccucucccucaucaacgacaugcccaucaccaacgaccagaagaagcucauguccaacaacguccagaucguccgccagcaguccuacuccaucaugugcaucaucaaggaggagguccucgccuacgucguccagcucccccucuacggcgucaucgacacccccugcuggaagcuccacaccuccccccucugcaccaccaacaccaaggagggcuccaacaucugccucacccgcaccgaccgcggcugguacugcgacaacgccggcuccgucuccuucuucccccaggccgagaccugcaagguccaguccaaccgcgucuucugcgacaccaugaacucccucacccuccccuccgaggucaaccucugcaacaucgacaucuucaaccccaaguacgacugcaagaucaugaccuccaagaccgacgucuccuccuccgucaucaccucccucggcgccaucgucuccugcuacggcaagaccaagugcaccgccuccaacaagaaccgcggcaucaucaagaccuucuccaacggcugcgacuacgucuccaacaagggcgucgacaccgucuccgucggcaacacccucuacugcgucaacaagcaggagggccagucccucuacgucaagggcgagcccaucaucaacuucuacgacccccucgucuuccccuccgacgaguucgacgccuccaucucccaggucaacgagaagaucaaccagucccucgccuucauccgcaaguccgacgagcuccuccacaacgucaacgucggcaaguccaccaccaacaucaugaucaccaccaucaucaucgucaucaucgucauccuccuccuccucaucgccgucggccucuuccucuacugcaaggcccgcuccacccccgucacccucuccaaggaccagcucuccggcaucaacaacaucgccuucuccaacugaggacuagugaagggaacacccaaauuuaauucagccuuaagcacaauuaauuaagagugaaacguaauuguacaagcaguuggucacccaccauagggcaugaucaacaccgcaaccuuuccuuuuucccccagugauucugaaaaaccccucuucccuucagcuugcuuagauguuccaaauuuaguaagcuuaaggcggccuacagaagaaaaagaaaaaaaaggccacaaaaguucccucucacuuucaguaaauaaaauaaaagcagcaacagaaauaaagaaauaaaugaaauucaaaaugaaauaaauauuguguugugcagcauuaaaaaaucaauaaaaauuaaaaaugagcaagaucuaaaaaaaaaaaaaaaaaaaaaaaaaaaaaaaaaaaaaaaaaaaaaaaaaaaaaaaaaaaaaaaaugcaucccccccccccccccccccccccccccccccaaaggcucuuuucagagccaccagaauu

SEQ ID NO: 14954 - RNA, 2199 nt, Artificial Sequence
  mRNA product Design g-3 comprising derived and/or modified sequence from HRSV(Memphis-37)__AIY60640.1__F_DSCav1_mut2 (opt3)
gggagaguccgcucagccagguugcagaagcggcuuagcguguguccuaaucuucucucugcguguagguaggccugugccgcaaacaagcuuaccauggagcugcccauccucaagaccaacgccauuacaacuauacuugcugcagugacgcugugcuucgccagcucccagaauaucaccgaagaguuuuaccaaucuacauguucagcggucaguaaaggcuauuugggggcuuuaagaacuggaugguacaccagcguuauuacaaucgaacuguccaacauuaaggagaauaaaugcaacgguaccgacgccaaggugaaacuaaucaagcaggaacucgauaaguauaaaaaugcaguaacugaccugcagcuucugaugcagucuacuccugccgcuggcucggggucagcaauauguagcggaaucgccgugugcaaggucuugcaccucgagggcgaggugaacaaaauuaagaaugcucugcugaguaccaacaaagccguugugucccucucuaauggugucagcguguuaacguucaagguacuggaucuuaagaacuacaucgacaaacaauugcugccaauucuaaauaagcaguccuguucaaucccgaacauagaaacuguuauugaguuucagcagaaaaauaacaggcuccuggaaaucacccgggaguucagugugaaugcgggggucacaacucccgugagcaccuauaugcuuacaaacucugagcuguugucccucauuaacgauaugccuaucaccaaugaccaaaagaaacugaugucaaacaaugugcagaucguccgccagcagagcuacaguauuaugugcauaaucaaggaagagguuuuagcauaugugguacaacugccacucuacggagugauugauacgcccuguuggaaacuucauacuucuccucugugcacaaccaacacuaaggaaggcuccaauaucuguuugacacgaaccgaccguggcugguacugcgauaacgccgggagcgucucguuuuucccacaggcugagacguguaaggugcagucuaauagaguuuucugcgacaccaugaacucccuaacacugcccucagaagugaaucucugcaacauagauauuuucaauccuaaauaugacuguaagaucaugacaaguaaaaccgaugucagcuccucugugaucacaagccugggagccauuguaucaugcuacgguaagacuaaauguaccgcaaguaacaagaauaggggcaucauuaagacauuuuccaacgggugcgacuauguuagcaauaaaggaguggacaccgucucugugggcaacacucuuuacugugucaacaagcaagagggucagucacuguaugugaaaggggagccaauaaucaauuucuacgauccguugguuuuucccagugacgaauuugaugcuagcauuucccaggugaacgagaagaucaaucagucucucgccuuuauccggaaaucggacgaacuguuacacaacguaaaugucggaaagagcacgacaaacauuaugauaaccacuaucauuaucgugauuaucguuauacugcuacuccugaucgcggugggccuuuucuuguauugcaaggcccgcuccaccccugucacacugucaaaagaucaacucaguggcauuaauaacaucgcauucucuaauugaggacuagugaagggaacacccaaauuuaauucagccuuaagcacaauuaauuaagagugaaacguaauuguacaagcaguuggucacccaccauagggcaugaucaacaccgcaaccuuuccuuuuucccccagugauucugaaaaaccccucuucccuucagcuugcuuagauguuccaaauuuaguaagcuuaaggcggccuacagaagaaaaagaaaaaaaaggccacaaaaguucccucucacuuucaguaaauaaaauaaaagcagcaacagaaauaaagaaauaaaugaaauucaaaaugaaauaaauauuguguugugcagcauuaaaaaaucaauaaaaauuaaaaaugagcaagaucuaaaaaaaaaaaaaaaaaaaaaaaaaaaaaaaaaaaaaaaaaaaaaaaaaaaaaaaaaaaaaaaaugcaucccccccccccccccccccccccccccccccaaaggcucuuuucagagccaccagaauu

SEQ ID NO: 14955 - RNA, 2199 nt, Artificial Sequence
  mRNA product Design g-3 comprising derived and/or modified sequence from HRSV(Memphis-37)__AIY60640.1__F_DSCav1_mut2 (opt4)
gggagaguccgcucagccagguugcagaagcggcuuagcguguguccuaaucuucucucugcguguagguaggccugugccgcaaacaagcuuaccauggagcugcccauccugaagaccaacgccaucaccaccauccuggccgccgugacccugugcuucgccagcagccagaacaucaccgaggaguucuaccagagcaccugcagcgccgugagcaagggcuaccugggcgcccugagaaccggcugguacaccagcgugaucaccaucgagcugagcaacaucaaggagaacaagugcaacggcaccgacgccaaggugaagcugaucaagcaggagcuggacaaguacaagaacgccgugaccgaccugcagcugcugaugcagagcacccccgccgccggcagcggcagcgccaucugcagcggcaucgccgugugcaaggugcugcaccuggagggcgaggugaacaagaucaagaacgcccugcugagcaccaacaaggccguggugagccugagcaacggcgugagcgugcugaccuucaaggugcuggaccugaagaacuacaucgacaagcagcugcugcccauccugaacaagcagagcugcagcauccccaacaucgagaccgugaucgaguuccagcagaagaacaacagacugcuggagaucaccagagaguucagcgugaacgccggcgugaccacccccgugagcaccuacaugcugaccaacagcgagcugcugagccugaucaacgacaugcccaucaccaacgaccagaagaagcugaugagcaacaacgugcagaucgugagacagcagagcuacagcaucaugugcaucaucaaggaggaggugcuggccuacguggugcagcugccccuguacggcgugaucgacacccccugcuggaagcugcacaccagcccccugugcaccaccaacaccaaggagggcagcaacaucugccugaccagaaccgacagaggcugguacugcgacaacgccggcagcgugagcuucuucccccaggccgagaccugcaaggugcagagcaacagaguguucugcgacaccaugaacagccugacccugcccagcgaggugaaccugugcaacaucgacaucuucaaccccaaguacgacugcaagaucaugaccagcaagaccgacgugagcagcagcgugaucaccagccugggcgccaucgugagcugcuacggcaagaccaagugcaccgccagcaacaagaacagaggcaucaucaagaccuucagcaacggcugcgacuacgugagcaacaagggcguggacaccgugagcgugggcaacacccuguacugcgugaacaagcaggagggccagagccuguacgugaagggcgagcccaucaucaacuucuacgacccccugguguuccccagcgacgaguucgacgccagcaucagccaggugaacgagaagaucaaccagagccuggccuucaucagaaagagcgacgagcugcugcacaacgugaacgugggcaagagcaccaccaacaucaugaucaccaccaucaucaucgugaucaucgugauccugcugcugcugaucgccgugggccuguuccuguacugcaaggccagaagcacccccgugacccugagcaaggaccagcugagcggcaucaacaacaucgccuucagcaacugaggacuagugaagggaacacccaaauuuaauucagccuuaagcacaauuaauuaagagugaaacguaauuguacaagcaguuggucacccaccauagggcaugaucaacaccgcaaccuuuccuuuuucccccagugauucugaaaaaccccucuucccuucagcuugcuuagauguuccaaauuuaguaagcuuaaggcggccuacagaagaaaaagaaaaaaaaggccacaaaaguucccucucacuuucaguaaauaaaauaaaagcagcaacagaaauaaagaaauaaaugaaauucaaaaugaaauaaauauuguguugugcagcauuaaaaaaucaauaaaaauuaaaaaugagcaagaucuaaaaaaaaaaaaaaaaaaaaaaaaaaaaaaaaaaaaaaaaaaaaaaaaaaaaaaaaaaaaaaaaugcaucccccccccccccccccccccccccccccccaaaggcucuuuucagagccaccagaauu

SEQ ID NO: 14956 - RNA, 2199 nt, Artificial Sequence
  mRNA product Design g-3 comprising derived and/or modified sequence from HRSV(Memphis-37)__AIY60640.1__F_DSCav1_mut2 (opt5)
gggagaguccgcucagccagguugcagaagcggcuuagcguguguccuaaucuucucucugcguguagguaggccugugccgcaaacaagcuuaccauggagcugcccauccucaagaccaacgccauuacaacgauccuggcugccgugacccuuugcuucgcgagcucccagaauauuacagaagaguuuuaccaaucuaccuguagcgcugucuccaaaggcuaucugggggcccucagaacaggaugguacaccucuguuaucacaauugaacugagcaacaucaaggagaauaaaugcaacggcaccgacgccaaggugaaacuuaucaagcaggaacuggauaaguauaaaaaugcugugacggaccuccagcugcugaugcaguccaccccugccgcugggucuggaagcgccauuuguuccggcaucgcggucugcaaggugcuccaccuggagggggagguuaacaaaauuaagaaugcccuucugagcacaaacaaagcuguggucucucucuccaauggagugagcguucugaccuucaaggugcuugaucugaagaacuacaucgacaaacaacuccugccgauucugaauaagcagucuuguuccauccccaacauugaaacagucaucgaguuucagcagaaaaauaaccggcuccuggaaaucacccgcgaguucagcgugaaugccggcgugacgacaccugucucuaccuauaugcuuacaaacuccgagcugcucagccugauuaacgauaugcccaucaccaaugaccaaaagaaacuuauguccaacaauguucagauugugagacagcagucuuacagcaucaugugcauuaucaaggaagaggugcuggcuuaugucgugcaacucccucuguacggcguuaucgauacccccuguuggaaacugcauacauccccucucugcacgaccaacacaaaggaagggagcaauauuugucugacccggacagaccgcggaugguacugcgauaacgccggcucuguguccuuuuucccgcaggcggagaccuguaagguccagagcaauagaguguuuugcgacacgaugaacucucuuacacugcccagcgaaguuaaucucugcaacaucgauauuuucaauccuaaauaugacuguaagaucaugaccuccaaaaccgaugugucuagcuccgucauuacaagccugggggccaucgugucuugcuacggaaagaccaaauguacagcuuccaacaagaaucggggcaucauuaagacguuuagcaacgggugcgacuaugucucuaauaaaggaguggacaccguuuccgugggcaacacacuuuacugugucaacaagcaagagggccagagccuguaugugaaaggggagcccaucauuaauuucuacgauccucucguuuuucccuccgacgaguucgaugccucuaucagccaggugaacgaaaagauuaaucagucccuggcuuuuauccgcaaaucugacgaacugcuccacaacgucaaugugggaaagagcaccacaaacauuaugaucaccacgaucauuaucgugauuaucguuauucugcuucugcucaucgccgucggccuguuccuguauugcaaggccagauccaccccggugacacuuagcaaagaucaacucucugggaucaauaacauugcuuucuccaauugaggacuagugaagggaacacccaaauuuaauucagccuuaagcacaauuaauuaagagugaaacguaauuguacaagcaguuggucacccaccauagggcaugaucaacaccgcaaccuuuccuuuuucccccagugauucugaaaaaccccucuucccuucagcuugcuuagauguuccaaauuuaguaagcuuaaggcggccuacagaagaaaaagaaaaaaaaggccacaaaaguucccucucacuuucaguaaauaaaauaaaagcagcaacagaaauaaagaaauaaaugaaauucaaaaugaaauaaauauuguguugugcagcauuaaaaaaucaauaaaaauuaaaaaugagcaagaucuaaaaaaaaaaaaaaaaaaaaaaaaaaaaaaaaaaaaaaaaaaaaaaaaaaaaaaaaaaaaaaaaugcaucccccccccccccccccccccccccccccccaaaggcucuuuucagagccaccagaauu

SEQ ID NO: 14957 - RNA, 2199 nt, Artificial Sequence
  mRNA product Design g-3 comprising derived and/or modified sequence from HRSV(Memphis-37)__AIY60640.1__F_DSCav1_mut2 (opt6)
gggagaguccgcucagccagguugcagaagcggcuuagcguguguccuaaucuucucucugcguguagguaggccugugccgcaaacaagcuuaccauggagcuuccaauauuaaaaacaaacgcuauaacaacuauacucgcagcaguuacacucugcuucgcauccucacaaaacauaacugaagaauuuuaccaauccacuugcucagccguaucaaaaggauaucuaggagcacuuagaaccggaugguauacaucagugauaacaauagaacuaagcaacauaaaagaaaacaagugcaacggaacugacgcaaaagucaaacuaaucaaacaagaacuagacaaauacaaaaacgcaguaacagaccuacaauuacuaaugcaaucaacaccagcagcaggaucagguucagccauaugcucagguaucgcuguaugcaaaguccuucaccuagaaggugaaguaaacaaaauuaaaaacgcccuacucaguacaaauaaagcugucguaaguuuaucaaacggaguaucaguccuuacauucaaaguauuagaccuaaaaaauuauauagacaaacaauuacuaccaauacucaacaaacaaucaugcucaauaccaaauauagaaaccguaauagaauuucagcaaaaaaauaacagauuacuagaaauaaccagagaauuuucagucaacgcaggagucacaacacccgucucaaccuacaugcuaaccaacucagaacuucuaucucuuaucaacgacaugcccauaaccaaugaucaaaaaaaauuaaugucuaauaacguucaaauaguaagacaacaaucauacucaauaaugugcauaaucaaagaagaaguauuagcauacguaguacaacuaccccuauauggaguaauagacacacccugcuggaaacuacacacauccccccucuguacaacaaacacuaaagaaggaucaaacauuugccuaacaagaacagaccgcggaugguacugcgacaacgcaggcuccguaucuuucuuuccacaagccgaaacuuguaaaguucaaucaaacagaguauuuugcgauacaaugaacuccuuaacauuaccuucagaaguaaaccuaugcaacauagacaucuucaacccaaaauacgacugcaaaauaaugaccucaaaaacagacguauccucaucagucauaaccuccuuaggagcaauaguaucauguuacggaaaaacaaaauguacagcaucaaauaaaaauagaggaauaauaaaaaccuucuccaacggaugcgacuacguauccaauaaaggaguagacaccguaucaguaggaaacacacuauacuguguaaacaaacaagaaggccaaucucuauauguaaaaggcgaaccaaucauaaauuuuuacgacccacuugucuuccccuccgacgaauuugacgcaagcauaucacaaguaaacgaaaaaaucaaccaaagccuagccuucauaaggaaaucugacgaauuacuucauaacguaaauguuggaaaaucaaccacaaacauaaugauaaccaccaucauaauuguaauaauaguaauacuacuacuacuaauugcaguaggacucuuccuauauugcaaagcucgcucaacaccaguuaccuuaucaaaagaccaacuaucuggaauaaacaacauagccuuuuccaacuaaggacuagugaagggaacacccaaauuuaauucagccuuaagcacaauuaauuaagagugaaacguaauuguacaagcaguuggucacccaccauagggcaugaucaacaccgcaaccuuuccuuuuucccccagugauucugaaaaaccccucuucccuucagcuugcuuagauguuccaaauuuaguaagcuuaaggcggccuacagaagaaaaagaaaaaaaaggccacaaaaguucccucucacuuucaguaaauaaaauaaaagcagcaacagaaauaaagaaauaaaugaaauucaaaaugaaauaaauauuguguugugcagcauuaaaaaaucaauaaaaauuaaaaaugagcaagaucuaaaaaaaaaaaaaaaaaaaaaaaaaaaaaaaaaaaaaaaaaaaaaaaaaaaaaaaaaaaaaaaaugcaucccccccccccccccccccccccccccccccaaaggcucuuuucagagccaccagaauu

SEQ ID NO: 14958 - RNA, 2199 nt, Artificial Sequence
  mRNA product Design g-3 comprising derived and/or modified sequence from HRSV(Memphis-37)__AIY60640.1__F_DSCav1_mut2 (opt11)
gggagaguccgcucagccagguugcagaagcggcuuagcguguguccuaaucuucucucugcguguagguaggccugugccgcaaacaagcuuaccauggaacucccaauccuaaaaaccaacgccaucaccaccauccucgccgcugucaccuuaugcuuugccagcagccaaaacaucaccgaagaauuuuaccaaucaacaugcuccgccgucucaaaaggauaccucggcgcccuacgcaccggcugguacacaagcgucauaaccaucgagcucuccaacaucaaggaaaacaaaugcaauggaaccgacgccaaagucaaacuaaucaaacaagaacuagacaaguacaagaacgcagucaccgaccuccaacuccucaugcaguccacccccgcagcaggcucuggcucagcaauaugcuccggcaucgcugucugcaaaguccuacaccucgaaggcgaagucaacaaaaucaaaaacgcccuacuguccacaaacaaagccgucgucucccuauccaacggcgucucgguccuaaccuuuaagguucucgaucucaaaaauuacauagacaaacaacuacuccccauccucaacaaacaaucuugcucaauccccaacaucgaaaccgucaucgaguuccaacagaaaaacaacagacuacucgaaaucacccgcgaguucucagucaacgcgggcgucacaacacccgucagcaccuacaugcuaaccaacuccgaacuccucagccucauuaacgacaugcccaucaccaacgaccaaaagaaacuuauguccaacaacguucaaaucguccgccaacaauccuacuccaucaugugcaucaucaaagaagaaguacucgccuacguaguccaacugccccucuacggcgucaucgauaccccaugcuggaaacuacacaccagcccccucugcaccaccaacaccaaagaaggcuccaauaucugcuuaacccgcacagaccguggcugguacugcgauaacgccggcuccgucuccuucuucccccaagcagaaaccugcaaaguacaauccaaccgagucuucugugacaccaugaacucccuaacccuuccaucagaagucaaccucugcaacaucgacaucuucaaccccaaguacgacugcaaaaucaugacauccaaaaccgaugucucaagcagcgucauaaccucacucggcgcuaucguaagcugcuacggcaaaaccaaaugcaccgcaucaaacaaaaaccgcggaaucaucaaaaccuucagcaacggaugcgacuacguuuccaacaaaggcguagacaccgucuccgucggaaacacccucuacugcguaaacaaacaggaaggccaaucccucuacgucaaaggcgaacccaucauaaacuucuacgauccccuugucuucccguccgaugaguucgacgccuccaucucgcaagucaacgaaaagauaaaccaaucacuagcauucauccguaaauccgacgaacuccuccacaacgucaacgucggaaaauccaccaccaacauaaugaucaccaccauaaucaucgucaucaucguaauacuauuacuccucauagccgucggccucuuccuauauugcaaagcccgaucaacccccguaacccuuucuaaagaccaacuguccggaaucaacaacaucgcuuucagcaacugaggacuagugaagggaacacccaaauuuaauucagccuuaagcacaauuaauuaagagugaaacguaauuguacaagcaguuggucacccaccauagggcaugaucaacaccgcaaccuuuccuuuuucccccagugauucugaaaaaccccucuucccuucagcuugcuuagauguuccaaauuuaguaagcuuaaggcggccuacagaagaaaaagaaaaaaaaggccacaaaaguucccucucacuuucaguaaauaaaauaaaagcagcaacagaaauaaagaaauaaaugaaauucaaaaugaaauaaauauuguguugugcagcauuaaaaaaucaauaaaaauuaaaaaugagcaagaucuaaaaaaaaaaaaaaaaaaaaaaaaaaaaaaaaaaaaaaaaaaaaaaaaaaaaaaaaaaaaaaaaugcaucccccccccccccccccccccccccccccccaaaggcucuuuucagagccaccagaauu

SEQ ID NO: 14959 - RNA, 1994 nt, Artificial Sequence
  mRNA product Design g-4 comprising derived and/or modified sequence from HRSV(Memphis-37)__AIY60640.1__F_DSCav1_mut2 (opt1)
gggagacuccugucgggcggaaguaggaggaguagaguuuaaaaacaguacucuuuuuccgguucgggacguaguugaagcaacgacaagccggauaaccgcucuugagacaggaagcuuaccauggagcugcccauccucaagaccaacgccaucaccacgauccuggccgcggugacccugugcuucgccagcucccagaacaucaccgaggaguucuaccagagcacgugcuccgccgucagcaagggcuaccucggcgcccugcgcaccgggugguacaccagcgugaucaccaucgagcuguccaacaucaaggagaacaagugcaacggcaccgacgccaaggugaagcucaucaagcaggagcuggacaaguacaagaacgcggucacggaccugcagcuccugaugcagagcaccccggccgccggcuccgggagcgcgaucugcuccggcaucgccgucugcaaggugcugcaccucgagggcgaggugaacaagaucaagaacgcccugcuguccaccaacaaggccgucgugagccucuccaacggggugagcguccugaccuucaaggugcuggaccucaagaacuacaucgacaagcagcugcugcccauccugaacaagcagagcugcuccauccccaacaucgagaccgucaucgaguuccagcagaagaacaaccgccuccuggagaucacgcgggaguucagcgugaacgcgggcgugaccacccccgucuccaccuacaugcugacgaacagcgagcuccugucccugaucaacgacaugccgaucaccaacgaccagaagaagcucaugagcaacaacgugcagaucgugcgccagcaguccuacagcaucaugugcaucaucaaggaggagguccuggccuacguggugcagcugccccucuacggggucaucgacacccccugcuggaagcugcacaccagcccccugugcacgaccaacaccaaggagggcuccaacaucugccucacccggacggaccgcgggugguacugcgacaacgccggcagcguguccuucuucccgcaggccgagaccugcaagguccagagcaaccggguguucugcgacaccaugaacucccugacccugcccagcgaggugaaccucugcaacaucgacaucuucaaccccaaguacgacugcaagaucaugacguccaagaccgacgucagcuccagcgugaucaccucccugggcgccaucgugagcugcuacgggaagaccaagugcacggcgagcaacaagaaccgcggcaucaucaagaccuucuccaacgggugcgacuacgucagcaacaagggcguggacaccguguccgucggcaacacccuguacugcgugaacaagcaggagggccagagccucuacgugaagggggagcccaucaucaacuucuacgacccgcuggucuuccccuccgacgaguucgacgccagcaucucccaggugaacgagaagaucaaccagagccuggccuucauccggaaguccgacgagcuccugcacaacgugaacgucggcaagagcaccacgaacaucaugaucaccaccaucaucaucgugaucaucgugauccugcugcuccugaucgccgucgggcuguuccucuacugcaaggcccgcuccacccccgugacgcugagcaaggaccagcuguccgggaucaacaacaucgcguucagcaacugaggacuaguaauaaggaaacuguaugaaugucugugggcaggaagugaagagauccuucuguaaagguuuuuggaauuaugucugcugaauaauaaacuuuuuugaaauaauaaaucugguagaaaaaugagaucuaaaaaaaaaaaaaaaaaaaaaaaaaaaaaaaaaaaaaaaaaaaaaaaaaaaaaaaaaaaaaaaaugcaucccccccccccccccccccccccccccccccaaaggcucuuuucagagccaccagaauu

SEQ ID NO: 14960 - RNA, 1994 nt, Artificial Sequence
  mRNA product Design g-4 comprising derived and/or modified sequence from HRSV(Memphis-37)__AIY60640.1__F_DSCav1_mut2 (opt1)
gggagacuccugucgggcggaaguaggaggaguagaguuuaaaaacaguacucuuuuuccgguucgggacguaguugaagcaacgacaagccggauaaccgcucuugagacaggaagcuuaccauggagcugcccauccucaagaccaacgccaucaccacgauccuggccgcggugacccugugcuucgccagcucccagaacaucaccgaggaguucuaccagagcacgugcuccgccgucagcaagggcuaccucggggcccugcgcaccggcugguacaccuccgugaucaccaucgagcugagcaacaucaaggagaacaagugcaacgggaccgacgccaaggugaagcucaucaagcaggagcuggacaaguacaagaacgcggucacggaccugcagcuccugaugcaguccaccccggccgccggcagcggguccgccaucugcagcggcaucgcggugugcaaggugcugcaccucgagggcgaggucaacaagaucaagaacgcccugcuguccaccaacaaggccguggugagccucuccaacggggucagcgugcugaccuucaaggugcuggaccucaagaacuacaucgacaagcagcugcugcccauccucaacaagcaguccugcagcauccccaacaucgagacggucaucgaguuccagcagaagaacaaccggcugcuggagaucacccgcgaguucuccgugaacgccggcgugaccacccccgucagcacguacaugcucaccaacuccgagcugcugagccucaucaacgacaugccgaucaccaacgaccagaagaagcugaugagcaacaacgugcagaucgugcggcagcaguccuacagcaucaugugcaucaucaaggaggagguccuggccuacguggugcagcucccccuguacggggucaucgacacccccugcuggaagcugcacacgagcccccucugcaccaccaacaccaaggagggcuccaacaucugccugacgcgcaccgaccgggggugguacugcgacaacgcgggcuccgugagcuucuucccgcaggccgagaccugcaaggugcaguccaaccgcgucuucugcgacaccaugaacagccugacgcuccccuccgaggugaaccugugcaacaucgacaucuucaaccccaaguacgacugcaagaucaugaccagcaagaccgacgucuccagcuccgugaucaccagccugggcgccaucguguccugcuacgggaagacgaagugcaccgccagcaacaagaaccggggcaucaucaagaccuucuccaacgggugcgacuacgucagcaacaagggcguggacaccguguccgucggcaacacgcucuacugcgugaacaagcaggaggggcagagccuguacgugaagggcgagcccaucaucaacuucuacgacccgcuggucuuccccagcgacgaguucgacgccuccaucagccaggugaacgagaagaucaaccagucccucgcguucauccgcaagagcgacgagcugcugcacaacgugaacgucgggaaguccaccaccaacaucaugaucaccaccaucaucaucgugaucaucgugauccuccugcugcucaucgccgucggccuguuccuguacugcaaggcccggagcacgcccgugacccuguccaaggaccagcucagcgggaucaacaacaucgccuucuccaacugaggacuaguaauaaggaaacuguaugaaugucugugggcaggaagugaagagauccuucuguaaagguuuuuggaauuaugucugcugaauaauaaacuuuuuugaaauaauaaaucugguagaaaaaugagaucuaaaaaaaaaaaaaaaaaaaaaaaaaaaaaaaaaaaaaaaaaaaaaaaaaaaaaaaaaaaaaaaaugcaucccccccccccccccccccccccccccccccaaaggcucuuuucagagccaccagaauu

SEQ ID NO: 14961 - RNA, 1994 nt, Artificial Sequence
  mRNA product Design g-4 comprising derived and/or modified sequence from HRSV(Memphis-37)__AIY60640.1__F_DSCav1_mut2 (opt2)
gggagacuccugucgggcggaaguaggaggaguagaguuuaaaaacaguacucuuuuuccgguucgggacguaguugaagcaacgacaagccggauaaccgcucuugagacaggaagcuuaccauggagcuccccauccucaagaccaacgccaucaccaccauccucgccgccgucacccucugcuucgccuccucccagaacaucaccgaggaguucuaccaguccaccugcuccgccgucuccaagggcuaccucggcgcccuccgcaccggcugguacaccuccgucaucaccaucgagcucuccaacaucaaggagaacaagugcaacggcaccgacgccaaggucaagcucaucaagcaggagcucgacaaguacaagaacgccgucaccgaccuccagcuccucaugcaguccacccccgccgccggcuccggcuccgccaucugcuccggcaucgccgucugcaagguccuccaccucgagggcgaggucaacaagaucaagaacgcccuccucuccaccaacaaggccgucgucucccucuccaacggcgucuccguccucaccuucaagguccucgaccucaagaacuacaucgacaagcagcuccuccccauccucaacaagcaguccugcuccauccccaacaucgagaccgucaucgaguuccagcagaagaacaaccgccuccucgagaucacccgcgaguucuccgucaacgccggcgucaccacccccgucuccaccuacaugcucaccaacuccgagcuccucucccucaucaacgacaugcccaucaccaacgaccagaagaagcucauguccaacaacguccagaucguccgccagcaguccuacuccaucaugugcaucaucaaggaggagguccucgccuacgucguccagcucccccucuacggcgucaucgacacccccugcuggaagcuccacaccuccccccucugcaccaccaacaccaaggagggcuccaacaucugccucacccgcaccgaccgcggcugguacugcgacaacgccggcuccgucuccuucuucccccaggccgagaccugcaagguccaguccaaccgcgucuucugcgacaccaugaacucccucacccuccccuccgaggucaaccucugcaacaucgacaucuucaaccccaaguacgacugcaagaucaugaccuccaagaccgacgucuccuccuccgucaucaccucccucggcgccaucgucuccugcuacggcaagaccaagugcaccgccuccaacaagaaccgcggcaucaucaagaccuucuccaacggcugcgacuacgucuccaacaagggcgucgacaccgucuccgucggcaacacccucuacugcgucaacaagcaggagggccagucccucuacgucaagggcgagcccaucaucaacuucuacgacccccucgucuuccccuccgacgaguucgacgccuccaucucccaggucaacgagaagaucaaccagucccucgccuucauccgcaaguccgacgagcuccuccacaacgucaacgucggcaaguccaccaccaacaucaugaucaccaccaucaucaucgucaucaucgucauccuccuccuccucaucgccgucggccucuuccucuacugcaaggcccgcuccacccccgucacccucuccaaggaccagcucuccggcaucaacaacaucgccuucuccaacugaggacuaguaauaaggaaacuguaugaaugucugugggcaggaagugaagagauccuucuguaaagguuuuuggaauuaugucugcugaauaauaaacuuuuuugaaauaauaaaucugguagaaaaaugagaucuaaaaaaaaaaaaaaaaaaaaaaaaaaaaaaaaaaaaaaaaaaaaaaaaaaaaaaaaaaaaaaaaugcaucccccccccccccccccccccccccccccccaaaggcucuuuucagagccaccagaauu

SEQ ID NO: 14962 - RNA, 1994 nt, Artificial Sequence
  mRNA product Design g-4 comprising derived and/or modified sequence from HRSV(Memphis-37)__AIY60640.1__F_DSCav1_mut2 (opt3)
gggagacuccugucgggcggaaguaggaggaguagaguuuaaaaacaguacucuuuuuccgguucgggacguaguugaagcaacgacaagccggauaaccgcucuugagacaggaagcuuaccauggagcugcccauccucaagaccaacgccauuacaacuauacuugcugcagugacgcugugcuucgccagcucccagaauaucaccgaagaguuuuaccaaucuacauguucagcggucaguaaaggcuauuugggggcuuuaagaacuggaugguacaccagcguuauuacaaucgaacuguccaacauuaaggagaauaaaugcaacgguaccgacgccaaggugaaacuaaucaagcaggaacucgauaaguauaaaaaugcaguaacugaccugcagcuucugaugcagucuacuccugccgcuggcucggggucagcaauauguagcggaaucgccgugugcaaggucuugcaccucgagggcgaggugaacaaaauuaagaaugcucugcugaguaccaacaaagccguugugucccucucuaauggugucagcguguuaacguucaagguacuggaucuuaagaacuacaucgacaaacaauugcugccaauucuaaauaagcaguccuguucaaucccgaacauagaaacuguuauugaguuucagcagaaaaauaacaggcuccuggaaaucacccgggaguucagugugaaugcgggggucacaacucccgugagcaccuauaugcuuacaaacucugagcuguugucccucauuaacgauaugccuaucaccaaugaccaaaagaaacugaugucaaacaaugugcagaucguccgccagcagagcuacaguauuaugugcauaaucaaggaagagguuuuagcauaugugguacaacugccacucuacggagugauugauacgcccuguuggaaacuucauacuucuccucugugcacaaccaacacuaaggaaggcuccaauaucuguuugacacgaaccgaccguggcugguacugcgauaacgccgggagcgucucguuuuucccacaggcugagacguguaaggugcagucuaauagaguuuucugcgacaccaugaacucccuaacacugcccucagaagugaaucucugcaacauagauauuuucaauccuaaauaugacuguaagaucaugacaaguaaaaccgaugucagcuccucugugaucacaagccugggagccauuguaucaugcuacgguaagacuaaauguaccgcaaguaacaagaauaggggcaucauuaagacauuuuccaacgggugcgacuauguuagcaauaaaggaguggacaccgucucugugggcaacacucuuuacugugucaacaagcaagagggucagucacuguaugugaaaggggagccaauaaucaauuucuacgauccguugguuuuucccagugacgaauuugaugcuagcauuucccaggugaacgagaagaucaaucagucucucgccuuuauccggaaaucggacgaacuguuacacaacguaaaugucggaaagagcacgacaaacauuaugauaaccacuaucauuaucgugauuaucguuauacugcuacuccugaucgcggugggccuuuucuuguauugcaaggcccgcuccaccccugucacacugucaaaagaucaacucaguggcauuaauaacaucgcauucucuaauugaggacuaguaauaaggaaacuguaugaaugucugugggcaggaagugaagagauccuucuguaaagguuuuuggaauuaugucugcugaauaauaaacuuuuuugaaauaauaaaucugguagaaaaaugagaucuaaaaaaaaaaaaaaaaaaaaaaaaaaaaaaaaaaaaaaaaaaaaaaaaaaaaaaaaaaaaaaaaugcaucccccccccccccccccccccccccccccccaaaggcucuuuucagagccaccagaauu

SEQ ID NO: 14963 - RNA, 1994 nt, Artificial Sequence
  mRNA product Design g-4 comprising derived and/or modified sequence from HRSV(Memphis-37)__AIY60640.1__F_DSCav1_mut2 (opt4)
gggagacuccugucgggcggaaguaggaggaguagaguuuaaaaacaguacucuuuuuccgguucgggacguaguugaagcaacgacaagccggauaaccgcucuugagacaggaagcuuaccauggagcugcccauccugaagaccaacgccaucaccaccauccuggccgccgugacccugugcuucgccagcagccagaacaucaccgaggaguucuaccagagcaccugcagcgccgugagcaagggcuaccugggcgcccugagaaccggcugguacaccagcgugaucaccaucgagcugagcaacaucaaggagaacaagugcaacggcaccgacgccaaggugaagcugaucaagcaggagcuggacaaguacaagaacgccgugaccgaccugcagcugcugaugcagagcacccccgccgccggcagcggcagcgccaucugcagcggcaucgccgugugcaaggugcugcaccuggagggcgaggugaacaagaucaagaacgcccugcugagcaccaacaaggccguggugagccugagcaacggcgugagcgugcugaccuucaaggugcuggaccugaagaacuacaucgacaagcagcugcugcccauccugaacaagcagagcugcagcauccccaacaucgagaccgugaucgaguuccagcagaagaacaacagacugcuggagaucaccagagaguucagcgugaacgccggcgugaccacccccgugagcaccuacaugcugaccaacagcgagcugcugagccugaucaacgacaugcccaucaccaacgaccagaagaagcugaugagcaacaacgugcagaucgugagacagcagagcuacagcaucaugugcaucaucaaggaggaggugcuggccuacguggugcagcugccccuguacggcgugaucgacacccccugcuggaagcugcacaccagcccccugugcaccaccaacaccaaggagggcagcaacaucugccugaccagaaccgacagaggcugguacugcgacaacgccggcagcgugagcuucuucccccaggccgagaccugcaaggugcagagcaacagaguguucugcgacaccaugaacagccugacccugcccagcgaggugaaccugugcaacaucgacaucuucaaccccaaguacgacugcaagaucaugaccagcaagaccgacgugagcagcagcgugaucaccagccugggcgccaucgugagcugcuacggcaagaccaagugcaccgccagcaacaagaacagaggcaucaucaagaccuucagcaacggcugcgacuacgugagcaacaagggcguggacaccgugagcgugggcaacacccuguacugcgugaacaagcaggagggccagagccuguacgugaagggcgagcccaucaucaacuucuacgacccccugguguuccccagcgacgaguucgacgccagcaucagccaggugaacgagaagaucaaccagagccuggccuucaucagaaagagcgacgagcugcugcacaacgugaacgugggcaagagcaccaccaacaucaugaucaccaccaucaucaucgugaucaucgugauccugcugcugcugaucgccgugggccuguuccuguacugcaaggccagaagcacccccgugacccugagcaaggaccagcugagcggcaucaacaacaucgccuucagcaacugaggacuaguaauaaggaaacuguaugaaugucugugggcaggaagugaagagauccuucuguaaagguuuuuggaauuaugucugcugaauaauaaacuuuuuugaaauaauaaaucugguagaaaaaugagaucuaaaaaaaaaaaaaaaaaaaaaaaaaaaaaaaaaaaaaaaaaaaaaaaaaaaaaaaaaaaaaaaaugcaucccccccccccccccccccccccccccccccaaaggcucuuuucagagccaccagaauu

SEQ ID NO: 14964 - RNA, 1994 nt, Artificial Sequence
  mRNA product Design g-4 comprising derived and/or modified sequence from HRSV(Memphis-37)__AIY60640.1__F_DSCav1_mut2 (opt5)
gggagacuccugucgggcggaaguaggaggaguagaguuuaaaaacaguacucuuuuuccgguucgggacguaguugaagcaacgacaagccggauaaccgcucuugagacaggaagcuuaccauggagcugcccauccucaagaccaacgccauuacaacgauccuggcugccgugacccuuugcuucgcgagcucccagaauauuacagaagaguuuuaccaaucuaccuguagcgcugucuccaaaggcuaucugggggcccucagaacaggaugguacaccucuguuaucacaauugaacugagcaacaucaaggagaauaaaugcaacggcaccgacgccaaggugaaacuuaucaagcaggaacuggauaaguauaaaaaugcugugacggaccuccagcugcugaugcaguccaccccugccgcugggucuggaagcgccauuuguuccggcaucgcggucugcaaggugcuccaccuggagggggagguuaacaaaauuaagaaugcccuucugagcacaaacaaagcuguggucucucucuccaauggagugagcguucugaccuucaaggugcuugaucugaagaacuacaucgacaaacaacuccugccgauucugaauaagcagucuuguuccauccccaacauugaaacagucaucgaguuucagcagaaaaauaaccggcuccuggaaaucacccgcgaguucagcgugaaugccggcgugacgacaccugucucuaccuauaugcuuacaaacuccgagcugcucagccugauuaacgauaugcccaucaccaaugaccaaaagaaacuuauguccaacaauguucagauugugagacagcagucuuacagcaucaugugcauuaucaaggaagaggugcuggcuuaugucgugcaacucccucuguacggcguuaucgauacccccuguuggaaacugcauacauccccucucugcacgaccaacacaaaggaagggagcaauauuugucugacccggacagaccgcggaugguacugcgauaacgccggcucuguguccuuuuucccgcaggcggagaccuguaagguccagagcaauagaguguuuugcgacacgaugaacucucuuacacugcccagcgaaguuaaucucugcaacaucgauauuuucaauccuaaauaugacuguaagaucaugaccuccaaaaccgaugugucuagcuccgucauuacaagccugggggccaucgugucuugcuacggaaagaccaaauguacagcuuccaacaagaaucggggcaucauuaagacguuuagcaacgggugcgacuaugucucuaauaaaggaguggacaccguuuccgugggcaacacacuuuacugugucaacaagcaagagggccagagccuguaugugaaaggggagcccaucauuaauuucuacgauccucucguuuuucccuccgacgaguucgaugccucuaucagccaggugaacgaaaagauuaaucagucccuggcuuuuauccgcaaaucugacgaacugcuccacaacgucaaugugggaaagagcaccacaaacauuaugaucaccacgaucauuaucgugauuaucguuauucugcuucugcucaucgccgucggccuguuccuguauugcaaggccagauccaccccggugacacuuagcaaagaucaacucucugggaucaauaacauugcuuucuccaauugaggacuaguaauaaggaaacuguaugaaugucugugggcaggaagugaagagauccuucuguaaagguuuuuggaauuaugucugcugaauaauaaacuuuuuugaaauaauaaaucugguagaaaaaugagaucuaaaaaaaaaaaaaaaaaaaaaaaaaaaaaaaaaaaaaaaaaaaaaaaaaaaaaaaaaaaaaaaaugcaucccccccccccccccccccccccccccccccaaaggcucuuuucagagccaccagaauu

SEQ ID NO: 14965 - RNA, 1994 nt, Artificial Sequence
  mRNA product Design g-4 comprising derived and/or modified sequence from HRSV(Memphis-37)__AIY60640.1__F_DSCav1_mut2 (opt6)
gggagacuccugucgggcggaaguaggaggaguagaguuuaaaaacaguacucuuuuuccgguucgggacguaguugaagcaacgacaagccggauaaccgcucuugagacaggaagcuuaccauggagcuuccaauauuaaaaacaaacgcuauaacaacuauacucgcagcaguuacacucugcuucgcauccucacaaaacauaacugaagaauuuuaccaauccacuugcucagccguaucaaaaggauaucuaggagcacuuagaaccggaugguauacaucagugauaacaauagaacuaagcaacauaaaagaaaacaagugcaacggaacugacgcaaaagucaaacuaaucaaacaagaacuagacaaauacaaaaacgcaguaacagaccuacaauuacuaaugcaaucaacaccagcagcaggaucagguucagccauaugcucagguaucgcuguaugcaaaguccuucaccuagaaggugaaguaaacaaaauuaaaaacgcccuacucaguacaaauaaagcugucguaaguuuaucaaacggaguaucaguccuuacauucaaaguauuagaccuaaaaaauuauauagacaaacaauuacuaccaauacucaacaaacaaucaugcucaauaccaaauauagaaaccguaauagaauuucagcaaaaaaauaacagauuacuagaaauaaccagagaauuuucagucaacgcaggagucacaacacccgucucaaccuacaugcuaaccaacucagaacuucuaucucuuaucaacgacaugcccauaaccaaugaucaaaaaaaauuaaugucuaauaacguucaaauaguaagacaacaaucauacucaauaaugugcauaaucaaagaagaaguauuagcauacguaguacaacuaccccuauauggaguaauagacacacccugcuggaaacuacacacauccccccucuguacaacaaacacuaaagaaggaucaaacauuugccuaacaagaacagaccgcggaugguacugcgacaacgcaggcuccguaucuuucuuuccacaagccgaaacuuguaaaguucaaucaaacagaguauuuugcgauacaaugaacuccuuaacauuaccuucagaaguaaaccuaugcaacauagacaucuucaacccaaaauacgacugcaaaauaaugaccucaaaaacagacguauccucaucagucauaaccuccuuaggagcaauaguaucauguuacggaaaaacaaaauguacagcaucaaauaaaaauagaggaauaauaaaaaccuucuccaacggaugcgacuacguauccaauaaaggaguagacaccguaucaguaggaaacacacuauacuguguaaacaaacaagaaggccaaucucuauauguaaaaggcgaaccaaucauaaauuuuuacgacccacuugucuuccccuccgacgaauuugacgcaagcauaucacaaguaaacgaaaaaaucaaccaaagccuagccuucauaaggaaaucugacgaauuacuucauaacguaaauguuggaaaaucaaccacaaacauaaugauaaccaccaucauaauuguaauaauaguaauacuacuacuacuaauugcaguaggacucuuccuauauugcaaagcucgcucaacaccaguuaccuuaucaaaagaccaacuaucuggaauaaacaacauagccuuuuccaacuaaggacuaguaauaaggaaacuguaugaaugucugugggcaggaagugaagagauccuucuguaaagguuuuuggaauuaugucugcugaauaauaaacuuuuuugaaauaauaaaucugguagaaaaaugagaucuaaaaaaaaaaaaaaaaaaaaaaaaaaaaaaaaaaaaaaaaaaaaaaaaaaaaaaaaaaaaaaaaugcaucccccccccccccccccccccccccccccccaaaggcucuuuucagagccaccagaauu

SEQ ID NO: 14966 - RNA, 1994 nt, Artificial Sequence
  mRNA product Design g-4 comprising derived and/or modified sequence from HRSV(Memphis-37)__AIY60640.1__F_DSCav1_mut2 (opt11)
gggagacuccugucgggcggaaguaggaggaguagaguuuaaaaacaguacucuuuuuccgguucgggacguaguugaagcaacgacaagccggauaaccgcucuugagacaggaagcuuaccauggaacucccaauccuaaaaaccaacgccaucaccaccauccucgccgcugucaccuuaugcuuugccagcagccaaaacaucaccgaagaauuuuaccaaucaacaugcuccgccgucucaaaaggauaccucggcgcccuacgcaccggcugguacacaagcgucauaaccaucgagcucuccaacaucaaggaaaacaaaugcaauggaaccgacgccaaagucaaacuaaucaaacaagaacuagacaaguacaagaacgcagucaccgaccuccaacuccucaugcaguccacccccgcagcaggcucuggcucagcaauaugcuccggcaucgcugucugcaaaguccuacaccucgaaggcgaagucaacaaaaucaaaaacgcccuacuguccacaaacaaagccgucgucucccuauccaacggcgucucgguccuaaccuuuaagguucucgaucucaaaaauuacauagacaaacaacuacuccccauccucaacaaacaaucuugcucaauccccaacaucgaaaccgucaucgaguuccaacagaaaaacaacagacuacucgaaaucacccgcgaguucucagucaacgcgggcgucacaacacccgucagcaccuacaugcuaaccaacuccgaacuccucagccucauuaacgacaugcccaucaccaacgaccaaaagaaacuuauguccaacaacguucaaaucguccgccaacaauccuacuccaucaugugcaucaucaaagaagaaguacucgccuacguaguccaacugccccucuacggcgucaucgauaccccaugcuggaaacuacacaccagcccccucugcaccaccaacaccaaagaaggcuccaauaucugcuuaacccgcacagaccguggcugguacugcgauaacgccggcuccgucuccuucuucccccaagcagaaaccugcaaaguacaauccaaccgagucuucugugacaccaugaacucccuaacccuuccaucagaagucaaccucugcaacaucgacaucuucaaccccaaguacgacugcaaaaucaugacauccaaaaccgaugucucaagcagcgucauaaccucacucggcgcuaucguaagcugcuacggcaaaaccaaaugcaccgcaucaaacaaaaaccgcggaaucaucaaaaccuucagcaacggaugcgacuacguuuccaacaaaggcguagacaccgucuccgucggaaacacccucuacugcguaaacaaacaggaaggccaaucccucuacgucaaaggcgaacccaucauaaacuucuacgauccccuugucuucccguccgaugaguucgacgccuccaucucgcaagucaacgaaaagauaaaccaaucacuagcauucauccguaaauccgacgaacuccuccacaacgucaacgucggaaaauccaccaccaacauaaugaucaccaccauaaucaucgucaucaucguaauacuauuacuccucauagccgucggccucuuccuauauugcaaagcccgaucaacccccguaacccuuucuaaagaccaacuguccggaaucaacaacaucgcuuucagcaacugaggacuaguaauaaggaaacuguaugaaugucugugggcaggaagugaagagauccuucuguaaagguuuuuggaauuaugucugcugaauaauaaacuuuuuugaaauaauaaaucugguagaaaaaugagaucuaaaaaaaaaaaaaaaaaaaaaaaaaaaaaaaaaaaaaaaaaaaaaaaaaaaaaaaaaaaaaaaaugcaucccccccccccccccccccccccccccccccaaaggcucuuuucagagccaccagaauu

SEQ ID NO: 14967 - RNA, 1970 nt, Artificial Sequence
  mRNA product Design g-5 comprising derived and/or modified sequence from HRSV(Memphis-37)__AIY60640.1__F_DSCav1_mut2 (opt1)
gggagacccgugacccggaaguuguacggcuacgcgacuuucccucccacaaacccucgcgcccuuccuuuccuacuugggcccggcagaaagcuuaccauggagcugcccauccucaagaccaacgccaucaccacgauccuggccgcggugacccugugcuucgccagcucccagaacaucaccgaggaguucuaccagagcacgugcuccgccgucagcaagggcuaccucggcgcccugcgcaccgggugguacaccagcgugaucaccaucgagcuguccaacaucaaggagaacaagugcaacggcaccgacgccaaggugaagcucaucaagcaggagcuggacaaguacaagaacgcggucacggaccugcagcuccugaugcagagcaccccggccgccggcuccgggagcgcgaucugcuccggcaucgccgucugcaaggugcugcaccucgagggcgaggugaacaagaucaagaacgcccugcuguccaccaacaaggccgucgugagccucuccaacggggugagcguccugaccuucaaggugcuggaccucaagaacuacaucgacaagcagcugcugcccauccugaacaagcagagcugcuccauccccaacaucgagaccgucaucgaguuccagcagaagaacaaccgccuccuggagaucacgcgggaguucagcgugaacgcgggcgugaccacccccgucuccaccuacaugcugacgaacagcgagcuccugucccugaucaacgacaugccgaucaccaacgaccagaagaagcucaugagcaacaacgugcagaucgugcgccagcaguccuacagcaucaugugcaucaucaaggaggagguccuggccuacguggugcagcugccccucuacggggucaucgacacccccugcuggaagcugcacaccagcccccugugcacgaccaacaccaaggagggcuccaacaucugccucacccggacggaccgcgggugguacugcgacaacgccggcagcguguccuucuucccgcaggccgagaccugcaagguccagagcaaccggguguucugcgacaccaugaacucccugacccugcccagcgaggugaaccucugcaacaucgacaucuucaaccccaaguacgacugcaagaucaugacguccaagaccgacgucagcuccagcgugaucaccucccugggcgccaucgugagcugcuacgggaagaccaagugcacggcgagcaacaagaaccgcggcaucaucaagaccuucuccaacgggugcgacuacgucagcaacaagggcguggacaccguguccgucggcaacacccuguacugcgugaacaagcaggagggccagagccucuacgugaagggggagcccaucaucaacuucuacgacccgcuggucuuccccuccgacgaguucgacgccagcaucucccaggugaacgagaagaucaaccagagccuggccuucauccggaaguccgacgagcuccugcacaacgugaacgucggcaagagcaccacgaacaucaugaucaccaccaucaucaucgugaucaucgugauccugcugcuccugaucgccgucgggcuguuccucuacugcaaggcccgcuccacccccgugacgcugagcaaggaccagcuguccgggaucaacaacaucgcguucagcaacugaggacuaguaauaaggaaacuguaugaaugucugugggcaggaagugaagagauccuucuguaaagguuuuuggaauuaugucugcugaauaauaaacuuuuuugaaauaauaaaucugguagaaaaaugagaucuaaaaaaaaaaaaaaaaaaaaaaaaaaaaaaaaaaaaaaaaaaaaaaaaaaaaaaaaaaaaaaaaugcaucccccccccccccccccccccccccccccccaaaggcucuuuucagagccaccagaauu

SEQ ID NO: 14968 - RNA, 1970 nt, Artificial Sequence
  mRNA product Design g-5 comprising derived and/or modified sequence from HRSV(Memphis-37)__AIY60640.1__F_DSCav1_mut2 (opt1)
gggagacccgugacccggaaguuguacggcuacgcgacuuucccucccacaaacccucgcgcccuuccuuuccuacuugggcccggcagaaagcuuaccauggagcugcccauccucaagaccaacgccaucaccacgauccuggccgcggugacccugugcuucgccagcucccagaacaucaccgaggaguucuaccagagcacgugcuccgccgucagcaagggcuaccucggggcccugcgcaccggcugguacaccuccgugaucaccaucgagcugagcaacaucaaggagaacaagugcaacgggaccgacgccaaggugaagcucaucaagcaggagcuggacaaguacaagaacgcggucacggaccugcagcuccugaugcaguccaccccggccgccggcagcggguccgccaucugcagcggcaucgcggugugcaaggugcugcaccucgagggcgaggucaacaagaucaagaacgcccugcuguccaccaacaaggccguggugagccucuccaacggggucagcgugcugaccuucaaggugcuggaccucaagaacuacaucgacaagcagcugcugcccauccucaacaagcaguccugcagcauccccaacaucgagacggucaucgaguuccagcagaagaacaaccggcugcuggagaucacccgcgaguucuccgugaacgccggcgugaccacccccgucagcacguacaugcucaccaacuccgagcugcugagccucaucaacgacaugccgaucaccaacgaccagaagaagcugaugagcaacaacgugcagaucgugcggcagcaguccuacagcaucaugugcaucaucaaggaggagguccuggccuacguggugcagcucccccuguacggggucaucgacacccccugcuggaagcugcacacgagcccccucugcaccaccaacaccaaggagggcuccaacaucugccugacgcgcaccgaccgggggugguacugcgacaacgcgggcuccgugagcuucuucccgcaggccgagaccugcaaggugcaguccaaccgcgucuucugcgacaccaugaacagccugacgcuccccuccgaggugaaccugugcaacaucgacaucuucaaccccaaguacgacugcaagaucaugaccagcaagaccgacgucuccagcuccgugaucaccagccugggcgccaucguguccugcuacgggaagacgaagugcaccgccagcaacaagaaccggggcaucaucaagaccuucuccaacgggugcgacuacgucagcaacaagggcguggacaccguguccgucggcaacacgcucuacugcgugaacaagcaggaggggcagagccuguacgugaagggcgagcccaucaucaacuucuacgacccgcuggucuuccccagcgacgaguucgacgccuccaucagccaggugaacgagaagaucaaccagucccucgcguucauccgcaagagcgacgagcugcugcacaacgugaacgucgggaaguccaccaccaacaucaugaucaccaccaucaucaucgugaucaucgugauccuccugcugcucaucgccgucggccuguuccuguacugcaaggcccggagcacgcccgugacccuguccaaggaccagcucagcgggaucaacaacaucgccuucuccaacugaggacuaguaauaaggaaacuguaugaaugucugugggcaggaagugaagagauccuucuguaaagguuuuuggaauuaugucugcugaauaauaaacuuuuuugaaauaauaaaucugguagaaaaaugagaucuaaaaaaaaaaaaaaaaaaaaaaaaaaaaaaaaaaaaaaaaaaaaaaaaaaaaaaaaaaaaaaaaugcaucccccccccccccccccccccccccccccccaaaggcucuuuucagagccaccagaauu

SEQ ID NO: 14969 - RNA, 1970 nt, Artificial Sequence
  mRNA product Design g-5 comprising derived and/or modified sequence from HRSV(Memphis-37)__AIY60640.1__F_DSCav1_mut2 (opt2)
gggagacccgugacccggaaguuguacggcuacgcgacuuucccucccacaaacccucgcgcccuuccuuuccuacuugggcccggcagaaagcuuaccauggagcuccccauccucaagaccaacgccaucaccaccauccucgccgccgucacccucugcuucgccuccucccagaacaucaccgaggaguucuaccaguccaccugcuccgccgucuccaagggcuaccucggcgcccuccgcaccggcugguacaccuccgucaucaccaucgagcucuccaacaucaaggagaacaagugcaacggcaccgacgccaaggucaagcucaucaagcaggagcucgacaaguacaagaacgccgucaccgaccuccagcuccucaugcaguccacccccgccgccggcuccggcuccgccaucugcuccggcaucgccgucugcaagguccuccaccucgagggcgaggucaacaagaucaagaacgcccuccucuccaccaacaaggccgucgucucccucuccaacggcgucuccguccucaccuucaagguccucgaccucaagaacuacaucgacaagcagcuccuccccauccucaacaagcaguccugcuccauccccaacaucgagaccgucaucgaguuccagcagaagaacaaccgccuccucgagaucacccgcgaguucuccgucaacgccggcgucaccacccccgucuccaccuacaugcucaccaacuccgagcuccucucccucaucaacgacaugcccaucaccaacgaccagaagaagcucauguccaacaacguccagaucguccgccagcaguccuacuccaucaugugcaucaucaaggaggagguccucgccuacgucguccagcucccccucuacggcgucaucgacacccccugcuggaagcuccacaccuccccccucugcaccaccaacaccaaggagggcuccaacaucugccucacccgcaccgaccgcggcugguacugcgacaacgccggcuccgucuccuucuucccccaggccgagaccugcaagguccaguccaaccgcgucuucugcgacaccaugaacucccucacccuccccuccgaggucaaccucugcaacaucgacaucuucaaccccaaguacgacugcaagaucaugaccuccaagaccgacgucuccuccuccgucaucaccucccucggcgccaucgucuccugcuacggcaagaccaagugcaccgccuccaacaagaaccgcggcaucaucaagaccuucuccaacggcugcgacuacgucuccaacaagggcgucgacaccgucuccgucggcaacacccucuacugcgucaacaagcaggagggccagucccucuacgucaagggcgagcccaucaucaacuucuacgacccccucgucuuccccuccgacgaguucgacgccuccaucucccaggucaacgagaagaucaaccagucccucgccuucauccgcaaguccgacgagcuccuccacaacgucaacgucggcaaguccaccaccaacaucaugaucaccaccaucaucaucgucaucaucgucauccuccuccuccucaucgccgucggccucuuccucuacugcaaggcccgcuccacccccgucacccucuccaaggaccagcucuccggcaucaacaacaucgccuucuccaacugaggacuaguaauaaggaaacuguaugaaugucugugggcaggaagugaagagauccuucuguaaagguuuuuggaauuaugucugcugaauaauaaacuuuuuugaaauaauaaaucugguagaaaaaugagaucuaaaaaaaaaaaaaaaaaaaaaaaaaaaaaaaaaaaaaaaaaaaaaaaaaaaaaaaaaaaaaaaaugcaucccccccccccccccccccccccccccccccaaaggcucuuuucagagccaccagaauu

SEQ ID NO: 14970 - RNA, 1970 nt, Artificial Sequence
  mRNA product Design g-5 comprising derived and/or modified sequence from HRSV(Memphis-37)__AIY60640.1__F_DSCav1_mut2 (opt3)
gggagacccgugacccggaaguuguacggcuacgcgacuuucccucccacaaacccucgcgcccuuccuuuccuacuugggcccggcagaaagcuuaccauggagcugcccauccucaagaccaacgccauuacaacuauacuugcugcagugacgcugugcuucgccagcucccagaauaucaccgaagaguuuuaccaaucuacauguucagcggucaguaaaggcuauuugggggcuuuaagaacuggaugguacaccagcguuauuacaaucgaacuguccaacauuaaggagaauaaaugcaacgguaccgacgccaaggugaaacuaaucaagcaggaacucgauaaguauaaaaaugcaguaacugaccugcagcuucugaugcagucuacuccugccgcuggcucggggucagcaauauguagcggaaucgccgugugcaaggucuugcaccucgagggcgaggugaacaaaauuaagaaugcucugcugaguaccaacaaagccguugugucccucucuaauggugucagcguguuaacguucaagguacuggaucuuaagaacuacaucgacaaacaauugcugccaauucuaaauaagcaguccuguucaaucccgaacauagaaacuguuauugaguuucagcagaaaaauaacaggcuccuggaaaucacccgggaguucagugugaaugcgggggucacaacucccgugagcaccuauaugcuuacaaacucugagcuguugucccucauuaacgauaugccuaucaccaaugaccaaaagaaacugaugucaaacaaugugcagaucguccgccagcagagcuacaguauuaugugcauaaucaaggaagagguuuuagcauaugugguacaacugccacucuacggagugauugauacgcccuguuggaaacuucauacuucuccucugugcacaaccaacacuaaggaaggcuccaauaucuguuugacacgaaccgaccguggcugguacugcgauaacgccgggagcgucucguuuuucccacaggcugagacguguaaggugcagucuaauagaguuuucugcgacaccaugaacucccuaacacugcccucagaagugaaucucugcaacauagauauuuucaauccuaaauaugacuguaagaucaugacaaguaaaaccgaugucagcuccucugugaucacaagccugggagccauuguaucaugcuacgguaagacuaaauguaccgcaaguaacaagaauaggggcaucauuaagacauuuuccaacgggugcgacuauguuagcaauaaaggaguggacaccgucucugugggcaacacucuuuacugugucaacaagcaagagggucagucacuguaugugaaaggggagccaauaaucaauuucuacgauccguugguuuuucccagugacgaauuugaugcuagcauuucccaggugaacgagaagaucaaucagucucucgccuuuauccggaaaucggacgaacuguuacacaacguaaaugucggaaagagcacgacaaacauuaugauaaccacuaucauuaucgugauuaucguuauacugcuacuccugaucgcggugggccuuuucuuguauugcaaggcccgcuccaccccugucacacugucaaaagaucaacucaguggcauuaauaacaucgcauucucuaauugaggacuaguaauaaggaaacuguaugaaugucugugggcaggaagugaagagauccuucuguaaagguuuuuggaauuaugucugcugaauaauaaacuuuuuugaaauaauaaaucugguagaaaaaugagaucuaaaaaaaaaaaaaaaaaaaaaaaaaaaaaaaaaaaaaaaaaaaaaaaaaaaaaaaaaaaaaaaaugcaucccccccccccccccccccccccccccccccaaaggcucuuuucagagccaccagaauu

SEQ ID NO: 14971 - RNA, 1970 nt, Artificial Sequence
  mRNA product Design g-5 comprising derived and/or modified sequence from HRSV(Memphis-37)__AIY60640.1__F_DSCav1_mut2 (opt4)
gggagacccgugacccggaaguuguacggcuacgcgacuuucccucccacaaacccucgcgcccuuccuuuccuacuugggcccggcagaaagcuuaccauggagcugcccauccugaagaccaacgccaucaccaccauccuggccgccgugacccugugcuucgccagcagccagaacaucaccgaggaguucuaccagagcaccugcagcgccgugagcaagggcuaccugggcgcccugagaaccggcugguacaccagcgugaucaccaucgagcugagcaacaucaaggagaacaagugcaacggcaccgacgccaaggugaagcugaucaagcaggagcuggacaaguacaagaacgccgugaccgaccugcagcugcugaugcagagcacccccgccgccggcagcggcagcgccaucugcagcggcaucgccgugugcaaggugcugcaccuggagggcgaggugaacaagaucaagaacgcccugcugagcaccaacaaggccguggugagccugagcaacggcgugagcgugcugaccuucaaggugcuggaccugaagaacuacaucgacaagcagcugcugcccauccugaacaagcagagcugcagcauccccaacaucgagaccgugaucgaguuccagcagaagaacaacagacugcuggagaucaccagagaguucagcgugaacgccggcgugaccacccccgugagcaccuacaugcugaccaacagcgagcugcugagccugaucaacgacaugcccaucaccaacgaccagaagaagcugaugagcaacaacgugcagaucgugagacagcagagcuacagcaucaugugcaucaucaaggaggaggugcuggccuacguggugcagcugccccuguacggcgugaucgacacccccugcuggaagcugcacaccagcccccugugcaccaccaacaccaaggagggcagcaacaucugccugaccagaaccgacagaggcugguacugcgacaacgccggcagcgugagcuucuucccccaggccgagaccugcaaggugcagagcaacagaguguucugcgacaccaugaacagccugacccugcccagcgaggugaaccugugcaacaucgacaucuucaaccccaaguacgacugcaagaucaugaccagcaagaccgacgugagcagcagcgugaucaccagccugggcgccaucgugagcugcuacggcaagaccaagugcaccgccagcaacaagaacagaggcaucaucaagaccuucagcaacggcugcgacuacgugagcaacaagggcguggacaccgugagcgugggcaacacccuguacugcgugaacaagcaggagggccagagccuguacgugaagggcgagcccaucaucaacuucuacgacccccugguguuccccagcgacgaguucgacgccagcaucagccaggugaacgagaagaucaaccagagccuggccuucaucagaaagagcgacgagcugcugcacaacgugaacgugggcaagagcaccaccaacaucaugaucaccaccaucaucaucgugaucaucgugauccugcugcugcugaucgccgugggccuguuccuguacugcaaggccagaagcacccccgugacccugagcaaggaccagcugagcggcaucaacaacaucgccuucagcaacugaggacuaguaauaaggaaacuguaugaaugucugugggcaggaagugaagagauccuucuguaaagguuuuuggaauuaugucugcugaauaauaaacuuuuuugaaauaauaaaucugguagaaaaaugagaucuaaaaaaaaaaaaaaaaaaaaaaaaaaaaaaaaaaaaaaaaaaaaaaaaaaaaaaaaaaaaaaaaugcaucccccccccccccccccccccccccccccccaaaggcucuuuucagagccaccagaauu

SEQ ID NO: 14972 - RNA, 1970 nt, Artificial Sequence
  mRNA product Design g-5 comprising derived and/or modified sequence from HRSV(Memphis-37)__AIY60640.1__F_DSCav1_mut2 (opt5)
gggagacccgugacccggaaguuguacggcuacgcgacuuucccucccacaaacccucgcgcccuuccuuuccuacuugggcccggcagaaagcuuaccauggagcugcccauccucaagaccaacgccauuacaacgauccuggcugccgugacccuuugcuucgcgagcucccagaauauuacagaagaguuuuaccaaucuaccuguagcgcugucuccaaaggcuaucugggggcccucagaacaggaugguacaccucuguuaucacaauugaacugagcaacaucaaggagaauaaaugcaacggcaccgacgccaaggugaaacuuaucaagcaggaacuggauaaguauaaaaaugcugugacggaccuccagcugcugaugcaguccaccccugccgcugggucuggaagcgccauuuguuccggcaucgcggucugcaaggugcuccaccuggagggggagguuaacaaaauuaagaaugcccuucugagcacaaacaaagcuguggucucucucuccaauggagugagcguucugaccuucaaggugcuugaucugaagaacuacaucgacaaacaacuccugccgauucugaauaagcagucuuguuccauccccaacauugaaacagucaucgaguuucagcagaaaaauaaccggcuccuggaaaucacccgcgaguucagcgugaaugccggcgugacgacaccugucucuaccuauaugcuuacaaacuccgagcugcucagccugauuaacgauaugcccaucaccaaugaccaaaagaaacuuauguccaacaauguucagauugugagacagcagucuuacagcaucaugugcauuaucaaggaagaggugcuggcuuaugucgugcaacucccucuguacggcguuaucgauacccccuguuggaaacugcauacauccccucucugcacgaccaacacaaaggaagggagcaauauuugucugacccggacagaccgcggaugguacugcgauaacgccggcucuguguccuuuuucccgcaggcggagaccuguaagguccagagcaauagaguguuuugcgacacgaugaacucucuuacacugcccagcgaaguuaaucucugcaacaucgauauuuucaauccuaaauaugacuguaagaucaugaccuccaaaaccgaugugucuagcuccgucauuacaagccugggggccaucgugucuugcuacggaaagaccaaauguacagcuuccaacaagaaucggggcaucauuaagacguuuagcaacgggugcgacuaugucucuaauaaaggaguggacaccguuuccgugggcaacacacuuuacugugucaacaagcaagagggccagagccuguaugugaaaggggagcccaucauuaauuucuacgauccucucguuuuucccuccgacgaguucgaugccucuaucagccaggugaacgaaaagauuaaucagucccuggcuuuuauccgcaaaucugacgaacugcuccacaacgucaaugugggaaagagcaccacaaacauuaugaucaccacgaucauuaucgugauuaucguuauucugcuucugcucaucgccgucggccuguuccuguauugcaaggccagauccaccccggugacacuuagcaaagaucaacucucugggaucaauaacauugcuuucuccaauugaggacuaguaauaaggaaacuguaugaaugucugugggcaggaagugaagagauccuucuguaaagguuuuuggaauuaugucugcugaauaauaaacuuuuuugaaauaauaaaucugguagaaaaaugagaucuaaaaaaaaaaaaaaaaaaaaaaaaaaaaaaaaaaaaaaaaaaaaaaaaaaaaaaaaaaaaaaaaugcaucccccccccccccccccccccccccccccccaaaggcucuuuucagagccaccagaauu

SEQ ID NO: 14973 - RNA, 1970 nt, Artificial Sequence
  mRNA product Design g-5 comprising derived and/or modified sequence from HRSV(Memphis-37)__AIY60640.1__F_DSCav1_mut2 (opt6)
gggagacccgugacccggaaguuguacggcuacgcgacuuucccucccacaaacccucgcgcccuuccuuuccuacuugggcccggcagaaagcuuaccauggagcuuccaauauuaaaaacaaacgcuauaacaacuauacucgcagcaguuacacucugcuucgcauccucacaaaacauaacugaagaauuuuaccaauccacuugcucagccguaucaaaaggauaucuaggagcacuuagaaccggaugguauacaucagugauaacaauagaacuaagcaacauaaaagaaaacaagugcaacggaacugacgcaaaagucaaacuaaucaaacaagaacuagacaaauacaaaaacgcaguaacagaccuacaauuacuaaugcaaucaacaccagcagcaggaucagguucagccauaugcucagguaucgcuguaugcaaaguccuucaccuagaaggugaaguaaacaaaauuaaaaacgcccuacucaguacaaauaaagcugucguaaguuuaucaaacggaguaucaguccuuacauucaaaguauuagaccuaaaaaauuauauagacaaacaauuacuaccaauacucaacaaacaaucaugcucaauaccaaauauagaaaccguaauagaauuucagcaaaaaaauaacagauuacuagaaauaaccagagaauuuucagucaacgcaggagucacaacacccgucucaaccuacaugcuaaccaacucagaacuucuaucucuuaucaacgacaugcccauaaccaaugaucaaaaaaaauuaaugucuaauaacguucaaauaguaagacaacaaucauacucaauaaugugcauaaucaaagaagaaguauuagcauacguaguacaacuaccccuauauggaguaauagacacacccugcuggaaacuacacacauccccccucuguacaacaaacacuaaagaaggaucaaacauuugccuaacaagaacagaccgcggaugguacugcgacaacgcaggcuccguaucuuucuuuccacaagccgaaacuuguaaaguucaaucaaacagaguauuuugcgauacaaugaacuccuuaacauuaccuucagaaguaaaccuaugcaacauagacaucuucaacccaaaauacgacugcaaaauaaugaccucaaaaacagacguauccucaucagucauaaccuccuuaggagcaauaguaucauguuacggaaaaacaaaauguacagcaucaaauaaaaauagaggaauaauaaaaaccuucuccaacggaugcgacuacguauccaauaaaggaguagacaccguaucaguaggaaacacacuauacuguguaaacaaacaagaaggccaaucucuauauguaaaaggcgaaccaaucauaaauuuuuacgacccacuugucuuccccuccgacgaauuugacgcaagcauaucacaaguaaacgaaaaaaucaaccaaagccuagccuucauaaggaaaucugacgaauuacuucauaacguaaauguuggaaaaucaaccacaaacauaaugauaaccaccaucauaauuguaauaauaguaauacuacuacuacuaauugcaguaggacucuuccuauauugcaaagcucgcucaacaccaguuaccuuaucaaaagaccaacuaucuggaauaaacaacauagccuuuuccaacuaaggacuaguaauaaggaaacuguaugaaugucugugggcaggaagugaagagauccuucuguaaagguuuuuggaauuaugucugcugaauaauaaacuuuuuugaaauaauaaaucugguagaaaaaugagaucuaaaaaaaaaaaaaaaaaaaaaaaaaaaaaaaaaaaaaaaaaaaaaaaaaaaaaaaaaaaaaaaaugcaucccccccccccccccccccccccccccccccaaaggcucuuuucagagccaccagaauu

SEQ ID NO: 14974 - RNA, 1970 nt, Artificial Sequence
  mRNA product Design g-5 comprising derived and/or modified sequence from HRSV(Memphis-37)__AIY60640.1__F_DSCav1_mut2 (opt11)
gggagacccgugacccggaaguuguacggcuacgcgacuuucccucccacaaacccucgcgcccuuccuuuccuacuugggcccggcagaaagcuuaccauggaacucccaauccuaaaaaccaacgccaucaccaccauccucgccgcugucaccuuaugcuuugccagcagccaaaacaucaccgaagaauuuuaccaaucaacaugcuccgccgucucaaaaggauaccucggcgcccuacgcaccggcugguacacaagcgucauaaccaucgagcucuccaacaucaaggaaaacaaaugcaauggaaccgacgccaaagucaaacuaaucaaacaagaacuagacaaguacaagaacgcagucaccgaccuccaacuccucaugcaguccacccccgcagcaggcucuggcucagcaauaugcuccggcaucgcugucugcaaaguccuacaccucgaaggcgaagucaacaaaaucaaaaacgcccuacuguccacaaacaaagccgucgucucccuauccaacggcgucucgguccuaaccuuuaagguucucgaucucaaaaauuacauagacaaacaacuacuccccauccucaacaaacaaucuugcucaauccccaacaucgaaaccgucaucgaguuccaacagaaaaacaacagacuacucgaaaucacccgcgaguucucagucaacgcgggcgucacaacacccgucagcaccuacaugcuaaccaacuccgaacuccucagccucauuaacgacaugcccaucaccaacgaccaaaagaaacuuauguccaacaacguucaaaucguccgccaacaauccuacuccaucaugugcaucaucaaagaagaaguacucgccuacguaguccaacugccccucuacggcgucaucgauaccccaugcuggaaacuacacaccagcccccucugcaccaccaacaccaaagaaggcuccaauaucugcuuaacccgcacagaccguggcugguacugcgauaacgccggcuccgucuccuucuucccccaagcagaaaccugcaaaguacaauccaaccgagucuucugugacaccaugaacucccuaacccuuccaucagaagucaaccucugcaacaucgacaucuucaaccccaaguacgacugcaaaaucaugacauccaaaaccgaugucucaagcagcgucauaaccucacucggcgcuaucguaagcugcuacggcaaaaccaaaugcaccgcaucaaacaaaaaccgcggaaucaucaaaaccuucagcaacggaugcgacuacguuuccaacaaaggcguagacaccgucuccgucggaaacacccucuacugcguaaacaaacaggaaggccaaucccucuacgucaaaggcgaacccaucauaaacuucuacgauccccuugucuucccguccgaugaguucgacgccuccaucucgcaagucaacgaaaagauaaaccaaucacuagcauucauccguaaauccgacgaacuccuccacaacgucaacgucggaaaauccaccaccaacauaaugaucaccaccauaaucaucgucaucaucguaauacuauuacuccucauagccgucggccucuuccuauauugcaaagcccgaucaacccccguaacccuuucuaaagaccaacuguccggaaucaacaacaucgcuuucagcaacugaggacuaguaauaaggaaacuguaugaaugucugugggcaggaagugaagagauccuucuguaaagguuuuuggaauuaugucugcugaauaauaaacuuuuuugaaauaauaaaucugguagaaaaaugagaucuaaaaaaaaaaaaaaaaaaaaaaaaaaaaaaaaaaaaaaaaaaaaaaaaaaaaaaaaaaaaaaaaugcaucccccccccccccccccccccccccccccccaaaggcucuuuucagagccaccagaauu

SEQ ID NO: 14975 - RNA, 1986 nt, Artificial Sequence
  mRNA product Design h-1 comprising derived and/or modified sequence from HRSV(Memphis-37)__AIY60640.1__F_DSCav1_mut2 (opt1)
gggagacccgugacccggaaguuguacggcuacgcgacuuucccucccacaaacccucgcgcccuuccuuuccuacuugggcccggcagaaagcuuaccauggagcugcccauccucaagaccaacgccaucaccacgauccuggccgcggugacccugugcuucgccagcucccagaacaucaccgaggaguucuaccagagcacgugcuccgccgucagcaagggcuaccucggcgcccugcgcaccgggugguacaccagcgugaucaccaucgagcuguccaacaucaaggagaacaagugcaacggcaccgacgccaaggugaagcucaucaagcaggagcuggacaaguacaagaacgcggucacggaccugcagcuccugaugcagagcaccccggccgccggcuccgggagcgcgaucugcuccggcaucgccgucugcaaggugcugcaccucgagggcgaggugaacaagaucaagaacgcccugcuguccaccaacaaggccgucgugagccucuccaacggggugagcguccugaccuucaaggugcuggaccucaagaacuacaucgacaagcagcugcugcccauccugaacaagcagagcugcuccauccccaacaucgagaccgucaucgaguuccagcagaagaacaaccgccuccuggagaucacgcgggaguucagcgugaacgcgggcgugaccacccccgucuccaccuacaugcugacgaacagcgagcuccugucccugaucaacgacaugccgaucaccaacgaccagaagaagcucaugagcaacaacgugcagaucgugcgccagcaguccuacagcaucaugugcaucaucaaggaggagguccuggccuacguggugcagcugccccucuacggggucaucgacacccccugcuggaagcugcacaccagcccccugugcacgaccaacaccaaggagggcuccaacaucugccucacccggacggaccgcgggugguacugcgacaacgccggcagcguguccuucuucccgcaggccgagaccugcaagguccagagcaaccggguguucugcgacaccaugaacucccugacccugcccagcgaggugaaccucugcaacaucgacaucuucaaccccaaguacgacugcaagaucaugacguccaagaccgacgucagcuccagcgugaucaccucccugggcgccaucgugagcugcuacgggaagaccaagugcacggcgagcaacaagaaccgcggcaucaucaagaccuucuccaacgggugcgacuacgucagcaacaagggcguggacaccguguccgucggcaacacccuguacugcgugaacaagcaggagggccagagccucuacgugaagggggagcccaucaucaacuucuacgacccgcuggucuuccccuccgacgaguucgacgccagcaucucccaggugaacgagaagaucaaccagagccuggccuucauccggaaguccgacgagcuccugcacaacgugaacgucggcaagagcaccacgaacaucaugaucaccaccaucaucaucgugaucaucgugauccugcugcuccugaucgccgucgggcuguuccucuacugcaaggcccgcuccacccccgugacgcugagcaaggaccagcuguccgggaucaacaacaucgcguucagcaacugaggacuaguacuggcugcaucucccuuuccucuguccuccauccuucucccaggauggugaagggggaccugguacccagugauccccaccccaggauccuaaaucaugacuuaccugcuaauaaaaacucauuggaaaagugagaagaucuaaaaaaaaaaaaaaaaaaaaaaaaaaaaaaaaaaaaaaaaaaaaaaaaaaaaaaaaaaaaaaaaugcaucccccccccccccccccccccccccccccccaaaggcucuuuucagagccaccagaauu

SEQ ID NO: 14976 - RNA, 1986 nt, Artificial Sequence
  mRNA product Design h-1 comprising derived and/or modified sequence from HRSV(Memphis-37)__AIY60640.1__F_DSCav1_mut2 (opt1)
gggagacccgugacccggaaguuguacggcuacgcgacuuucccucccacaaacccucgcgcccuuccuuuccuacuugggcccggcagaaagcuuaccauggagcugcccauccucaagaccaacgccaucaccacgauccuggccgcggugacccugugcuucgccagcucccagaacaucaccgaggaguucuaccagagcacgugcuccgccgucagcaagggcuaccucggggcccugcgcaccggcugguacaccuccgugaucaccaucgagcugagcaacaucaaggagaacaagugcaacgggaccgacgccaaggugaagcucaucaagcaggagcuggacaaguacaagaacgcggucacggaccugcagcuccugaugcaguccaccccggccgccggcagcggguccgccaucugcagcggcaucgcggugugcaaggugcugcaccucgagggcgaggucaacaagaucaagaacgcccugcuguccaccaacaaggccguggugagccucuccaacggggucagcgugcugaccuucaaggugcuggaccucaagaacuacaucgacaagcagcugcugcccauccucaacaagcaguccugcagcauccccaacaucgagacggucaucgaguuccagcagaagaacaaccggcugcuggagaucacccgcgaguucuccgugaacgccggcgugaccacccccgucagcacguacaugcucaccaacuccgagcugcugagccucaucaacgacaugccgaucaccaacgaccagaagaagcugaugagcaacaacgugcagaucgugcggcagcaguccuacagcaucaugugcaucaucaaggaggagguccuggccuacguggugcagcucccccuguacggggucaucgacacccccugcuggaagcugcacacgagcccccucugcaccaccaacaccaaggagggcuccaacaucugccugacgcgcaccgaccgggggugguacugcgacaacgcgggcuccgugagcuucuucccgcaggccgagaccugcaaggugcaguccaaccgcgucuucugcgacaccaugaacagccugacgcuccccuccgaggugaaccugugcaacaucgacaucuucaaccccaaguacgacugcaagaucaugaccagcaagaccgacgucuccagcuccgugaucaccagccugggcgccaucguguccugcuacgggaagacgaagugcaccgccagcaacaagaaccggggcaucaucaagaccuucuccaacgggugcgacuacgucagcaacaagggcguggacaccguguccgucggcaacacgcucuacugcgugaacaagcaggaggggcagagccuguacgugaagggcgagcccaucaucaacuucuacgacccgcuggucuuccccagcgacgaguucgacgccuccaucagccaggugaacgagaagaucaaccagucccucgcguucauccgcaagagcgacgagcugcugcacaacgugaacgucgggaaguccaccaccaacaucaugaucaccaccaucaucaucgugaucaucgugauccuccugcugcucaucgccgucggccuguuccuguacugcaaggcccggagcacgcccgugacccuguccaaggaccagcucagcgggaucaacaacaucgccuucuccaacugaggacuaguacuggcugcaucucccuuuccucuguccuccauccuucucccaggauggugaagggggaccugguacccagugauccccaccccaggauccuaaaucaugacuuaccugcuaauaaaaacucauuggaaaagugagaagaucuaaaaaaaaaaaaaaaaaaaaaaaaaaaaaaaaaaaaaaaaaaaaaaaaaaaaaaaaaaaaaaaaugcaucccccccccccccccccccccccccccccccaaaggcucuuuucagagccaccagaauu

SEQ ID NO: 14977 - RNA, 1986 nt, Artificial Sequence
  mRNA product Design h-1 comprising derived and/or modified sequence from HRSV(Memphis-37)__AIY60640.1__F_DSCav1_mut2 (opt2)
gggagacccgugacccggaaguuguacggcuacgcgacuuucccucccacaaacccucgcgcccuuccuuuccuacuugggcccggcagaaagcuuaccauggagcuccccauccucaagaccaacgccaucaccaccauccucgccgccgucacccucugcuucgccuccucccagaacaucaccgaggaguucuaccaguccaccugcuccgccgucuccaagggcuaccucggcgcccuccgcaccggcugguacaccuccgucaucaccaucgagcucuccaacaucaaggagaacaagugcaacggcaccgacgccaaggucaagcucaucaagcaggagcucgacaaguacaagaacgccgucaccgaccuccagcuccucaugcaguccacccccgccgccggcuccggcuccgccaucugcuccggcaucgccgucugcaagguccuccaccucgagggcgaggucaacaagaucaagaacgcccuccucuccaccaacaaggccgucgucucccucuccaacggcgucuccguccucaccuucaagguccucgaccucaagaacuacaucgacaagcagcuccuccccauccucaacaagcaguccugcuccauccccaacaucgagaccgucaucgaguuccagcagaagaacaaccgccuccucgagaucacccgcgaguucuccgucaacgccggcgucaccacccccgucuccaccuacaugcucaccaacuccgagcuccucucccucaucaacgacaugcccaucaccaacgaccagaagaagcucauguccaacaacguccagaucguccgccagcaguccuacuccaucaugugcaucaucaaggaggagguccucgccuacgucguccagcucccccucuacggcgucaucgacacccccugcuggaagcuccacaccuccccccucugcaccaccaacaccaaggagggcuccaacaucugccucacccgcaccgaccgcggcugguacugcgacaacgccggcuccgucuccuucuucccccaggccgagaccugcaagguccaguccaaccgcgucuucugcgacaccaugaacucccucacccuccccuccgaggucaaccucugcaacaucgacaucuucaaccccaaguacgacugcaagaucaugaccuccaagaccgacgucuccuccuccgucaucaccucccucggcgccaucgucuccugcuacggcaagaccaagugcaccgccuccaacaagaaccgcggcaucaucaagaccuucuccaacggcugcgacuacgucuccaacaagggcgucgacaccgucuccgucggcaacacccucuacugcgucaacaagcaggagggccagucccucuacgucaagggcgagcccaucaucaacuucuacgacccccucgucuuccccuccgacgaguucgacgccuccaucucccaggucaacgagaagaucaaccagucccucgccuucauccgcaaguccgacgagcuccuccacaacgucaacgucggcaaguccaccaccaacaucaugaucaccaccaucaucaucgucaucaucgucauccuccuccuccucaucgccgucggccucuuccucuacugcaaggcccgcuccacccccgucacccucuccaaggaccagcucuccggcaucaacaacaucgccuucuccaacugaggacuaguacuggcugcaucucccuuuccucuguccuccauccuucucccaggauggugaagggggaccugguacccagugauccccaccccaggauccuaaaucaugacuuaccugcuaauaaaaacucauuggaaaagugagaagaucuaaaaaaaaaaaaaaaaaaaaaaaaaaaaaaaaaaaaaaaaaaaaaaaaaaaaaaaaaaaaaaaaugcaucccccccccccccccccccccccccccccccaaaggcucuuuucagagccaccagaauu

SEQ ID NO: 14978 - RNA, 1986 nt, Artificial Sequence
  mRNA product Design h-1 comprising derived and/or modified sequence from HRSV(Memphis-37)__AIY60640.1__F_DSCav1_mut2 (opt3)
gggagacccgugacccggaaguuguacggcuacgcgacuuucccucccacaaacccucgcgcccuuccuuuccuacuugggcccggcagaaagcuuaccauggagcugcccauccucaagaccaacgccauuacaacuauacuugcugcagugacgcugugcuucgccagcucccagaauaucaccgaagaguuuuaccaaucuacauguucagcggucaguaaaggcuauuugggggcuuuaagaacuggaugguacaccagcguuauuacaaucgaacuguccaacauuaaggagaauaaaugcaacgguaccgacgccaaggugaaacuaaucaagcaggaacucgauaaguauaaaaaugcaguaacugaccugcagcuucugaugcagucuacuccugccgcuggcucggggucagcaauauguagcggaaucgccgugugcaaggucuugcaccucgagggcgaggugaacaaaauuaagaaugcucugcugaguaccaacaaagccguugugucccucucuaauggugucagcguguuaacguucaagguacuggaucuuaagaacuacaucgacaaacaauugcugccaauucuaaauaagcaguccuguucaaucccgaacauagaaacuguuauugaguuucagcagaaaaauaacaggcuccuggaaaucacccgggaguucagugugaaugcgggggucacaacucccgugagcaccuauaugcuuacaaacucugagcuguugucccucauuaacgauaugccuaucaccaaugaccaaaagaaacugaugucaaacaaugugcagaucguccgccagcagagcuacaguauuaugugcauaaucaaggaagagguuuuagcauaugugguacaacugccacucuacggagugauugauacgcccuguuggaaacuucauacuucuccucugugcacaaccaacacuaaggaaggcuccaauaucuguuugacacgaaccgaccguggcugguacugcgauaacgccgggagcgucucguuuuucccacaggcugagacguguaaggugcagucuaauagaguuuucugcgacaccaugaacucccuaacacugcccucagaagugaaucucugcaacauagauauuuucaauccuaaauaugacuguaagaucaugacaaguaaaaccgaugucagcuccucugugaucacaagccugggagccauuguaucaugcuacgguaagacuaaauguaccgcaaguaacaagaauaggggcaucauuaagacauuuuccaacgggugcgacuauguuagcaauaaaggaguggacaccgucucugugggcaacacucuuuacugugucaacaagcaagagggucagucacuguaugugaaaggggagccaauaaucaauuucuacgauccguugguuuuucccagugacgaauuugaugcuagcauuucccaggugaacgagaagaucaaucagucucucgccuuuauccggaaaucggacgaacuguuacacaacguaaaugucggaaagagcacgacaaacauuaugauaaccacuaucauuaucgugauuaucguuauacugcuacuccugaucgcggugggccuuuucuuguauugcaaggcccgcuccaccccugucacacugucaaaagaucaacucaguggcauuaauaacaucgcauucucuaauugaggacuaguacuggcugcaucucccuuuccucuguccuccauccuucucccaggauggugaagggggaccugguacccagugauccccaccccaggauccuaaaucaugacuuaccugcuaauaaaaacucauuggaaaagugagaagaucuaaaaaaaaaaaaaaaaaaaaaaaaaaaaaaaaaaaaaaaaaaaaaaaaaaaaaaaaaaaaaaaaugcaucccccccccccccccccccccccccccccccaaaggcucuuuucagagccaccagaauu

SEQ ID NO: 14979 - RNA, 1986 nt, Artificial Sequence
  mRNA product Design h-1 comprising derived and/or modified sequence from HRSV(Memphis-37)__AIY60640.1__F_DSCav1_mut2 (opt4)
gggagacccgugacccggaaguuguacggcuacgcgacuuucccucccacaaacccucgcgcccuuccuuuccuacuugggcccggcagaaagcuuaccauggagcugcccauccugaagaccaacgccaucaccaccauccuggccgccgugacccugugcuucgccagcagccagaacaucaccgaggaguucuaccagagcaccugcagcgccgugagcaagggcuaccugggcgcccugagaaccggcugguacaccagcgugaucaccaucgagcugagcaacaucaaggagaacaagugcaacggcaccgacgccaaggugaagcugaucaagcaggagcuggacaaguacaagaacgccgugaccgaccugcagcugcugaugcagagcacccccgccgccggcagcggcagcgccaucugcagcggcaucgccgugugcaaggugcugcaccuggagggcgaggugaacaagaucaagaacgcccugcugagcaccaacaaggccguggugagccugagcaacggcgugagcgugcugaccuucaaggugcuggaccugaagaacuacaucgacaagcagcugcugcccauccugaacaagcagagcugcagcauccccaacaucgagaccgugaucgaguuccagcagaagaacaacagacugcuggagaucaccagagaguucagcgugaacgccggcgugaccacccccgugagcaccuacaugcugaccaacagcgagcugcugagccugaucaacgacaugcccaucaccaacgaccagaagaagcugaugagcaacaacgugcagaucgugagacagcagagcuacagcaucaugugcaucaucaaggaggaggugcuggccuacguggugcagcugccccuguacggcgugaucgacacccccugcuggaagcugcacaccagcccccugugcaccaccaacaccaaggagggcagcaacaucugccugaccagaaccgacagaggcugguacugcgacaacgccggcagcgugagcuucuucccccaggccgagaccugcaaggugcagagcaacagaguguucugcgacaccaugaacagccugacccugcccagcgaggugaaccugugcaacaucgacaucuucaaccccaaguacgacugcaagaucaugaccagcaagaccgacgugagcagcagcgugaucaccagccugggcgccaucgugagcugcuacggcaagaccaagugcaccgccagcaacaagaacagaggcaucaucaagaccuucagcaacggcugcgacuacgugagcaacaagggcguggacaccgugagcgugggcaacacccuguacugcgugaacaagcaggagggccagagccuguacgugaagggcgagcccaucaucaacuucuacgacccccugguguuccccagcgacgaguucgacgccagcaucagccaggugaacgagaagaucaaccagagccuggccuucaucagaaagagcgacgagcugcugcacaacgugaacgugggcaagagcaccaccaacaucaugaucaccaccaucaucaucgugaucaucgugauccugcugcugcugaucgccgugggccuguuccuguacugcaaggccagaagcacccccgugacccugagcaaggaccagcugagcggcaucaacaacaucgccuucagcaacugaggacuaguacuggcugcaucucccuuuccucuguccuccauccuucucccaggauggugaagggggaccugguacccagugauccccaccccaggauccuaaaucaugacuuaccugcuaauaaaaacucauuggaaaagugagaagaucuaaaaaaaaaaaaaaaaaaaaaaaaaaaaaaaaaaaaaaaaaaaaaaaaaaaaaaaaaaaaaaaaugcaucccccccccccccccccccccccccccccccaaaggcucuuuucagagccaccagaauu

SEQ ID NO: 14980 - RNA, 1986 nt, Artificial Sequence
  mRNA product Design h-1 comprising derived and/or modified sequence from HRSV(Memphis-37)__AIY60640.1__F_DSCav1_mut2 (opt5)
gggagacccgugacccggaaguuguacggcuacgcgacuuucccucccacaaacccucgcgcccuuccuuuccuacuugggcccggcagaaagcuuaccauggagcugcccauccucaagaccaacgccauuacaacgauccuggcugccgugacccuuugcuucgcgagcucccagaauauuacagaagaguuuuaccaaucuaccuguagcgcugucuccaaaggcuaucugggggcccucagaacaggaugguacaccucuguuaucacaauugaacugagcaacaucaaggagaauaaaugcaacggcaccgacgccaaggugaaacuuaucaagcaggaacuggauaaguauaaaaaugcugugacggaccuccagcugcugaugcaguccaccccugccgcugggucuggaagcgccauuuguuccggcaucgcggucugcaaggugcuccaccuggagggggagguuaacaaaauuaagaaugcccuucugagcacaaacaaagcuguggucucucucuccaauggagugagcguucugaccuucaaggugcuugaucugaagaacuacaucgacaaacaacuccugccgauucugaauaagcagucuuguuccauccccaacauugaaacagucaucgaguuucagcagaaaaauaaccggcuccuggaaaucacccgcgaguucagcgugaaugccggcgugacgacaccugucucuaccuauaugcuuacaaacuccgagcugcucagccugauuaacgauaugcccaucaccaaugaccaaaagaaacuuauguccaacaauguucagauugugagacagcagucuuacagcaucaugugcauuaucaaggaagaggugcuggcuuaugucgugcaacucccucuguacggcguuaucgauacccccuguuggaaacugcauacauccccucucugcacgaccaacacaaaggaagggagcaauauuugucugacccggacagaccgcggaugguacugcgauaacgccggcucuguguccuuuuucccgcaggcggagaccuguaagguccagagcaauagaguguuuugcgacacgaugaacucucuuacacugcccagcgaaguuaaucucugcaacaucgauauuuucaauccuaaauaugacuguaagaucaugaccuccaaaaccgaugugucuagcuccgucauuacaagccugggggccaucgugucuugcuacggaaagaccaaauguacagcuuccaacaagaaucggggcaucauuaagacguuuagcaacgggugcgacuaugucucuaauaaaggaguggacaccguuuccgugggcaacacacuuuacugugucaacaagcaagagggccagagccuguaugugaaaggggagcccaucauuaauuucuacgauccucucguuuuucccuccgacgaguucgaugccucuaucagccaggugaacgaaaagauuaaucagucccuggcuuuuauccgcaaaucugacgaacugcuccacaacgucaaugugggaaagagcaccacaaacauuaugaucaccacgaucauuaucgugauuaucguuauucugcuucugcucaucgccgucggccuguuccuguauugcaaggccagauccaccccggugacacuuagcaaagaucaacucucugggaucaauaacauugcuuucuccaauugaggacuaguacuggcugcaucucccuuuccucuguccuccauccuucucccaggauggugaagggggaccugguacccagugauccccaccccaggauccuaaaucaugacuuaccugcuaauaaaaacucauuggaaaagugagaagaucuaaaaaaaaaaaaaaaaaaaaaaaaaaaaaaaaaaaaaaaaaaaaaaaaaaaaaaaaaaaaaaaaugcaucccccccccccccccccccccccccccccccaaaggcucuuuucagagccaccagaauu

SEQ ID NO: 14981 - RNA, 1986 nt, Artificial Sequence
  mRNA product Design h-1 comprising derived and/or modified sequence from HRSV(Memphis-37)__AIY60640.1__F_DSCav1_mut2 (opt6)
gggagacccgugacccggaaguuguacggcuacgcgacuuucccucccacaaacccucgcgcccuuccuuuccuacuugggcccggcagaaagcuuaccauggagcuuccaauauuaaaaacaaacgcuauaacaacuauacucgcagcaguuacacucugcuucgcauccucacaaaacauaacugaagaauuuuaccaauccacuugcucagccguaucaaaaggauaucuaggagcacuuagaaccggaugguauacaucagugauaacaauagaacuaagcaacauaaaagaaaacaagugcaacggaacugacgcaaaagucaaacuaaucaaacaagaacuagacaaauacaaaaacgcaguaacagaccuacaauuacuaaugcaaucaacaccagcagcaggaucagguucagccauaugcucagguaucgcuguaugcaaaguccuucaccuagaaggugaaguaaacaaaauuaaaaacgcccuacucaguacaaauaaagcugucguaaguuuaucaaacggaguaucaguccuuacauucaaaguauuagaccuaaaaaauuauauagacaaacaauuacuaccaauacucaacaaacaaucaugcucaauaccaaauauagaaaccguaauagaauuucagcaaaaaaauaacagauuacuagaaauaaccagagaauuuucagucaacgcaggagucacaacacccgucucaaccuacaugcuaaccaacucagaacuucuaucucuuaucaacgacaugcccauaaccaaugaucaaaaaaaauuaaugucuaauaacguucaaauaguaagacaacaaucauacucaauaaugugcauaaucaaagaagaaguauuagcauacguaguacaacuaccccuauauggaguaauagacacacccugcuggaaacuacacacauccccccucuguacaacaaacacuaaagaaggaucaaacauuugccuaacaagaacagaccgcggaugguacugcgacaacgcaggcuccguaucuuucuuuccacaagccgaaacuuguaaaguucaaucaaacagaguauuuugcgauacaaugaacuccuuaacauuaccuucagaaguaaaccuaugcaacauagacaucuucaacccaaaauacgacugcaaaauaaugaccucaaaaacagacguauccucaucagucauaaccuccuuaggagcaauaguaucauguuacggaaaaacaaaauguacagcaucaaauaaaaauagaggaauaauaaaaaccuucuccaacggaugcgacuacguauccaauaaaggaguagacaccguaucaguaggaaacacacuauacuguguaaacaaacaagaaggccaaucucuauauguaaaaggcgaaccaaucauaaauuuuuacgacccacuugucuuccccuccgacgaauuugacgcaagcauaucacaaguaaacgaaaaaaucaaccaaagccuagccuucauaaggaaaucugacgaauuacuucauaacguaaauguuggaaaaucaaccacaaacauaaugauaaccaccaucauaauuguaauaauaguaauacuacuacuacuaauugcaguaggacucuuccuauauugcaaagcucgcucaacaccaguuaccuuaucaaaagaccaacuaucuggaauaaacaacauagccuuuuccaacuaaggacuaguacuggcugcaucucccuuuccucuguccuccauccuucucccaggauggugaagggggaccugguacccagugauccccaccccaggauccuaaaucaugacuuaccugcuaauaaaaacucauuggaaaagugagaagaucuaaaaaaaaaaaaaaaaaaaaaaaaaaaaaaaaaaaaaaaaaaaaaaaaaaaaaaaaaaaaaaaaugcaucccccccccccccccccccccccccccccccaaaggcucuuuucagagccaccagaauu

SEQ ID NO: 14982 - RNA, 1986 nt, Artificial Sequence
  mRNA product Design h-1 comprising derived and/or modified sequence from HRSV(Memphis-37)__AIY60640.1__F_DSCav1_mut2 (opt11)
gggagacccgugacccggaaguuguacggcuacgcgacuuucccucccacaaacccucgcgcccuuccuuuccuacuugggcccggcagaaagcuuaccauggaacucccaauccuaaaaaccaacgccaucaccaccauccucgccgcugucaccuuaugcuuugccagcagccaaaacaucaccgaagaauuuuaccaaucaacaugcuccgccgucucaaaaggauaccucggcgcccuacgcaccggcugguacacaagcgucauaaccaucgagcucuccaacaucaaggaaaacaaaugcaauggaaccgacgccaaagucaaacuaaucaaacaagaacuagacaaguacaagaacgcagucaccgaccuccaacuccucaugcaguccacccccgcagcaggcucuggcucagcaauaugcuccggcaucgcugucugcaaaguccuacaccucgaaggcgaagucaacaaaaucaaaaacgcccuacuguccacaaacaaagccgucgucucccuauccaacggcgucucgguccuaaccuuuaagguucucgaucucaaaaauuacauagacaaacaacuacuccccauccucaacaaacaaucuugcucaauccccaacaucgaaaccgucaucgaguuccaacagaaaaacaacagacuacucgaaaucacccgcgaguucucagucaacgcgggcgucacaacacccgucagcaccuacaugcuaaccaacuccgaacuccucagccucauuaacgacaugcccaucaccaacgaccaaaagaaacuuauguccaacaacguucaaaucguccgccaacaauccuacuccaucaugugcaucaucaaagaagaaguacucgccuacguaguccaacugccccucuacggcgucaucgauaccccaugcuggaaacuacacaccagcccccucugcaccaccaacaccaaagaaggcuccaauaucugcuuaacccgcacagaccguggcugguacugcgauaacgccggcuccgucuccuucuucccccaagcagaaaccugcaaaguacaauccaaccgagucuucugugacaccaugaacucccuaacccuuccaucagaagucaaccucugcaacaucgacaucuucaaccccaaguacgacugcaaaaucaugacauccaaaaccgaugucucaagcagcgucauaaccucacucggcgcuaucguaagcugcuacggcaaaaccaaaugcaccgcaucaaacaaaaaccgcggaaucaucaaaaccuucagcaacggaugcgacuacguuuccaacaaaggcguagacaccgucuccgucggaaacacccucuacugcguaaacaaacaggaaggccaaucccucuacgucaaaggcgaacccaucauaaacuucuacgauccccuugucuucccguccgaugaguucgacgccuccaucucgcaagucaacgaaaagauaaaccaaucacuagcauucauccguaaauccgacgaacuccuccacaacgucaacgucggaaaauccaccaccaacauaaugaucaccaccauaaucaucgucaucaucguaauacuauuacuccucauagccgucggccucuuccuauauugcaaagcccgaucaacccccguaacccuuucuaaagaccaacuguccggaaucaacaacaucgcuuucagcaacugaggacuaguacuggcugcaucucccuuuccucuguccuccauccuucucccaggauggugaagggggaccugguacccagugauccccaccccaggauccuaaaucaugacuuaccugcuaauaaaaacucauuggaaaagugagaagaucuaaaaaaaaaaaaaaaaaaaaaaaaaaaaaaaaaaaaaaaaaaaaaaaaaaaaaaaaaaaaaaaaugcaucccccccccccccccccccccccccccccccaaaggcucuuuucagagccaccagaauu

SEQ ID NO: 14983 - RNA, 2202 nt, Artificial Sequence
  mRNA product Design h-2 comprising derived and/or modified sequence from HRSV(Memphis-37)__AIY60640.1__F_DSCav1_mut2 (opt1)
gggagacccgugacccggaaguuguacggcuacgcgacuuucccucccacaaacccucgcgcccuuccuuuccuacuugggcccggcagaaagcuuaccauggagcugcccauccucaagaccaacgccaucaccacgauccuggccgcggugacccugugcuucgccagcucccagaacaucaccgaggaguucuaccagagcacgugcuccgccgucagcaagggcuaccucggcgcccugcgcaccgggugguacaccagcgugaucaccaucgagcuguccaacaucaaggagaacaagugcaacggcaccgacgccaaggugaagcucaucaagcaggagcuggacaaguacaagaacgcggucacggaccugcagcuccugaugcagagcaccccggccgccggcuccgggagcgcgaucugcuccggcaucgccgucugcaaggugcugcaccucgagggcgaggugaacaagaucaagaacgcccugcuguccaccaacaaggccgucgugagccucuccaacggggugagcguccugaccuucaaggugcuggaccucaagaacuacaucgacaagcagcugcugcccauccugaacaagcagagcugcuccauccccaacaucgagaccgucaucgaguuccagcagaagaacaaccgccuccuggagaucacgcgggaguucagcgugaacgcgggcgugaccacccccgucuccaccuacaugcugacgaacagcgagcuccugucccugaucaacgacaugccgaucaccaacgaccagaagaagcucaugagcaacaacgugcagaucgugcgccagcaguccuacagcaucaugugcaucaucaaggaggagguccuggccuacguggugcagcugccccucuacggggucaucgacacccccugcuggaagcugcacaccagcccccugugcacgaccaacaccaaggagggcuccaacaucugccucacccggacggaccgcgggugguacugcgacaacgccggcagcguguccuucuucccgcaggccgagaccugcaagguccagagcaaccggguguucugcgacaccaugaacucccugacccugcccagcgaggugaaccucugcaacaucgacaucuucaaccccaaguacgacugcaagaucaugacguccaagaccgacgucagcuccagcgugaucaccucccugggcgccaucgugagcugcuacgggaagaccaagugcacggcgagcaacaagaaccgcggcaucaucaagaccuucuccaacgggugcgacuacgucagcaacaagggcguggacaccguguccgucggcaacacccuguacugcgugaacaagcaggagggccagagccucuacgugaagggggagcccaucaucaacuucuacgacccgcuggucuuccccuccgacgaguucgacgccagcaucucccaggugaacgagaagaucaaccagagccuggccuucauccggaaguccgacgagcuccugcacaacgugaacgucggcaagagcaccacgaacaucaugaucaccaccaucaucaucgugaucaucgugauccugcugcuccugaucgccgucgggcuguuccucuacugcaaggcccgcuccacccccgugacgcugagcaaggaccagcuguccgggaucaacaacaucgcguucagcaacugaggacuagugaagggaacacccaaauuuaauucagccuuaagcacaauuaauuaagagugaaacguaauuguacaagcaguuggucacccaccauagggcaugaucaacaccgcaaccuuuccuuuuucccccagugauucugaaaaaccccucuucccuucagcuugcuuagauguuccaaauuuaguaagcuuaaggcggccuacagaagaaaaagaaaaaaaaggccacaaaaguucccucucacuuucaguaaauaaaauaaaagcagcaacagaaauaaagaaauaaaugaaauucaaaaugaaauaaauauuguguugugcagcauuaaaaaaucaauaaaaauuaaaaaugagcaagaucuaaaaaaaaaaaaaaaaaaaaaaaaaaaaaaaaaaaaaaaaaaaaaaaaaaaaaaaaaaaaaaaaugcaucccccccccccccccccccccccccccccccaaaggcucuuuucagagccaccagaauu

SEQ ID NO: 14984 - RNA, 2202 nt, Artificial Sequence
  mRNA product Design h-2 comprising derived and/or modified sequence from HRSV(Memphis-37)__AIY60640.1__F_DSCav1_mut2 (opt1)
gggagacccgugacccggaaguuguacggcuacgcgacuuucccucccacaaacccucgcgcccuuccuuuccuacuugggcccggcagaaagcuuaccauggagcugcccauccucaagaccaacgccaucaccacgauccuggccgcggugacccugugcuucgccagcucccagaacaucaccgaggaguucuaccagagcacgugcuccgccgucagcaagggcuaccucggggcccugcgcaccggcugguacaccuccgugaucaccaucgagcugagcaacaucaaggagaacaagugcaacgggaccgacgccaaggugaagcucaucaagcaggagcuggacaaguacaagaacgcggucacggaccugcagcuccugaugcaguccaccccggccgccggcagcggguccgccaucugcagcggcaucgcggugugcaaggugcugcaccucgagggcgaggucaacaagaucaagaacgcccugcuguccaccaacaaggccguggugagccucuccaacggggucagcgugcugaccuucaaggugcuggaccucaagaacuacaucgacaagcagcugcugcccauccucaacaagcaguccugcagcauccccaacaucgagacggucaucgaguuccagcagaagaacaaccggcugcuggagaucacccgcgaguucuccgugaacgccggcgugaccacccccgucagcacguacaugcucaccaacuccgagcugcugagccucaucaacgacaugccgaucaccaacgaccagaagaagcugaugagcaacaacgugcagaucgugcggcagcaguccuacagcaucaugugcaucaucaaggaggagguccuggccuacguggugcagcucccccuguacggggucaucgacacccccugcuggaagcugcacacgagcccccucugcaccaccaacaccaaggagggcuccaacaucugccugacgcgcaccgaccgggggugguacugcgacaacgcgggcuccgugagcuucuucccgcaggccgagaccugcaaggugcaguccaaccgcgucuucugcgacaccaugaacagccugacgcuccccuccgaggugaaccugugcaacaucgacaucuucaaccccaaguacgacugcaagaucaugaccagcaagaccgacgucuccagcuccgugaucaccagccugggcgccaucguguccugcuacgggaagacgaagugcaccgccagcaacaagaaccggggcaucaucaagaccuucuccaacgggugcgacuacgucagcaacaagggcguggacaccguguccgucggcaacacgcucuacugcgugaacaagcaggaggggcagagccuguacgugaagggcgagcccaucaucaacuucuacgacccgcuggucuuccccagcgacgaguucgacgccuccaucagccaggugaacgagaagaucaaccagucccucgcguucauccgcaagagcgacgagcugcugcacaacgugaacgucgggaaguccaccaccaacaucaugaucaccaccaucaucaucgugaucaucgugauccuccugcugcucaucgccgucggccuguuccuguacugcaaggcccggagcacgcccgugacccuguccaaggaccagcucagcgggaucaacaacaucgccuucuccaacugaggacuagugaagggaacacccaaauuuaauucagccuuaagcacaauuaauuaagagugaaacguaauuguacaagcaguuggucacccaccauagggcaugaucaacaccgcaaccuuuccuuuuucccccagugauucugaaaaaccccucuucccuucagcuugcuuagauguuccaaauuuaguaagcuuaaggcggccuacagaagaaaaagaaaaaaaaggccacaaaaguucccucucacuuucaguaaauaaaauaaaagcagcaacagaaauaaagaaauaaaugaaauucaaaaugaaauaaauauuguguugugcagcauuaaaaaaucaauaaaaauuaaaaaugagcaagaucuaaaaaaaaaaaaaaaaaaaaaaaaaaaaaaaaaaaaaaaaaaaaaaaaaaaaaaaaaaaaaaaaugcaucccccccccccccccccccccccccccccccaaaggcucuuuucagagccaccagaauu

SEQ ID NO: 14985 - RNA, 2202 nt, Artificial Sequence
  mRNA product Design h-2 comprising derived and/or modified sequence from HRSV(Memphis-37)__AIY60640.1__F_DSCav1_mut2 (opt2)
gggagacccgugacccggaaguuguacggcuacgcgacuuucccucccacaaacccucgcgcccuuccuuuccuacuugggcccggcagaaagcuuaccauggagcuccccauccucaagaccaacgccaucaccaccauccucgccgccgucacccucugcuucgccuccucccagaacaucaccgaggaguucuaccaguccaccugcuccgccgucuccaagggcuaccucggcgcccuccgcaccggcugguacaccuccgucaucaccaucgagcucuccaacaucaaggagaacaagugcaacggcaccgacgccaaggucaagcucaucaagcaggagcucgacaaguacaagaacgccgucaccgaccuccagcuccucaugcaguccacccccgccgccggcuccggcuccgccaucugcuccggcaucgccgucugcaagguccuccaccucgagggcgaggucaacaagaucaagaacgcccuccucuccaccaacaaggccgucgucucccucuccaacggcgucuccguccucaccuucaagguccucgaccucaagaacuacaucgacaagcagcuccuccccauccucaacaagcaguccugcuccauccccaacaucgagaccgucaucgaguuccagcagaagaacaaccgccuccucgagaucacccgcgaguucuccgucaacgccggcgucaccacccccgucuccaccuacaugcucaccaacuccgagcuccucucccucaucaacgacaugcccaucaccaacgaccagaagaagcucauguccaacaacguccagaucguccgccagcaguccuacuccaucaugugcaucaucaaggaggagguccucgccuacgucguccagcucccccucuacggcgucaucgacacccccugcuggaagcuccacaccuccccccucugcaccaccaacaccaaggagggcuccaacaucugccucacccgcaccgaccgcggcugguacugcgacaacgccggcuccgucuccuucuucccccaggccgagaccugcaagguccaguccaaccgcgucuucugcgacaccaugaacucccucacccuccccuccgaggucaaccucugcaacaucgacaucuucaaccccaaguacgacugcaagaucaugaccuccaagaccgacgucuccuccuccgucaucaccucccucggcgccaucgucuccugcuacggcaagaccaagugcaccgccuccaacaagaaccgcggcaucaucaagaccuucuccaacggcugcgacuacgucuccaacaagggcgucgacaccgucuccgucggcaacacccucuacugcgucaacaagcaggagggccagucccucuacgucaagggcgagcccaucaucaacuucuacgacccccucgucuuccccuccgacgaguucgacgccuccaucucccaggucaacgagaagaucaaccagucccucgccuucauccgcaaguccgacgagcuccuccacaacgucaacgucggcaaguccaccaccaacaucaugaucaccaccaucaucaucgucaucaucgucauccuccuccuccucaucgccgucggccucuuccucuacugcaaggcccgcuccacccccgucacccucuccaaggaccagcucuccggcaucaacaacaucgccuucuccaacugaggacuagugaagggaacacccaaauuuaauucagccuuaagcacaauuaauuaagagugaaacguaauuguacaagcaguuggucacccaccauagggcaugaucaacaccgcaaccuuuccuuuuucccccagugauucugaaaaaccccucuucccuucagcuugcuuagauguuccaaauuuaguaagcuuaaggcggccuacagaagaaaaagaaaaaaaaggccacaaaaguucccucucacuuucaguaaauaaaauaaaagcagcaacagaaauaaagaaauaaaugaaauucaaaaugaaauaaauauuguguugugcagcauuaaaaaaucaauaaaaauuaaaaaugagcaagaucuaaaaaaaaaaaaaaaaaaaaaaaaaaaaaaaaaaaaaaaaaaaaaaaaaaaaaaaaaaaaaaaaugcaucccccccccccccccccccccccccccccccaaaggcucuuuucagagccaccagaauu

SEQ ID NO: 14986 - RNA, 2202 nt, Artificial Sequence
  mRNA product Design h-2 comprising derived and/or modified sequence from HRSV(Memphis-37)__AIY60640.1__F_DSCav1_mut2 (opt3)
gggagacccgugacccggaaguuguacggcuacgcgacuuucccucccacaaacccucgcgcccuuccuuuccuacuugggcccggcagaaagcuuaccauggagcugcccauccucaagaccaacgccauuacaacuauacuugcugcagugacgcugugcuucgccagcucccagaauaucaccgaagaguuuuaccaaucuacauguucagcggucaguaaaggcuauuugggggcuuuaagaacuggaugguacaccagcguuauuacaaucgaacuguccaacauuaaggagaauaaaugcaacgguaccgacgccaaggugaaacuaaucaagcaggaacucgauaaguauaaaaaugcaguaacugaccugcagcuucugaugcagucuacuccugccgcuggcucggggucagcaauauguagcggaaucgccgugugcaaggucuugcaccucgagggcgaggugaacaaaauuaagaaugcucugcugaguaccaacaaagccguugugucccucucuaauggugucagcguguuaacguucaagguacuggaucuuaagaacuacaucgacaaacaauugcugccaauucuaaauaagcaguccuguucaaucccgaacauagaaacuguuauugaguuucagcagaaaaauaacaggcuccuggaaaucacccgggaguucagugugaaugcgggggucacaacucccgugagcaccuauaugcuuacaaacucugagcuguugucccucauuaacgauaugccuaucaccaaugaccaaaagaaacugaugucaaacaaugugcagaucguccgccagcagagcuacaguauuaugugcauaaucaaggaagagguuuuagcauaugugguacaacugccacucuacggagugauugauacgcccuguuggaaacuucauacuucuccucugugcacaaccaacacuaaggaaggcuccaauaucuguuugacacgaaccgaccguggcugguacugcgauaacgccgggagcgucucguuuuucccacaggcugagacguguaaggugcagucuaauagaguuuucugcgacaccaugaacucccuaacacugcccucagaagugaaucucugcaacauagauauuuucaauccuaaauaugacuguaagaucaugacaaguaaaaccgaugucagcuccucugugaucacaagccugggagccauuguaucaugcuacgguaagacuaaauguaccgcaaguaacaagaauaggggcaucauuaagacauuuuccaacgggugcgacuauguuagcaauaaaggaguggacaccgucucugugggcaacacucuuuacugugucaacaagcaagagggucagucacuguaugugaaaggggagccaauaaucaauuucuacgauccguugguuuuucccagugacgaauuugaugcuagcauuucccaggugaacgagaagaucaaucagucucucgccuuuauccggaaaucggacgaacuguuacacaacguaaaugucggaaagagcacgacaaacauuaugauaaccacuaucauuaucgugauuaucguuauacugcuacuccugaucgcggugggccuuuucuuguauugcaaggcccgcuccaccccugucacacugucaaaagaucaacucaguggcauuaauaacaucgcauucucuaauugaggacuagugaagggaacacccaaauuuaauucagccuuaagcacaauuaauuaagagugaaacguaauuguacaagcaguuggucacccaccauagggcaugaucaacaccgcaaccuuuccuuuuucccccagugauucugaaaaaccccucuucccuucagcuugcuuagauguuccaaauuuaguaagcuuaaggcggccuacagaagaaaaagaaaaaaaaggccacaaaaguucccucucacuuucaguaaauaaaauaaaagcagcaacagaaauaaagaaauaaaugaaauucaaaaugaaauaaauauuguguugugcagcauuaaaaaaucaauaaaaauuaaaaaugagcaagaucuaaaaaaaaaaaaaaaaaaaaaaaaaaaaaaaaaaaaaaaaaaaaaaaaaaaaaaaaaaaaaaaaugcaucccccccccccccccccccccccccccccccaaaggcucuuuucagagccaccagaauu

SEQ ID NO: 14987 - RNA, 2202 nt, Artificial Sequence
  mRNA product Design h-2 comprising derived and/or modified sequence from HRSV(Memphis-37)__AIY60640.1__F_DSCav1_mut2 (opt4)
gggagacccgugacccggaaguuguacggcuacgcgacuuucccucccacaaacccucgcgcccuuccuuuccuacuugggcccggcagaaagcuuaccauggagcugcccauccugaagaccaacgccaucaccaccauccuggccgccgugacccugugcuucgccagcagccagaacaucaccgaggaguucuaccagagcaccugcagcgccgugagcaagggcuaccugggcgcccugagaaccggcugguacaccagcgugaucaccaucgagcugagcaacaucaaggagaacaagugcaacggcaccgacgccaaggugaagcugaucaagcaggagcuggacaaguacaagaacgccgugaccgaccugcagcugcugaugcagagcacccccgccgccggcagcggcagcgccaucugcagcggcaucgccgugugcaaggugcugcaccuggagggcgaggugaacaagaucaagaacgcccugcugagcaccaacaaggccguggugagccugagcaacggcgugagcgugcugaccuucaaggugcuggaccugaagaacuacaucgacaagcagcugcugcccauccugaacaagcagagcugcagcauccccaacaucgagaccgugaucgaguuccagcagaagaacaacagacugcuggagaucaccagagaguucagcgugaacgccggcgugaccacccccgugagcaccuacaugcugaccaacagcgagcugcugagccugaucaacgacaugcccaucaccaacgaccagaagaagcugaugagcaacaacgugcagaucgugagacagcagagcuacagcaucaugugcaucaucaaggaggaggugcuggccuacguggugcagcugccccuguacggcgugaucgacacccccugcuggaagcugcacaccagcccccugugcaccaccaacaccaaggagggcagcaacaucugccugaccagaaccgacagaggcugguacugcgacaacgccggcagcgugagcuucuucccccaggccgagaccugcaaggugcagagcaacagaguguucugcgacaccaugaacagccugacccugcccagcgaggugaaccugugcaacaucgacaucuucaaccccaaguacgacugcaagaucaugaccagcaagaccgacgugagcagcagcgugaucaccagccugggcgccaucgugagcugcuacggcaagaccaagugcaccgccagcaacaagaacagaggcaucaucaagaccuucagcaacggcugcgacuacgugagcaacaagggcguggacaccgugagcgugggcaacacccuguacugcgugaacaagcaggagggccagagccuguacgugaagggcgagcccaucaucaacuucuacgacccccugguguuccccagcgacgaguucgacgccagcaucagccaggugaacgagaagaucaaccagagccuggccuucaucagaaagagcgacgagcugcugcacaacgugaacgugggcaagagcaccaccaacaucaugaucaccaccaucaucaucgugaucaucgugauccugcugcugcugaucgccgugggccuguuccuguacugcaaggccagaagcacccccgugacccugagcaaggaccagcugagcggcaucaacaacaucgccuucagcaacugaggacuagugaagggaacacccaaauuuaauucagccuuaagcacaauuaauuaagagugaaacguaauuguacaagcaguuggucacccaccauagggcaugaucaacaccgcaaccuuuccuuuuucccccagugauucugaaaaaccccucuucccuucagcuugcuuagauguuccaaauuuaguaagcuuaaggcggccuacagaagaaaaagaaaaaaaaggccacaaaaguucccucucacuuucaguaaauaaaauaaaagcagcaacagaaauaaagaaauaaaugaaauucaaaaugaaauaaauauuguguugugcagcauuaaaaaaucaauaaaaauuaaaaaugagcaagaucuaaaaaaaaaaaaaaaaaaaaaaaaaaaaaaaaaaaaaaaaaaaaaaaaaaaaaaaaaaaaaaaaugcaucccccccccccccccccccccccccccccccaaaggcucuuuucagagccaccagaauu

SEQ ID NO: 14988 - RNA, 2202 nt, Artificial Sequence
  mRNA product Design h-2 comprising derived and/or modified sequence from HRSV(Memphis-37)__AIY60640.1__F_DSCav1_mut2 (opt5)
gggagacccgugacccggaaguuguacggcuacgcgacuuucccucccacaaacccucgcgcccuuccuuuccuacuugggcccggcagaaagcuuaccauggagcugcccauccucaagaccaacgccauuacaacgauccuggcugccgugacccuuugcuucgcgagcucccagaauauuacagaagaguuuuaccaaucuaccuguagcgcugucuccaaaggcuaucugggggcccucagaacaggaugguacaccucuguuaucacaauugaacugagcaacaucaaggagaauaaaugcaacggcaccgacgccaaggugaaacuuaucaagcaggaacuggauaaguauaaaaaugcugugacggaccuccagcugcugaugcaguccaccccugccgcugggucuggaagcgccauuuguuccggcaucgcggucugcaaggugcuccaccuggagggggagguuaacaaaauuaagaaugcccuucugagcacaaacaaagcuguggucucucucuccaauggagugagcguucugaccuucaaggugcuugaucugaagaacuacaucgacaaacaacuccugccgauucugaauaagcagucuuguuccauccccaacauugaaacagucaucgaguuucagcagaaaaauaaccggcuccuggaaaucacccgcgaguucagcgugaaugccggcgugacgacaccugucucuaccuauaugcuuacaaacuccgagcugcucagccugauuaacgauaugcccaucaccaaugaccaaaagaaacuuauguccaacaauguucagauugugagacagcagucuuacagcaucaugugcauuaucaaggaagaggugcuggcuuaugucgugcaacucccucuguacggcguuaucgauacccccuguuggaaacugcauacauccccucucugcacgaccaacacaaaggaagggagcaauauuugucugacccggacagaccgcggaugguacugcgauaacgccggcucuguguccuuuuucccgcaggcggagaccuguaagguccagagcaauagaguguuuugcgacacgaugaacucucuuacacugcccagcgaaguuaaucucugcaacaucgauauuuucaauccuaaauaugacuguaagaucaugaccuccaaaaccgaugugucuagcuccgucauuacaagccugggggccaucgugucuugcuacggaaagaccaaauguacagcuuccaacaagaaucggggcaucauuaagacguuuagcaacgggugcgacuaugucucuaauaaaggaguggacaccguuuccgugggcaacacacuuuacugugucaacaagcaagagggccagagccuguaugugaaaggggagcccaucauuaauuucuacgauccucucguuuuucccuccgacgaguucgaugccucuaucagccaggugaacgaaaagauuaaucagucccuggcuuuuauccgcaaaucugacgaacugcuccacaacgucaaugugggaaagagcaccacaaacauuaugaucaccacgaucauuaucgugauuaucguuauucugcuucugcucaucgccgucggccuguuccuguauugcaaggccagauccaccccggugacacuuagcaaagaucaacucucugggaucaauaacauugcuuucuccaauugaggacuagugaagggaacacccaaauuuaauucagccuuaagcacaauuaauuaagagugaaacguaauuguacaagcaguuggucacccaccauagggcaugaucaacaccgcaaccuuuccuuuuucccccagugauucugaaaaaccccucuucccuucagcuugcuuagauguuccaaauuuaguaagcuuaaggcggccuacagaagaaaaagaaaaaaaaggccacaaaaguucccucucacuuucaguaaauaaaauaaaagcagcaacagaaauaaagaaauaaaugaaauucaaaaugaaauaaauauuguguugugcagcauuaaaaaaucaauaaaaauuaaaaaugagcaagaucuaaaaaaaaaaaaaaaaaaaaaaaaaaaaaaaaaaaaaaaaaaaaaaaaaaaaaaaaaaaaaaaaugcaucccccccccccccccccccccccccccccccaaaggcucuuuucagagccaccagaauu

SEQ ID NO: 14989 - RNA, 2202 nt, Artificial Sequence
  mRNA product Design h-2 comprising derived and/or modified sequence from HRSV(Memphis-37)__AIY60640.1__F_DSCav1_mut2 (opt6)
gggagacccgugacccggaaguuguacggcuacgcgacuuucccucccacaaacccucgcgcccuuccuuuccuacuugggcccggcagaaagcuuaccauggagcuuccaauauuaaaaacaaacgcuauaacaacuauacucgcagcaguuacacucugcuucgcauccucacaaaacauaacugaagaauuuuaccaauccacuugcucagccguaucaaaaggauaucuaggagcacuuagaaccggaugguauacaucagugauaacaauagaacuaagcaacauaaaagaaaacaagugcaacggaacugacgcaaaagucaaacuaaucaaacaagaacuagacaaauacaaaaacgcaguaacagaccuacaauuacuaaugcaaucaacaccagcagcaggaucagguucagccauaugcucagguaucgcuguaugcaaaguccuucaccuagaaggugaaguaaacaaaauuaaaaacgcccuacucaguacaaauaaagcugucguaaguuuaucaaacggaguaucaguccuuacauucaaaguauuagaccuaaaaaauuauauagacaaacaauuacuaccaauacucaacaaacaaucaugcucaauaccaaauauagaaaccguaauagaauuucagcaaaaaaauaacagauuacuagaaauaaccagagaauuuucagucaacgcaggagucacaacacccgucucaaccuacaugcuaaccaacucagaacuucuaucucuuaucaacgacaugcccauaaccaaugaucaaaaaaaauuaaugucuaauaacguucaaauaguaagacaacaaucauacucaauaaugugcauaaucaaagaagaaguauuagcauacguaguacaacuaccccuauauggaguaauagacacacccugcuggaaacuacacacauccccccucuguacaacaaacacuaaagaaggaucaaacauuugccuaacaagaacagaccgcggaugguacugcgacaacgcaggcuccguaucuuucuuuccacaagccgaaacuuguaaaguucaaucaaacagaguauuuugcgauacaaugaacuccuuaacauuaccuucagaaguaaaccuaugcaacauagacaucuucaacccaaaauacgacugcaaaauaaugaccucaaaaacagacguauccucaucagucauaaccuccuuaggagcaauaguaucauguuacggaaaaacaaaauguacagcaucaaauaaaaauagaggaauaauaaaaaccuucuccaacggaugcgacuacguauccaauaaaggaguagacaccguaucaguaggaaacacacuauacuguguaaacaaacaagaaggccaaucucuauauguaaaaggcgaaccaaucauaaauuuuuacgacccacuugucuuccccuccgacgaauuugacgcaagcauaucacaaguaaacgaaaaaaucaaccaaagccuagccuucauaaggaaaucugacgaauuacuucauaacguaaauguuggaaaaucaaccacaaacauaaugauaaccaccaucauaauuguaauaauaguaauacuacuacuacuaauugcaguaggacucuuccuauauugcaaagcucgcucaacaccaguuaccuuaucaaaagaccaacuaucuggaauaaacaacauagccuuuuccaacuaaggacuagugaagggaacacccaaauuuaauucagccuuaagcacaauuaauuaagagugaaacguaauuguacaagcaguuggucacccaccauagggcaugaucaacaccgcaaccuuuccuuuuucccccagugauucugaaaaaccccucuucccuucagcuugcuuagauguuccaaauuuaguaagcuuaaggcggccuacagaagaaaaagaaaaaaaaggccacaaaaguucccucucacuuucaguaaauaaaauaaaagcagcaacagaaauaaagaaauaaaugaaauucaaaaugaaauaaauauuguguugugcagcauuaaaaaaucaauaaaaauuaaaaaugagcaagaucuaaaaaaaaaaaaaaaaaaaaaaaaaaaaaaaaaaaaaaaaaaaaaaaaaaaaaaaaaaaaaaaaugcaucccccccccccccccccccccccccccccccaaaggcucuuuucagagccaccagaauu

SEQ ID NO: 14990 - RNA, 2202 nt, Artificial Sequence
  mRNA product Design h-2 comprising derived and/or modified sequence from HRSV(Memphis-37)__AIY60640.1__F_DSCav1_mut2 (opt11)
gggagacccgugacccggaaguuguacggcuacgcgacuuucccucccacaaacccucgcgcccuuccuuuccuacuugggcccggcagaaagcuuaccauggaacucccaauccuaaaaaccaacgccaucaccaccauccucgccgcugucaccuuaugcuuugccagcagccaaaacaucaccgaagaauuuuaccaaucaacaugcuccgccgucucaaaaggauaccucggcgcccuacgcaccggcugguacacaagcgucauaaccaucgagcucuccaacaucaaggaaaacaaaugcaauggaaccgacgccaaagucaaacuaaucaaacaagaacuagacaaguacaagaacgcagucaccgaccuccaacuccucaugcaguccacccccgcagcaggcucuggcucagcaauaugcuccggcaucgcugucugcaaaguccuacaccucgaaggcgaagucaacaaaaucaaaaacgcccuacuguccacaaacaaagccgucgucucccuauccaacggcgucucgguccuaaccuuuaagguucucgaucucaaaaauuacauagacaaacaacuacuccccauccucaacaaacaaucuugcucaauccccaacaucgaaaccgucaucgaguuccaacagaaaaacaacagacuacucgaaaucacccgcgaguucucagucaacgcgggcgucacaacacccgucagcaccuacaugcuaaccaacuccgaacuccucagccucauuaacgacaugcccaucaccaacgaccaaaagaaacuuauguccaacaacguucaaaucguccgccaacaauccuacuccaucaugugcaucaucaaagaagaaguacucgccuacguaguccaacugccccucuacggcgucaucgauaccccaugcuggaaacuacacaccagcccccucugcaccaccaacaccaaagaaggcuccaauaucugcuuaacccgcacagaccguggcugguacugcgauaacgccggcuccgucuccuucuucccccaagcagaaaccugcaaaguacaauccaaccgagucuucugugacaccaugaacucccuaacccuuccaucagaagucaaccucugcaacaucgacaucuucaaccccaaguacgacugcaaaaucaugacauccaaaaccgaugucucaagcagcgucauaaccucacucggcgcuaucguaagcugcuacggcaaaaccaaaugcaccgcaucaaacaaaaaccgcggaaucaucaaaaccuucagcaacggaugcgacuacguuuccaacaaaggcguagacaccgucuccgucggaaacacccucuacugcguaaacaaacaggaaggccaaucccucuacgucaaaggcgaacccaucauaaacuucuacgauccccuugucuucccguccgaugaguucgacgccuccaucucgcaagucaacgaaaagauaaaccaaucacuagcauucauccguaaauccgacgaacuccuccacaacgucaacgucggaaaauccaccaccaacauaaugaucaccaccauaaucaucgucaucaucguaauacuauuacuccucauagccgucggccucuuccuauauugcaaagcccgaucaacccccguaacccuuucuaaagaccaacuguccggaaucaacaacaucgcuuucagcaacugaggacuagugaagggaacacccaaauuuaauucagccuuaagcacaauuaauuaagagugaaacguaauuguacaagcaguuggucacccaccauagggcaugaucaacaccgcaaccuuuccuuuuucccccagugauucugaaaaaccccucuucccuucagcuugcuuagauguuccaaauuuaguaagcuuaaggcggccuacagaagaaaaagaaaaaaaaggccacaaaaguucccucucacuuucaguaaauaaaauaaaagcagcaacagaaauaaagaaauaaaugaaauucaaaaugaaauaaauauuguguugugcagcauuaaaaaaucaauaaaaauuaaaaaugagcaagaucuaaaaaaaaaaaaaaaaaaaaaaaaaaaaaaaaaaaaaaaaaaaaaaaaaaaaaaaaaaaaaaaaugcaucccccccccccccccccccccccccccccccaaaggcucuuuucagagccaccagaauu

SEQ ID NO: 14991 - RNA, 1982 nt, Artificial Sequence
  mRNA product Design h-3 comprising derived and/or modified sequence from HRSV(Memphis-37)__AIY60640.1__F_DSCav1_mut2 (opt1)
gggagacccgugacccggaaguuguacggcuacgcgacuuucccucccacaaacccucgcgcccuuccuuuccuacuugggcccggcagaaagcuuaccauggagcugcccauccucaagaccaacgccaucaccacgauccuggccgcggugacccugugcuucgccagcucccagaacaucaccgaggaguucuaccagagcacgugcuccgccgucagcaagggcuaccucggcgcccugcgcaccgggugguacaccagcgugaucaccaucgagcuguccaacaucaaggagaacaagugcaacggcaccgacgccaaggugaagcucaucaagcaggagcuggacaaguacaagaacgcggucacggaccugcagcuccugaugcagagcaccccggccgccggcuccgggagcgcgaucugcuccggcaucgccgucugcaaggugcugcaccucgagggcgaggugaacaagaucaagaacgcccugcuguccaccaacaaggccgucgugagccucuccaacggggugagcguccugaccuucaaggugcuggaccucaagaacuacaucgacaagcagcugcugcccauccugaacaagcagagcugcuccauccccaacaucgagaccgucaucgaguuccagcagaagaacaaccgccuccuggagaucacgcgggaguucagcgugaacgcgggcgugaccacccccgucuccaccuacaugcugacgaacagcgagcuccugucccugaucaacgacaugccgaucaccaacgaccagaagaagcucaugagcaacaacgugcagaucgugcgccagcaguccuacagcaucaugugcaucaucaaggaggagguccuggccuacguggugcagcugccccucuacggggucaucgacacccccugcuggaagcugcacaccagcccccugugcacgaccaacaccaaggagggcuccaacaucugccucacccggacggaccgcgggugguacugcgacaacgccggcagcguguccuucuucccgcaggccgagaccugcaagguccagagcaaccggguguucugcgacaccaugaacucccugacccugcccagcgaggugaaccucugcaacaucgacaucuucaaccccaaguacgacugcaagaucaugacguccaagaccgacgucagcuccagcgugaucaccucccugggcgccaucgugagcugcuacgggaagaccaagugcacggcgagcaacaagaaccgcggcaucaucaagaccuucuccaacgggugcgacuacgucagcaacaagggcguggacaccguguccgucggcaacacccuguacugcgugaacaagcaggagggccagagccucuacgugaagggggagcccaucaucaacuucuacgacccgcuggucuuccccuccgacgaguucgacgccagcaucucccaggugaacgagaagaucaaccagagccuggccuucauccggaaguccgacgagcuccugcacaacgugaacgucggcaagagcaccacgaacaucaugaucaccaccaucaucaucgugaucaucgugauccugcugcuccugaucgccgucgggcuguuccucuacugcaaggcccgcuccacccccgugacgcugagcaaggaccagcuguccgggaucaacaacaucgcguucagcaacugaggacuaguggaagcauuuuccuggcugauuaaaagaaauuacucagcuauggucaucuguuccuguuagaaggcuaugcagcauauuauauacuaugcgcauguuaugaaaugcauaauaaaaaauuuuaaaaaaucuaaaagaucuaaaaaaaaaaaaaaaaaaaaaaaaaaaaaaaaaaaaaaaaaaaaaaaaaaaaaaaaaaaaaaaaugcaucccccccccccccccccccccccccccccccaaaggcucuuuucagagccaccagaauu

SEQ ID NO: 14992 - RNA, 1982 nt, Artificial Sequence
  mRNA product Design h-3 comprising derived and/or modified sequence from HRSV(Memphis-37)__AIY60640.1__F_DSCav1_mut2 (opt1)
gggagacccgugacccggaaguuguacggcuacgcgacuuucccucccacaaacccucgcgcccuuccuuuccuacuugggcccggcagaaagcuuaccauggagcugcccauccucaagaccaacgccaucaccacgauccuggccgcggugacccugugcuucgccagcucccagaacaucaccgaggaguucuaccagagcacgugcuccgccgucagcaagggcuaccucggggcccugcgcaccggcugguacaccuccgugaucaccaucgagcugagcaacaucaaggagaacaagugcaacgggaccgacgccaaggugaagcucaucaagcaggagcuggacaaguacaagaacgcggucacggaccugcagcuccugaugcaguccaccccggccgccggcagcggguccgccaucugcagcggcaucgcggugugcaaggugcugcaccucgagggcgaggucaacaagaucaagaacgcccugcuguccaccaacaaggccguggugagccucuccaacggggucagcgugcugaccuucaaggugcuggaccucaagaacuacaucgacaagcagcugcugcccauccucaacaagcaguccugcagcauccccaacaucgagacggucaucgaguuccagcagaagaacaaccggcugcuggagaucacccgcgaguucuccgugaacgccggcgugaccacccccgucagcacguacaugcucaccaacuccgagcugcugagccucaucaacgacaugccgaucaccaacgaccagaagaagcugaugagcaacaacgugcagaucgugcggcagcaguccuacagcaucaugugcaucaucaaggaggagguccuggccuacguggugcagcucccccuguacggggucaucgacacccccugcuggaagcugcacacgagcccccucugcaccaccaacaccaaggagggcuccaacaucugccugacgcgcaccgaccgggggugguacugcgacaacgcgggcuccgugagcuucuucccgcaggccgagaccugcaaggugcaguccaaccgcgucuucugcgacaccaugaacagccugacgcuccccuccgaggugaaccugugcaacaucgacaucuucaaccccaaguacgacugcaagaucaugaccagcaagaccgacgucuccagcuccgugaucaccagccugggcgccaucguguccugcuacgggaagacgaagugcaccgccagcaacaagaaccggggcaucaucaagaccuucuccaacgggugcgacuacgucagcaacaagggcguggacaccguguccgucggcaacacgcucuacugcgugaacaagcaggaggggcagagccuguacgugaagggcgagcccaucaucaacuucuacgacccgcuggucuuccccagcgacgaguucgacgccuccaucagccaggugaacgagaagaucaaccagucccucgcguucauccgcaagagcgacgagcugcugcacaacgugaacgucgggaaguccaccaccaacaucaugaucaccaccaucaucaucgugaucaucgugauccuccugcugcucaucgccgucggccuguuccuguacugcaaggcccggagcacgcccgugacccuguccaaggaccagcucagcgggaucaacaacaucgccuucuccaacugaggacuaguggaagcauuuuccuggcugauuaaaagaaauuacucagcuauggucaucuguuccuguuagaaggcuaugcagcauauuauauacuaugcgcauguuaugaaaugcauaauaaaaaauuuuaaaaaaucuaaaagaucuaaaaaaaaaaaaaaaaaaaaaaaaaaaaaaaaaaaaaaaaaaaaaaaaaaaaaaaaaaaaaaaaugcaucccccccccccccccccccccccccccccccaaaggcucuuuucagagccaccagaauu

SEQ ID NO: 14993 - RNA, 1982 nt, Artificial Sequence
  mRNA product Design h-3 comprising derived and/or modified sequence from HRSV(Memphis-37)__AIY60640.1__F_DSCav1_mut2 (opt2)
gggagacccgugacccggaaguuguacggcuacgcgacuuucccucccacaaacccucgcgcccuuccuuuccuacuugggcccggcagaaagcuuaccauggagcuccccauccucaagaccaacgccaucaccaccauccucgccgccgucacccucugcuucgccuccucccagaacaucaccgaggaguucuaccaguccaccugcuccgccgucuccaagggcuaccucggcgcccuccgcaccggcugguacaccuccgucaucaccaucgagcucuccaacaucaaggagaacaagugcaacggcaccgacgccaaggucaagcucaucaagcaggagcucgacaaguacaagaacgccgucaccgaccuccagcuccucaugcaguccacccccgccgccggcuccggcuccgccaucugcuccggcaucgccgucugcaagguccuccaccucgagggcgaggucaacaagaucaagaacgcccuccucuccaccaacaaggccgucgucucccucuccaacggcgucuccguccucaccuucaagguccucgaccucaagaacuacaucgacaagcagcuccuccccauccucaacaagcaguccugcuccauccccaacaucgagaccgucaucgaguuccagcagaagaacaaccgccuccucgagaucacccgcgaguucuccgucaacgccggcgucaccacccccgucuccaccuacaugcucaccaacuccgagcuccucucccucaucaacgacaugcccaucaccaacgaccagaagaagcucauguccaacaacguccagaucguccgccagcaguccuacuccaucaugugcaucaucaaggaggagguccucgccuacgucguccagcucccccucuacggcgucaucgacacccccugcuggaagcuccacaccuccccccucugcaccaccaacaccaaggagggcuccaacaucugccucacccgcaccgaccgcggcugguacugcgacaacgccggcuccgucuccuucuucccccaggccgagaccugcaagguccaguccaaccgcgucuucugcgacaccaugaacucccucacccuccccuccgaggucaaccucugcaacaucgacaucuucaaccccaaguacgacugcaagaucaugaccuccaagaccgacgucuccuccuccgucaucaccucccucggcgccaucgucuccugcuacggcaagaccaagugcaccgccuccaacaagaaccgcggcaucaucaagaccuucuccaacggcugcgacuacgucuccaacaagggcgucgacaccgucuccgucggcaacacccucuacugcgucaacaagcaggagggccagucccucuacgucaagggcgagcccaucaucaacuucuacgacccccucgucuuccccuccgacgaguucgacgccuccaucucccaggucaacgagaagaucaaccagucccucgccuucauccgcaaguccgacgagcuccuccacaacgucaacgucggcaaguccaccaccaacaucaugaucaccaccaucaucaucgucaucaucgucauccuccuccuccucaucgccgucggccucuuccucuacugcaaggcccgcuccacccccgucacccucuccaaggaccagcucuccggcaucaacaacaucgccuucuccaacugaggacuaguggaagcauuuuccuggcugauuaaaagaaauuacucagcuauggucaucuguuccuguuagaaggcuaugcagcauauuauauacuaugcgcauguuaugaaaugcauaauaaaaaauuuuaaaaaaucuaaaagaucuaaaaaaaaaaaaaaaaaaaaaaaaaaaaaaaaaaaaaaaaaaaaaaaaaaaaaaaaaaaaaaaaugcaucccccccccccccccccccccccccccccccaaaggcucuuuucagagccaccagaauu

SEQ ID NO: 14994 - RNA, 1982 nt, Artificial Sequence
  mRNA product Design h-3 comprising derived and/or modified sequence from HRSV(Memphis-37)__AIY60640.1__F_DSCav1_mut2 (opt3)
gggagacccgugacccggaaguuguacggcuacgcgacuuucccucccacaaacccucgcgcccuuccuuuccuacuugggcccggcagaaagcuuaccauggagcugcccauccucaagaccaacgccauuacaacuauacuugcugcagugacgcugugcuucgccagcucccagaauaucaccgaagaguuuuaccaaucuacauguucagcggucaguaaaggcuauuugggggcuuuaagaacuggaugguacaccagcguuauuacaaucgaacuguccaacauuaaggagaauaaaugcaacgguaccgacgccaaggugaaacuaaucaagcaggaacucgauaaguauaaaaaugcaguaacugaccugcagcuucugaugcagucuacuccugccgcuggcucggggucagcaauauguagcggaaucgccgugugcaaggucuugcaccucgagggcgaggugaacaaaauuaagaaugcucugcugaguaccaacaaagccguugugucccucucuaauggugucagcguguuaacguucaagguacuggaucuuaagaacuacaucgacaaacaauugcugccaauucuaaauaagcaguccuguucaaucccgaacauagaaacuguuauugaguuucagcagaaaaauaacaggcuccuggaaaucacccgggaguucagugugaaugcgggggucacaacucccgugagcaccuauaugcuuacaaacucugagcuguugucccucauuaacgauaugccuaucaccaaugaccaaaagaaacugaugucaaacaaugugcagaucguccgccagcagagcuacaguauuaugugcauaaucaaggaagagguuuuagcauaugugguacaacugccacucuacggagugauugauacgcccuguuggaaacuucauacuucuccucugugcacaaccaacacuaaggaaggcuccaauaucuguuugacacgaaccgaccguggcugguacugcgauaacgccgggagcgucucguuuuucccacaggcugagacguguaaggugcagucuaauagaguuuucugcgacaccaugaacucccuaacacugcccucagaagugaaucucugcaacauagauauuuucaauccuaaauaugacuguaagaucaugacaaguaaaaccgaugucagcuccucugugaucacaagccugggagccauuguaucaugcuacgguaagacuaaauguaccgcaaguaacaagaauaggggcaucauuaagacauuuuccaacgggugcgacuauguuagcaauaaaggaguggacaccgucucugugggcaacacucuuuacugugucaacaagcaagagggucagucacuguaugugaaaggggagccaauaaucaauuucuacgauccguugguuuuucccagugacgaauuugaugcuagcauuucccaggugaacgagaagaucaaucagucucucgccuuuauccggaaaucggacgaacuguuacacaacguaaaugucggaaagagcacgacaaacauuaugauaaccacuaucauuaucgugauuaucguuauacugcuacuccugaucgcggugggccuuuucuuguauugcaaggcccgcuccaccccugucacacugucaaaagaucaacucaguggcauuaauaacaucgcauucucuaauugaggacuaguggaagcauuuuccuggcugauuaaaagaaauuacucagcuauggucaucuguuccuguuagaaggcuaugcagcauauuauauacuaugcgcauguuaugaaaugcauaauaaaaaauuuuaaaaaaucuaaaagaucuaaaaaaaaaaaaaaaaaaaaaaaaaaaaaaaaaaaaaaaaaaaaaaaaaaaaaaaaaaaaaaaaugcaucccccccccccccccccccccccccccccccaaaggcucuuuucagagccaccagaauu

SEQ ID NO: 14995 - RNA, 1982 nt, Artificial Sequence
  mRNA product Design h-3 comprising derived and/or modified sequence from HRSV(Memphis-37)__AIY60640.1__F_DSCav1_mut2 (opt4)
gggagacccgugacccggaaguuguacggcuacgcgacuuucccucccacaaacccucgcgcccuuccuuuccuacuugggcccggcagaaagcuuaccauggagcugcccauccugaagaccaacgccaucaccaccauccuggccgccgugacccugugcuucgccagcagccagaacaucaccgaggaguucuaccagagcaccugcagcgccgugagcaagggcuaccugggcgcccugagaaccggcugguacaccagcgugaucaccaucgagcugagcaacaucaaggagaacaagugcaacggcaccgacgccaaggugaagcugaucaagcaggagcuggacaaguacaagaacgccgugaccgaccugcagcugcugaugcagagcacccccgccgccggcagcggcagcgccaucugcagcggcaucgccgugugcaaggugcugcaccuggagggcgaggugaacaagaucaagaacgcccugcugagcaccaacaaggccguggugagccugagcaacggcgugagcgugcugaccuucaaggugcuggaccugaagaacuacaucgacaagcagcugcugcccauccugaacaagcagagcugcagcauccccaacaucgagaccgugaucgaguuccagcagaagaacaacagacugcuggagaucaccagagaguucagcgugaacgccggcgugaccacccccgugagcaccuacaugcugaccaacagcgagcugcugagccugaucaacgacaugcccaucaccaacgaccagaagaagcugaugagcaacaacgugcagaucgugagacagcagagcuacagcaucaugugcaucaucaaggaggaggugcuggccuacguggugcagcugccccuguacggcgugaucgacacccccugcuggaagcugcacaccagcccccugugcaccaccaacaccaaggagggcagcaacaucugccugaccagaaccgacagaggcugguacugcgacaacgccggcagcgugagcuucuucccccaggccgagaccugcaaggugcagagcaacagaguguucugcgacaccaugaacagccugacccugcccagcgaggugaaccugugcaacaucgacaucuucaaccccaaguacgacugcaagaucaugaccagcaagaccgacgugagcagcagcgugaucaccagccugggcgccaucgugagcugcuacggcaagaccaagugcaccgccagcaacaagaacagaggcaucaucaagaccuucagcaacggcugcgacuacgugagcaacaagggcguggacaccgugagcgugggcaacacccuguacugcgugaacaagcaggagggccagagccuguacgugaagggcgagcccaucaucaacuucuacgacccccugguguuccccagcgacgaguucgacgccagcaucagccaggugaacgagaagaucaaccagagccuggccuucaucagaaagagcgacgagcugcugcacaacgugaacgugggcaagagcaccaccaacaucaugaucaccaccaucaucaucgugaucaucgugauccugcugcugcugaucgccgugggccuguuccuguacugcaaggccagaagcacccccgugacccugagcaaggaccagcugagcggcaucaacaacaucgccuucagcaacugaggacuaguggaagcauuuuccuggcugauuaaaagaaauuacucagcuauggucaucuguuccuguuagaaggcuaugcagcauauuauauacuaugcgcauguuaugaaaugcauaauaaaaaauuuuaaaaaaucuaaaagaucuaaaaaaaaaaaaaaaaaaaaaaaaaaaaaaaaaaaaaaaaaaaaaaaaaaaaaaaaaaaaaaaaugcaucccccccccccccccccccccccccccccccaaaggcucuuuucagagccaccagaauu

SEQ ID NO: 14996 - RNA, 1982 nt, Artificial Sequence
  mRNA product Design h-3 comprising derived and/or modified sequence from HRSV(Memphis-37)__AIY60640.1__F_DSCav1_mut2 (opt5)
gggagacccgugacccggaaguuguacggcuacgcgacuuucccucccacaaacccucgcgcccuuccuuuccuacuugggcccggcagaaagcuuaccauggagcugcccauccucaagaccaacgccauuacaacgauccuggcugccgugacccuuugcuucgcgagcucccagaauauuacagaagaguuuuaccaaucuaccuguagcgcugucuccaaaggcuaucugggggcccucagaacaggaugguacaccucuguuaucacaauugaacugagcaacaucaaggagaauaaaugcaacggcaccgacgccaaggugaaacuuaucaagcaggaacuggauaaguauaaaaaugcugugacggaccuccagcugcugaugcaguccaccccugccgcugggucuggaagcgccauuuguuccggcaucgcggucugcaaggugcuccaccuggagggggagguuaacaaaauuaagaaugcccuucugagcacaaacaaagcuguggucucucucuccaauggagugagcguucugaccuucaaggugcuugaucugaagaacuacaucgacaaacaacuccugccgauucugaauaagcagucuuguuccauccccaacauugaaacagucaucgaguuucagcagaaaaauaaccggcuccuggaaaucacccgcgaguucagcgugaaugccggcgugacgacaccugucucuaccuauaugcuuacaaacuccgagcugcucagccugauuaacgauaugcccaucaccaaugaccaaaagaaacuuauguccaacaauguucagauugugagacagcagucuuacagcaucaugugcauuaucaaggaagaggugcuggcuuaugucgugcaacucccucuguacggcguuaucgauacccccuguuggaaacugcauacauccccucucugcacgaccaacacaaaggaagggagcaauauuugucugacccggacagaccgcggaugguacugcgauaacgccggcucuguguccuuuuucccgcaggcggagaccuguaagguccagagcaauagaguguuuugcgacacgaugaacucucuuacacugcccagcgaaguuaaucucugcaacaucgauauuuucaauccuaaauaugacuguaagaucaugaccuccaaaaccgaugugucuagcuccgucauuacaagccugggggccaucgugucuugcuacggaaagaccaaauguacagcuuccaacaagaaucggggcaucauuaagacguuuagcaacgggugcgacuaugucucuaauaaaggaguggacaccguuuccgugggcaacacacuuuacugugucaacaagcaagagggccagagccuguaugugaaaggggagcccaucauuaauuucuacgauccucucguuuuucccuccgacgaguucgaugccucuaucagccaggugaacgaaaagauuaaucagucccuggcuuuuauccgcaaaucugacgaacugcuccacaacgucaaugugggaaagagcaccacaaacauuaugaucaccacgaucauuaucgugauuaucguuauucugcuucugcucaucgccgucggccuguuccuguauugcaaggccagauccaccccggugacacuuagcaaagaucaacucucugggaucaauaacauugcuuucuccaauugaggacuaguggaagcauuuuccuggcugauuaaaagaaauuacucagcuauggucaucuguuccuguuagaaggcuaugcagcauauuauauacuaugcgcauguuaugaaaugcauaauaaaaaauuuuaaaaaaucuaaaagaucuaaaaaaaaaaaaaaaaaaaaaaaaaaaaaaaaaaaaaaaaaaaaaaaaaaaaaaaaaaaaaaaaugcaucccccccccccccccccccccccccccccccaaaggcucuuuucagagccaccagaauu

SEQ ID NO: 14997 - RNA, 1982 nt, Artificial Sequence
  mRNA product Design h-3 comprising derived and/or modified sequence from HRSV(Memphis-37)__AIY60640.1__F_DSCav1_mut2 (opt6)
gggagacccgugacccggaaguuguacggcuacgcgacuuucccucccacaaacccucgcgcccuuccuuuccuacuugggcccggcagaaagcuuaccauggagcuuccaauauuaaaaacaaacgcuauaacaacuauacucgcagcaguuacacucugcuucgcauccucacaaaacauaacugaagaauuuuaccaauccacuugcucagccguaucaaaaggauaucuaggagcacuuagaaccggaugguauacaucagugauaacaauagaacuaagcaacauaaaagaaaacaagugcaacggaacugacgcaaaagucaaacuaaucaaacaagaacuagacaaauacaaaaacgcaguaacagaccuacaauuacuaaugcaaucaacaccagcagcaggaucagguucagccauaugcucagguaucgcuguaugcaaaguccuucaccuagaaggugaaguaaacaaaauuaaaaacgcccuacucaguacaaauaaagcugucguaaguuuaucaaacggaguaucaguccuuacauucaaaguauuagaccuaaaaaauuauauagacaaacaauuacuaccaauacucaacaaacaaucaugcucaauaccaaauauagaaaccguaauagaauuucagcaaaaaaauaacagauuacuagaaauaaccagagaauuuucagucaacgcaggagucacaacacccgucucaaccuacaugcuaaccaacucagaacuucuaucucuuaucaacgacaugcccauaaccaaugaucaaaaaaaauuaaugucuaauaacguucaaauaguaagacaacaaucauacucaauaaugugcauaaucaaagaagaaguauuagcauacguaguacaacuaccccuauauggaguaauagacacacccugcuggaaacuacacacauccccccucuguacaacaaacacuaaagaaggaucaaacauuugccuaacaagaacagaccgcggaugguacugcgacaacgcaggcuccguaucuuucuuuccacaagccgaaacuuguaaaguucaaucaaacagaguauuuugcgauacaaugaacuccuuaacauuaccuucagaaguaaaccuaugcaacauagacaucuucaacccaaaauacgacugcaaaauaaugaccucaaaaacagacguauccucaucagucauaaccuccuuaggagcaauaguaucauguuacggaaaaacaaaauguacagcaucaaauaaaaauagaggaauaauaaaaaccuucuccaacggaugcgacuacguauccaauaaaggaguagacaccguaucaguaggaaacacacuauacuguguaaacaaacaagaaggccaaucucuauauguaaaaggcgaaccaaucauaaauuuuuacgacccacuugucuuccccuccgacgaauuugacgcaagcauaucacaaguaaacgaaaaaaucaaccaaagccuagccuucauaaggaaaucugacgaauuacuucauaacguaaauguuggaaaaucaaccacaaacauaaugauaaccaccaucauaauuguaauaauaguaauacuacuacuacuaauugcaguaggacucuuccuauauugcaaagcucgcucaacaccaguuaccuuaucaaaagaccaacuaucuggaauaaacaacauagccuuuuccaacuaaggacuaguggaagcauuuuccuggcugauuaaaagaaauuacucagcuauggucaucuguuccuguuagaaggcuaugcagcauauuauauacuaugcgcauguuaugaaaugcauaauaaaaaauuuuaaaaaaucuaaaagaucuaaaaaaaaaaaaaaaaaaaaaaaaaaaaaaaaaaaaaaaaaaaaaaaaaaaaaaaaaaaaaaaaugcaucccccccccccccccccccccccccccccccaaaggcucuuuucagagccaccagaauu

SEQ ID NO: 14998 - RNA, 1982 nt, Artificial Sequence
  mRNA product Design h-3 comprising derived and/or modified sequence from HRSV(Memphis-37)__AIY60640.1__F_DSCav1_mut2 (opt11)
gggagacccgugacccggaaguuguacggcuacgcgacuuucccucccacaaacccucgcgcccuuccuuuccuacuugggcccggcagaaagcuuaccauggaacucccaauccuaaaaaccaacgccaucaccaccauccucgccgcugucaccuuaugcuuugccagcagccaaaacaucaccgaagaauuuuaccaaucaacaugcuccgccgucucaaaaggauaccucggcgcccuacgcaccggcugguacacaagcgucauaaccaucgagcucuccaacaucaaggaaaacaaaugcaauggaaccgacgccaaagucaaacuaaucaaacaagaacuagacaaguacaagaacgcagucaccgaccuccaacuccucaugcaguccacccccgcagcaggcucuggcucagcaauaugcuccggcaucgcugucugcaaaguccuacaccucgaaggcgaagucaacaaaaucaaaaacgcccuacuguccacaaacaaagccgucgucucccuauccaacggcgucucgguccuaaccuuuaagguucucgaucucaaaaauuacauagacaaacaacuacuccccauccucaacaaacaaucuugcucaauccccaacaucgaaaccgucaucgaguuccaacagaaaaacaacagacuacucgaaaucacccgcgaguucucagucaacgcgggcgucacaacacccgucagcaccuacaugcuaaccaacuccgaacuccucagccucauuaacgacaugcccaucaccaacgaccaaaagaaacuuauguccaacaacguucaaaucguccgccaacaauccuacuccaucaugugcaucaucaaagaagaaguacucgccuacguaguccaacugccccucuacggcgucaucgauaccccaugcuggaaacuacacaccagcccccucugcaccaccaacaccaaagaaggcuccaauaucugcuuaacccgcacagaccguggcugguacugcgauaacgccggcuccgucuccuucuucccccaagcagaaaccugcaaaguacaauccaaccgagucuucugugacaccaugaacucccuaacccuuccaucagaagucaaccucugcaacaucgacaucuucaaccccaaguacgacugcaaaaucaugacauccaaaaccgaugucucaagcagcgucauaaccucacucggcgcuaucguaagcugcuacggcaaaaccaaaugcaccgcaucaaacaaaaaccgcggaaucaucaaaaccuucagcaacggaugcgacuacguuuccaacaaaggcguagacaccgucuccgucggaaacacccucuacugcguaaacaaacaggaaggccaaucccucuacgucaaaggcgaacccaucauaaacuucuacgauccccuugucuucccguccgaugaguucgacgccuccaucucgcaagucaacgaaaagauaaaccaaucacuagcauucauccguaaauccgacgaacuccuccacaacgucaacgucggaaaauccaccaccaacauaaugaucaccaccauaaucaucgucaucaucguaauacuauuacuccucauagccgucggccucuuccuauauugcaaagcccgaucaacccccguaacccuuucuaaagaccaacuguccggaaucaacaacaucgcuuucagcaacugaggacuaguggaagcauuuuccuggcugauuaaaagaaauuacucagcuauggucaucuguuccuguuagaaggcuaugcagcauauuauauacuaugcgcauguuaugaaaugcauaauaaaaaauuuuaaaaaaucuaaaagaucuaaaaaaaaaaaaaaaaaaaaaaaaaaaaaaaaaaaaaaaaaaaaaaaaaaaaaaaaaaaaaaaaugcaucccccccccccccccccccccccccccccccaaaggcucuuuucagagccaccagaauu

SEQ ID NO: 14999 - RNA, 2045 nt, Artificial Sequence
  mRNA product Design h-4 comprising derived and/or modified sequence from HRSV(Memphis-37)__AIY60640.1__F_DSCav1_mut2 (opt1)
gggagagggcgcuuggcuugcaaggacccugagcugcggcauugaagcacacccaacccaacucgacugaagucagccucacugaaccggaucugagaaucuucucucucugggcuugccagggcucuccgaaccuagcuagcauccucuucaauuccaacuagaaagcuuaccauggagcugcccauccucaagaccaacgccaucaccacgauccuggccgcggugacccugugcuucgccagcucccagaacaucaccgaggaguucuaccagagcacgugcuccgccgucagcaagggcuaccucggcgcccugcgcaccgggugguacaccagcgugaucaccaucgagcuguccaacaucaaggagaacaagugcaacggcaccgacgccaaggugaagcucaucaagcaggagcuggacaaguacaagaacgcggucacggaccugcagcuccugaugcagagcaccccggccgccggcuccgggagcgcgaucugcuccggcaucgccgucugcaaggugcugcaccucgagggcgaggugaacaagaucaagaacgcccugcuguccaccaacaaggccgucgugagccucuccaacggggugagcguccugaccuucaaggugcuggaccucaagaacuacaucgacaagcagcugcugcccauccugaacaagcagagcugcuccauccccaacaucgagaccgucaucgaguuccagcagaagaacaaccgccuccuggagaucacgcgggaguucagcgugaacgcgggcgugaccacccccgucuccaccuacaugcugacgaacagcgagcuccugucccugaucaacgacaugccgaucaccaacgaccagaagaagcucaugagcaacaacgugcagaucgugcgccagcaguccuacagcaucaugugcaucaucaaggaggagguccuggccuacguggugcagcugccccucuacggggucaucgacacccccugcuggaagcugcacaccagcccccugugcacgaccaacaccaaggagggcuccaacaucugccucacccggacggaccgcgggugguacugcgacaacgccggcagcguguccuucuucccgcaggccgagaccugcaagguccagagcaaccggguguucugcgacaccaugaacucccugacccugcccagcgaggugaaccucugcaacaucgacaucuucaaccccaaguacgacugcaagaucaugacguccaagaccgacgucagcuccagcgugaucaccucccugggcgccaucgugagcugcuacgggaagaccaagugcacggcgagcaacaagaaccgcggcaucaucaagaccuucuccaacgggugcgacuacgucagcaacaagggcguggacaccguguccgucggcaacacccuguacugcgugaacaagcaggagggccagagccucuacgugaagggggagcccaucaucaacuucuacgacccgcuggucuuccccuccgacgaguucgacgccagcaucucccaggugaacgagaagaucaaccagagccuggccuucauccggaaguccgacgagcuccugcacaacgugaacgucggcaagagcaccacgaacaucaugaucaccaccaucaucaucgugaucaucgugauccugcugcuccugaucgccgucgggcuguuccucuacugcaaggcccgcuccacccccgugacgcugagcaaggaccagcuguccgggaucaacaacaucgcguucagcaacugaggacuaguaauaaggaaacuguaugaaugucugugggcaggaagugaagagauccuucuguaaagguuuuuggaauuaugucugcugaauaauaaacuuuuuugaaauaauaaaucugguagaaaaaugagaucuaaaaaaaaaaaaaaaaaaaaaaaaaaaaaaaaaaaaaaaaaaaaaaaaaaaaaaaaaaaaaaaaugcaucccccccccccccccccccccccccccccccaaaggcucuuuucagagccaccagaauu

SEQ ID NO: 15000 - RNA, 2045 nt, Artificial Sequence
  mRNA product Design h-4 comprising derived and/or modified sequence from HRSV(Memphis-37)__AIY60640.1__F_DSCav1_mut2 (opt1)
gggagagggcgcuuggcuugcaaggacccugagcugcggcauugaagcacacccaacccaacucgacugaagucagccucacugaaccggaucugagaaucuucucucucugggcuugccagggcucuccgaaccuagcuagcauccucuucaauuccaacuagaaagcuuaccauggagcugcccauccucaagaccaacgccaucaccacgauccuggccgcggugacccugugcuucgccagcucccagaacaucaccgaggaguucuaccagagcacgugcuccgccgucagcaagggcuaccucggggcccugcgcaccggcugguacaccuccgugaucaccaucgagcugagcaacaucaaggagaacaagugcaacgggaccgacgccaaggugaagcucaucaagcaggagcuggacaaguacaagaacgcggucacggaccugcagcuccugaugcaguccaccccggccgccggcagcggguccgccaucugcagcggcaucgcggugugcaaggugcugcaccucgagggcgaggucaacaagaucaagaacgcccugcuguccaccaacaaggccguggugagccucuccaacggggucagcgugcugaccuucaaggugcuggaccucaagaacuacaucgacaagcagcugcugcccauccucaacaagcaguccugcagcauccccaacaucgagacggucaucgaguuccagcagaagaacaaccggcugcuggagaucacccgcgaguucuccgugaacgccggcgugaccacccccgucagcacguacaugcucaccaacuccgagcugcugagccucaucaacgacaugccgaucaccaacgaccagaagaagcugaugagcaacaacgugcagaucgugcggcagcaguccuacagcaucaugugcaucaucaaggaggagguccuggccuacguggugcagcucccccuguacggggucaucgacacccccugcuggaagcugcacacgagcccccucugcaccaccaacaccaaggagggcuccaacaucugccugacgcgcaccgaccgggggugguacugcgacaacgcgggcuccgugagcuucuucccgcaggccgagaccugcaaggugcaguccaaccgcgucuucugcgacaccaugaacagccugacgcuccccuccgaggugaaccugugcaacaucgacaucuucaaccccaaguacgacugcaagaucaugaccagcaagaccgacgucuccagcuccgugaucaccagccugggcgccaucguguccugcuacgggaagacgaagugcaccgccagcaacaagaaccggggcaucaucaagaccuucuccaacgggugcgacuacgucagcaacaagggcguggacaccguguccgucggcaacacgcucuacugcgugaacaagcaggaggggcagagccuguacgugaagggcgagcccaucaucaacuucuacgacccgcuggucuuccccagcgacgaguucgacgccuccaucagccaggugaacgagaagaucaaccagucccucgcguucauccgcaagagcgacgagcugcugcacaacgugaacgucgggaaguccaccaccaacaucaugaucaccaccaucaucaucgugaucaucgugauccuccugcugcucaucgccgucggccuguuccuguacugcaaggcccggagcacgcccgugacccuguccaaggaccagcucagcgggaucaacaacaucgccuucuccaacugaggacuaguaauaaggaaacuguaugaaugucugugggcaggaagugaagagauccuucuguaaagguuuuuggaauuaugucugcugaauaauaaacuuuuuugaaauaauaaaucugguagaaaaaugagaucuaaaaaaaaaaaaaaaaaaaaaaaaaaaaaaaaaaaaaaaaaaaaaaaaaaaaaaaaaaaaaaaaugcaucccccccccccccccccccccccccccccccaaaggcucuuuucagagccaccagaauu

SEQ ID NO: 15001 - RNA, 2045 nt, Artificial Sequence
  mRNA product Design h-4 comprising derived and/or modified sequence from HRSV(Memphis-37)__AIY60640.1__F_DSCav1_mut2 (opt2)
gggagagggcgcuuggcuugcaaggacccugagcugcggcauugaagcacacccaacccaacucgacugaagucagccucacugaaccggaucugagaaucuucucucucugggcuugccagggcucuccgaaccuagcuagcauccucuucaauuccaacuagaaagcuuaccauggagcuccccauccucaagaccaacgccaucaccaccauccucgccgccgucacccucugcuucgccuccucccagaacaucaccgaggaguucuaccaguccaccugcuccgccgucuccaagggcuaccucggcgcccuccgcaccggcugguacaccuccgucaucaccaucgagcucuccaacaucaaggagaacaagugcaacggcaccgacgccaaggucaagcucaucaagcaggagcucgacaaguacaagaacgccgucaccgaccuccagcuccucaugcaguccacccccgccgccggcuccggcuccgccaucugcuccggcaucgccgucugcaagguccuccaccucgagggcgaggucaacaagaucaagaacgcccuccucuccaccaacaaggccgucgucucccucuccaacggcgucuccguccucaccuucaagguccucgaccucaagaacuacaucgacaagcagcuccuccccauccucaacaagcaguccugcuccauccccaacaucgagaccgucaucgaguuccagcagaagaacaaccgccuccucgagaucacccgcgaguucuccgucaacgccggcgucaccacccccgucuccaccuacaugcucaccaacuccgagcuccucucccucaucaacgacaugcccaucaccaacgaccagaagaagcucauguccaacaacguccagaucguccgccagcaguccuacuccaucaugugcaucaucaaggaggagguccucgccuacgucguccagcucccccucuacggcgucaucgacacccccugcuggaagcuccacaccuccccccucugcaccaccaacaccaaggagggcuccaacaucugccucacccgcaccgaccgcggcugguacugcgacaacgccggcuccgucuccuucuucccccaggccgagaccugcaagguccaguccaaccgcgucuucugcgacaccaugaacucccucacccuccccuccgaggucaaccucugcaacaucgacaucuucaaccccaaguacgacugcaagaucaugaccuccaagaccgacgucuccuccuccgucaucaccucccucggcgccaucgucuccugcuacggcaagaccaagugcaccgccuccaacaagaaccgcggcaucaucaagaccuucuccaacggcugcgacuacgucuccaacaagggcgucgacaccgucuccgucggcaacacccucuacugcgucaacaagcaggagggccagucccucuacgucaagggcgagcccaucaucaacuucuacgacccccucgucuuccccuccgacgaguucgacgccuccaucucccaggucaacgagaagaucaaccagucccucgccuucauccgcaaguccgacgagcuccuccacaacgucaacgucggcaaguccaccaccaacaucaugaucaccaccaucaucaucgucaucaucgucauccuccuccuccucaucgccgucggccucuuccucuacugcaaggcccgcuccacccccgucacccucuccaaggaccagcucuccggcaucaacaacaucgccuucuccaacugaggacuaguaauaaggaaacuguaugaaugucugugggcaggaagugaagagauccuucuguaaagguuuuuggaauuaugucugcugaauaauaaacuuuuuugaaauaauaaaucugguagaaaaaugagaucuaaaaaaaaaaaaaaaaaaaaaaaaaaaaaaaaaaaaaaaaaaaaaaaaaaaaaaaaaaaaaaaaugcaucccccccccccccccccccccccccccccccaaaggcucuuuucagagccaccagaauu

SEQ ID NO: 15002 - RNA, 2045 nt, Artificial Sequence
  mRNA product Design h-4 comprising derived and/or modified sequence from HRSV(Memphis-37)__AIY60640.1__F_DSCav1_mut2 (opt3)
gggagagggcgcuuggcuugcaaggacccugagcugcggcauugaagcacacccaacccaacucgacugaagucagccucacugaaccggaucugagaaucuucucucucugggcuugccagggcucuccgaaccuagcuagcauccucuucaauuccaacuagaaagcuuaccauggagcugcccauccucaagaccaacgccauuacaacuauacuugcugcagugacgcugugcuucgccagcucccagaauaucaccgaagaguuuuaccaaucuacauguucagcggucaguaaaggcuauuugggggcuuuaagaacuggaugguacaccagcguuauuacaaucgaacuguccaacauuaaggagaauaaaugcaacgguaccgacgccaaggugaaacuaaucaagcaggaacucgauaaguauaaaaaugcaguaacugaccugcagcuucugaugcagucuacuccugccgcuggcucggggucagcaauauguagcggaaucgccgugugcaaggucuugcaccucgagggcgaggugaacaaaauuaagaaugcucugcugaguaccaacaaagccguugugucccucucuaauggugucagcguguuaacguucaagguacuggaucuuaagaacuacaucgacaaacaauugcugccaauucuaaauaagcaguccuguucaaucccgaacauagaaacuguuauugaguuucagcagaaaaauaacaggcuccuggaaaucacccgggaguucagugugaaugcgggggucacaacucccgugagcaccuauaugcuuacaaacucugagcuguugucccucauuaacgauaugccuaucaccaaugaccaaaagaaacugaugucaaacaaugugcagaucguccgccagcagagcuacaguauuaugugcauaaucaaggaagagguuuuagcauaugugguacaacugccacucuacggagugauugauacgcccuguuggaaacuucauacuucuccucugugcacaaccaacacuaaggaaggcuccaauaucuguuugacacgaaccgaccguggcugguacugcgauaacgccgggagcgucucguuuuucccacaggcugagacguguaaggugcagucuaauagaguuuucugcgacaccaugaacucccuaacacugcccucagaagugaaucucugcaacauagauauuuucaauccuaaauaugacuguaagaucaugacaaguaaaaccgaugucagcuccucugugaucacaagccugggagccauuguaucaugcuacgguaagacuaaauguaccgcaaguaacaagaauaggggcaucauuaagacauuuuccaacgggugcgacuauguuagcaauaaaggaguggacaccgucucugugggcaacacucuuuacugugucaacaagcaagagggucagucacuguaugugaaaggggagccaauaaucaauuucuacgauccguugguuuuucccagugacgaauuugaugcuagcauuucccaggugaacgagaagaucaaucagucucucgccuuuauccggaaaucggacgaacuguuacacaacguaaaugucggaaagagcacgacaaacauuaugauaaccacuaucauuaucgugauuaucguuauacugcuacuccugaucgcggugggccuuuucuuguauugcaaggcccgcuccaccccugucacacugucaaaagaucaacucaguggcauuaauaacaucgcauucucuaauugaggacuaguaauaaggaaacuguaugaaugucugugggcaggaagugaagagauccuucuguaaagguuuuuggaauuaugucugcugaauaauaaacuuuuuugaaauaauaaaucugguagaaaaaugagaucuaaaaaaaaaaaaaaaaaaaaaaaaaaaaaaaaaaaaaaaaaaaaaaaaaaaaaaaaaaaaaaaaugcaucccccccccccccccccccccccccccccccaaaggcucuuuucagagccaccagaauu

SEQ ID NO: 15003 - RNA, 2045 nt, Artificial Sequence
  mRNA product Design h-4 comprising derived and/or modified sequence from HRSV(Memphis-37)__AIY60640.1__F_DSCav1_mut2 (opt4)
gggagagggcgcuuggcuugcaaggacccugagcugcggcauugaagcacacccaacccaacucgacugaagucagccucacugaaccggaucugagaaucuucucucucugggcuugccagggcucuccgaaccuagcuagcauccucuucaauuccaacuagaaagcuuaccauggagcugcccauccugaagaccaacgccaucaccaccauccuggccgccgugacccugugcuucgccagcagccagaacaucaccgaggaguucuaccagagcaccugcagcgccgugagcaagggcuaccugggcgcccugagaaccggcugguacaccagcgugaucaccaucgagcugagcaacaucaaggagaacaagugcaacggcaccgacgccaaggugaagcugaucaagcaggagcuggacaaguacaagaacgccgugaccgaccugcagcugcugaugcagagcacccccgccgccggcagcggcagcgccaucugcagcggcaucgccgugugcaaggugcugcaccuggagggcgaggugaacaagaucaagaacgcccugcugagcaccaacaaggccguggugagccugagcaacggcgugagcgugcugaccuucaaggugcuggaccugaagaacuacaucgacaagcagcugcugcccauccugaacaagcagagcugcagcauccccaacaucgagaccgugaucgaguuccagcagaagaacaacagacugcuggagaucaccagagaguucagcgugaacgccggcgugaccacccccgugagcaccuacaugcugaccaacagcgagcugcugagccugaucaacgacaugcccaucaccaacgaccagaagaagcugaugagcaacaacgugcagaucgugagacagcagagcuacagcaucaugugcaucaucaaggaggaggugcuggccuacguggugcagcugccccuguacggcgugaucgacacccccugcuggaagcugcacaccagcccccugugcaccaccaacaccaaggagggcagcaacaucugccugaccagaaccgacagaggcugguacugcgacaacgccggcagcgugagcuucuucccccaggccgagaccugcaaggugcagagcaacagaguguucugcgacaccaugaacagccugacccugcccagcgaggugaaccugugcaacaucgacaucuucaaccccaaguacgacugcaagaucaugaccagcaagaccgacgugagcagcagcgugaucaccagccugggcgccaucgugagcugcuacggcaagaccaagugcaccgccagcaacaagaacagaggcaucaucaagaccuucagcaacggcugcgacuacgugagcaacaagggcguggacaccgugagcgugggcaacacccuguacugcgugaacaagcaggagggccagagccuguacgugaagggcgagcccaucaucaacuucuacgacccccugguguuccccagcgacgaguucgacgccagcaucagccaggugaacgagaagaucaaccagagccuggccuucaucagaaagagcgacgagcugcugcacaacgugaacgugggcaagagcaccaccaacaucaugaucaccaccaucaucaucgugaucaucgugauccugcugcugcugaucgccgugggccuguuccuguacugcaaggccagaagcacccccgugacccugagcaaggaccagcugagcggcaucaacaacaucgccuucagcaacugaggacuaguaauaaggaaacuguaugaaugucugugggcaggaagugaagagauccuucuguaaagguuuuuggaauuaugucugcugaauaauaaacuuuuuugaaauaauaaaucugguagaaaaaugagaucuaaaaaaaaaaaaaaaaaaaaaaaaaaaaaaaaaaaaaaaaaaaaaaaaaaaaaaaaaaaaaaaaugcaucccccccccccccccccccccccccccccccaaaggcucuuuucagagccaccagaauu

SEQ ID NO: 15004 - RNA, 2045 nt, Artificial Sequence
  mRNA product Design h-4 comprising derived and/or modified sequence from HRSV(Memphis-37)__AIY60640.1__F_DSCav1_mut2 (opt5)
gggagagggcgcuuggcuugcaaggacccugagcugcggcauugaagcacacccaacccaacucgacugaagucagccucacugaaccggaucugagaaucuucucucucugggcuugccagggcucuccgaaccuagcuagcauccucuucaauuccaacuagaaagcuuaccauggagcugcccauccucaagaccaacgccauuacaacgauccuggcugccgugacccuuugcuucgcgagcucccagaauauuacagaagaguuuuaccaaucuaccuguagcgcugucuccaaaggcuaucugggggcccucagaacaggaugguacaccucuguuaucacaauugaacugagcaacaucaaggagaauaaaugcaacggcaccgacgccaaggugaaacuuaucaagcaggaacuggauaaguauaaaaaugcugugacggaccuccagcugcugaugcaguccaccccugccgcugggucuggaagcgccauuuguuccggcaucgcggucugcaaggugcuccaccuggagggggagguuaacaaaauuaagaaugcccuucugagcacaaacaaagcuguggucucucucuccaauggagugagcguucugaccuucaaggugcuugaucugaagaacuacaucgacaaacaacuccugccgauucugaauaagcagucuuguuccauccccaacauugaaacagucaucgaguuucagcagaaaaauaaccggcuccuggaaaucacccgcgaguucagcgugaaugccggcgugacgacaccugucucuaccuauaugcuuacaaacuccgagcugcucagccugauuaacgauaugcccaucaccaaugaccaaaagaaacuuauguccaacaauguucagauugugagacagcagucuuacagcaucaugugcauuaucaaggaagaggugcuggcuuaugucgugcaacucccucuguacggcguuaucgauacccccuguuggaaacugcauacauccccucucugcacgaccaacacaaaggaagggagcaauauuugucugacccggacagaccgcggaugguacugcgauaacgccggcucuguguccuuuuucccgcaggcggagaccuguaagguccagagcaauagaguguuuugcgacacgaugaacucucuuacacugcccagcgaaguuaaucucugcaacaucgauauuuucaauccuaaauaugacuguaagaucaugaccuccaaaaccgaugugucuagcuccgucauuacaagccugggggccaucgugucuugcuacggaaagaccaaauguacagcuuccaacaagaaucggggcaucauuaagacguuuagcaacgggugcgacuaugucucuaauaaaggaguggacaccguuuccgugggcaacacacuuuacugugucaacaagcaagagggccagagccuguaugugaaaggggagcccaucauuaauuucuacgauccucucguuuuucccuccgacgaguucgaugccucuaucagccaggugaacgaaaagauuaaucagucccuggcuuuuauccgcaaaucugacgaacugcuccacaacgucaaugugggaaagagcaccacaaacauuaugaucaccacgaucauuaucgugauuaucguuauucugcuucugcucaucgccgucggccuguuccuguauugcaaggccagauccaccccggugacacuuagcaaagaucaacucucugggaucaauaacauugcuuucuccaauugaggacuaguaauaaggaaacuguaugaaugucugugggcaggaagugaagagauccuucuguaaagguuuuuggaauuaugucugcugaauaauaaacuuuuuugaaauaauaaaucugguagaaaaaugagaucuaaaaaaaaaaaaaaaaaaaaaaaaaaaaaaaaaaaaaaaaaaaaaaaaaaaaaaaaaaaaaaaaugcaucccccccccccccccccccccccccccccccaaaggcucuuuucagagccaccagaauu

SEQ ID NO: 15005 - RNA, 2045 nt, Artificial Sequence
  mRNA product Design h-4 comprising derived and/or modified sequence from HRSV(Memphis-37)__AIY60640.1__F_DSCav1_mut2 (opt6)
gggagagggcgcuuggcuugcaaggacccugagcugcggcauugaagcacacccaacccaacucgacugaagucagccucacugaaccggaucugagaaucuucucucucugggcuugccagggcucuccgaaccuagcuagcauccucuucaauuccaacuagaaagcuuaccauggagcuuccaauauuaaaaacaaacgcuauaacaacuauacucgcagcaguuacacucugcuucgcauccucacaaaacauaacugaagaauuuuaccaauccacuugcucagccguaucaaaaggauaucuaggagcacuuagaaccggaugguauacaucagugauaacaauagaacuaagcaacauaaaagaaaacaagugcaacggaacugacgcaaaagucaaacuaaucaaacaagaacuagacaaauacaaaaacgcaguaacagaccuacaauuacuaaugcaaucaacaccagcagcaggaucagguucagccauaugcucagguaucgcuguaugcaaaguccuucaccuagaaggugaaguaaacaaaauuaaaaacgcccuacucaguacaaauaaagcugucguaaguuuaucaaacggaguaucaguccuuacauucaaaguauuagaccuaaaaaauuauauagacaaacaauuacuaccaauacucaacaaacaaucaugcucaauaccaaauauagaaaccguaauagaauuucagcaaaaaaauaacagauuacuagaaauaaccagagaauuuucagucaacgcaggagucacaacacccgucucaaccuacaugcuaaccaacucagaacuucuaucucuuaucaacgacaugcccauaaccaaugaucaaaaaaaauuaaugucuaauaacguucaaauaguaagacaacaaucauacucaauaaugugcauaaucaaagaagaaguauuagcauacguaguacaacuaccccuauauggaguaauagacacacccugcuggaaacuacacacauccccccucuguacaacaaacacuaaagaaggaucaaacauuugccuaacaagaacagaccgcggaugguacugcgacaacgcaggcuccguaucuuucuuuccacaagccgaaacuuguaaaguucaaucaaacagaguauuuugcgauacaaugaacuccuuaacauuaccuucagaaguaaaccuaugcaacauagacaucuucaacccaaaauacgacugcaaaauaaugaccucaaaaacagacguauccucaucagucauaaccuccuuaggagcaauaguaucauguuacggaaaaacaaaauguacagcaucaaauaaaaauagaggaauaauaaaaaccuucuccaacggaugcgacuacguauccaauaaaggaguagacaccguaucaguaggaaacacacuauacuguguaaacaaacaagaaggccaaucucuauauguaaaaggcgaaccaaucauaaauuuuuacgacccacuugucuuccccuccgacgaauuugacgcaagcauaucacaaguaaacgaaaaaaucaaccaaagccuagccuucauaaggaaaucugacgaauuacuucauaacguaaauguuggaaaaucaaccacaaacauaaugauaaccaccaucauaauuguaauaauaguaauacuacuacuacuaauugcaguaggacucuuccuauauugcaaagcucgcucaacaccaguuaccuuaucaaaagaccaacuaucuggaauaaacaacauagccuuuuccaacuaaggacuaguaauaaggaaacuguaugaaugucugugggcaggaagugaagagauccuucuguaaagguuuuuggaauuaugucugcugaauaauaaacuuuuuugaaauaauaaaucugguagaaaaaugagaucuaaaaaaaaaaaaaaaaaaaaaaaaaaaaaaaaaaaaaaaaaaaaaaaaaaaaaaaaaaaaaaaaugcaucccccccccccccccccccccccccccccccaaaggcucuuuucagagccaccagaauu

SEQ ID NO: 15006 - RNA, 2045 nt, Artificial Sequence
  mRNA product Design h-4 comprising derived and/or modified sequence from HRSV(Memphis-37)__AIY60640.1__F_DSCav1_mut2 (opt11)
gggagagggcgcuuggcuugcaaggacccugagcugcggcauugaagcacacccaacccaacucgacugaagucagccucacugaaccggaucugagaaucuucucucucugggcuugccagggcucuccgaaccuagcuagcauccucuucaauuccaacuagaaagcuuaccauggaacucccaauccuaaaaaccaacgccaucaccaccauccucgccgcugucaccuuaugcuuugccagcagccaaaacaucaccgaagaauuuuaccaaucaacaugcuccgccgucucaaaaggauaccucggcgcccuacgcaccggcugguacacaagcgucauaaccaucgagcucuccaacaucaaggaaaacaaaugcaauggaaccgacgccaaagucaaacuaaucaaacaagaacuagacaaguacaagaacgcagucaccgaccuccaacuccucaugcaguccacccccgcagcaggcucuggcucagcaauaugcuccggcaucgcugucugcaaaguccuacaccucgaaggcgaagucaacaaaaucaaaaacgcccuacuguccacaaacaaagccgucgucucccuauccaacggcgucucgguccuaaccuuuaagguucucgaucucaaaaauuacauagacaaacaacuacuccccauccucaacaaacaaucuugcucaauccccaacaucgaaaccgucaucgaguuccaacagaaaaacaacagacuacucgaaaucacccgcgaguucucagucaacgcgggcgucacaacacccgucagcaccuacaugcuaaccaacuccgaacuccucagccucauuaacgacaugcccaucaccaacgaccaaaagaaacuuauguccaacaacguucaaaucguccgccaacaauccuacuccaucaugugcaucaucaaagaagaaguacucgccuacguaguccaacugccccucuacggcgucaucgauaccccaugcuggaaacuacacaccagcccccucugcaccaccaacaccaaagaaggcuccaauaucugcuuaacccgcacagaccguggcugguacugcgauaacgccggcuccgucuccuucuucccccaagcagaaaccugcaaaguacaauccaaccgagucuucugugacaccaugaacucccuaacccuuccaucagaagucaaccucugcaacaucgacaucuucaaccccaaguacgacugcaaaaucaugacauccaaaaccgaugucucaagcagcgucauaaccucacucggcgcuaucguaagcugcuacggcaaaaccaaaugcaccgcaucaaacaaaaaccgcggaaucaucaaaaccuucagcaacggaugcgacuacguuuccaacaaaggcguagacaccgucuccgucggaaacacccucuacugcguaaacaaacaggaaggccaaucccucuacgucaaaggcgaacccaucauaaacuucuacgauccccuugucuucccguccgaugaguucgacgccuccaucucgcaagucaacgaaaagauaaaccaaucacuagcauucauccguaaauccgacgaacuccuccacaacgucaacgucggaaaauccaccaccaacauaaugaucaccaccauaaucaucgucaucaucguaauacuauuacuccucauagccgucggccucuuccuauauugcaaagcccgaucaacccccguaacccuuucuaaagaccaacuguccggaaucaacaacaucgcuuucagcaacugaggacuaguaauaaggaaacuguaugaaugucugugggcaggaagugaagagauccuucuguaaagguuuuuggaauuaugucugcugaauaauaaacuuuuuugaaauaauaaaucugguagaaaaaugagaucuaaaaaaaaaaaaaaaaaaaaaaaaaaaaaaaaaaaaaaaaaaaaaaaaaaaaaaaaaaaaaaaaugcaucccccccccccccccccccccccccccccccaaaggcucuuuucagagccaccagaauu

SEQ ID NO: 15007 - RNA, 2061 nt, Artificial Sequence
  mRNA product Design h-5 comprising derived and/or modified sequence from HRSV(Memphis-37)__AIY60640.1__F_DSCav1_mut2 (opt1)
gggagagggcgcuuggcuugcaaggacccugagcugcggcauugaagcacacccaacccaacucgacugaagucagccucacugaaccggaucugagaaucuucucucucugggcuugccagggcucuccgaaccuagcuagcauccucuucaauuccaacuagaaagcuuaccauggagcugcccauccucaagaccaacgccaucaccacgauccuggccgcggugacccugugcuucgccagcucccagaacaucaccgaggaguucuaccagagcacgugcuccgccgucagcaagggcuaccucggcgcccugcgcaccgggugguacaccagcgugaucaccaucgagcuguccaacaucaaggagaacaagugcaacggcaccgacgccaaggugaagcucaucaagcaggagcuggacaaguacaagaacgcggucacggaccugcagcuccugaugcagagcaccccggccgccggcuccgggagcgcgaucugcuccggcaucgccgucugcaaggugcugcaccucgagggcgaggugaacaagaucaagaacgcccugcuguccaccaacaaggccgucgugagccucuccaacggggugagcguccugaccuucaaggugcuggaccucaagaacuacaucgacaagcagcugcugcccauccugaacaagcagagcugcuccauccccaacaucgagaccgucaucgaguuccagcagaagaacaaccgccuccuggagaucacgcgggaguucagcgugaacgcgggcgugaccacccccgucuccaccuacaugcugacgaacagcgagcuccugucccugaucaacgacaugccgaucaccaacgaccagaagaagcucaugagcaacaacgugcagaucgugcgccagcaguccuacagcaucaugugcaucaucaaggaggagguccuggccuacguggugcagcugccccucuacggggucaucgacacccccugcuggaagcugcacaccagcccccugugcacgaccaacaccaaggagggcuccaacaucugccucacccggacggaccgcgggugguacugcgacaacgccggcagcguguccuucuucccgcaggccgagaccugcaagguccagagcaaccggguguucugcgacaccaugaacucccugacccugcccagcgaggugaaccucugcaacaucgacaucuucaaccccaaguacgacugcaagaucaugacguccaagaccgacgucagcuccagcgugaucaccucccugggcgccaucgugagcugcuacgggaagaccaagugcacggcgagcaacaagaaccgcggcaucaucaagaccuucuccaacgggugcgacuacgucagcaacaagggcguggacaccguguccgucggcaacacccuguacugcgugaacaagcaggagggccagagccucuacgugaagggggagcccaucaucaacuucuacgacccgcuggucuuccccuccgacgaguucgacgccagcaucucccaggugaacgagaagaucaaccagagccuggccuucauccggaaguccgacgagcuccugcacaacgugaacgucggcaagagcaccacgaacaucaugaucaccaccaucaucaucgugaucaucgugauccugcugcuccugaucgccgucgggcuguuccucuacugcaaggcccgcuccacccccgugacgcugagcaaggaccagcuguccgggaucaacaacaucgcguucagcaacugaggacuaguacuggcugcaucucccuuuccucuguccuccauccuucucccaggauggugaagggggaccugguacccagugauccccaccccaggauccuaaaucaugacuuaccugcuaauaaaaacucauuggaaaagugagaagaucuaaaaaaaaaaaaaaaaaaaaaaaaaaaaaaaaaaaaaaaaaaaaaaaaaaaaaaaaaaaaaaaaugcaucccccccccccccccccccccccccccccccaaaggcucuuuucagagccaccagaauu

SEQ ID NO: 15008 - RNA, 2061 nt, Artificial Sequence
  mRNA product Design h-5 comprising derived and/or modified sequence from HRSV(Memphis-37)__AIY60640.1__F_DSCav1_mut2 (opt1)
gggagagggcgcuuggcuugcaaggacccugagcugcggcauugaagcacacccaacccaacucgacugaagucagccucacugaaccggaucugagaaucuucucucucugggcuugccagggcucuccgaaccuagcuagcauccucuucaauuccaacuagaaagcuuaccauggagcugcccauccucaagaccaacgccaucaccacgauccuggccgcggugacccugugcuucgccagcucccagaacaucaccgaggaguucuaccagagcacgugcuccgccgucagcaagggcuaccucggggcccugcgcaccggcugguacaccuccgugaucaccaucgagcugagcaacaucaaggagaacaagugcaacgggaccgacgccaaggugaagcucaucaagcaggagcuggacaaguacaagaacgcggucacggaccugcagcuccugaugcaguccaccccggccgccggcagcggguccgccaucugcagcggcaucgcggugugcaaggugcugcaccucgagggcgaggucaacaagaucaagaacgcccugcuguccaccaacaaggccguggugagccucuccaacggggucagcgugcugaccuucaaggugcuggaccucaagaacuacaucgacaagcagcugcugcccauccucaacaagcaguccugcagcauccccaacaucgagacggucaucgaguuccagcagaagaacaaccggcugcuggagaucacccgcgaguucuccgugaacgccggcgugaccacccccgucagcacguacaugcucaccaacuccgagcugcugagccucaucaacgacaugccgaucaccaacgaccagaagaagcugaugagcaacaacgugcagaucgugcggcagcaguccuacagcaucaugugcaucaucaaggaggagguccuggccuacguggugcagcucccccuguacggggucaucgacacccccugcuggaagcugcacacgagcccccucugcaccaccaacaccaaggagggcuccaacaucugccugacgcgcaccgaccgggggugguacugcgacaacgcgggcuccgugagcuucuucccgcaggccgagaccugcaaggugcaguccaaccgcgucuucugcgacaccaugaacagccugacgcuccccuccgaggugaaccugugcaacaucgacaucuucaaccccaaguacgacugcaagaucaugaccagcaagaccgacgucuccagcuccgugaucaccagccugggcgccaucguguccugcuacgggaagacgaagugcaccgccagcaacaagaaccggggcaucaucaagaccuucuccaacgggugcgacuacgucagcaacaagggcguggacaccguguccgucggcaacacgcucuacugcgugaacaagcaggaggggcagagccuguacgugaagggcgagcccaucaucaacuucuacgacccgcuggucuuccccagcgacgaguucgacgccuccaucagccaggugaacgagaagaucaaccagucccucgcguucauccgcaagagcgacgagcugcugcacaacgugaacgucgggaaguccaccaccaacaucaugaucaccaccaucaucaucgugaucaucgugauccuccugcugcucaucgccgucggccuguuccuguacugcaaggcccggagcacgcccgugacccuguccaaggaccagcucagcgggaucaacaacaucgccuucuccaacugaggacuaguacuggcugcaucucccuuuccucuguccuccauccuucucccaggauggugaagggggaccugguacccagugauccccaccccaggauccuaaaucaugacuuaccugcuaauaaaaacucauuggaaaagugagaagaucuaaaaaaaaaaaaaaaaaaaaaaaaaaaaaaaaaaaaaaaaaaaaaaaaaaaaaaaaaaaaaaaaugcaucccccccccccccccccccccccccccccccaaaggcucuuuucagagccaccagaauu

SEQ ID NO: 15009 - RNA, 2061 nt, Artificial Sequence
  mRNA product Design h-5 comprising derived and/or modified sequence from HRSV(Memphis-37)__AIY60640.1__F_DSCav1_mut2 (opt2)
gggagagggcgcuuggcuugcaaggacccugagcugcggcauugaagcacacccaacccaacucgacugaagucagccucacugaaccggaucugagaaucuucucucucugggcuugccagggcucuccgaaccuagcuagcauccucuucaauuccaacuagaaagcuuaccauggagcuccccauccucaagaccaacgccaucaccaccauccucgccgccgucacccucugcuucgccuccucccagaacaucaccgaggaguucuaccaguccaccugcuccgccgucuccaagggcuaccucggcgcccuccgcaccggcugguacaccuccgucaucaccaucgagcucuccaacaucaaggagaacaagugcaacggcaccgacgccaaggucaagcucaucaagcaggagcucgacaaguacaagaacgccgucaccgaccuccagcuccucaugcaguccacccccgccgccggcuccggcuccgccaucugcuccggcaucgccgucugcaagguccuccaccucgagggcgaggucaacaagaucaagaacgcccuccucuccaccaacaaggccgucgucucccucuccaacggcgucuccguccucaccuucaagguccucgaccucaagaacuacaucgacaagcagcuccuccccauccucaacaagcaguccugcuccauccccaacaucgagaccgucaucgaguuccagcagaagaacaaccgccuccucgagaucacccgcgaguucuccgucaacgccggcgucaccacccccgucuccaccuacaugcucaccaacuccgagcuccucucccucaucaacgacaugcccaucaccaacgaccagaagaagcucauguccaacaacguccagaucguccgccagcaguccuacuccaucaugugcaucaucaaggaggagguccucgccuacgucguccagcucccccucuacggcgucaucgacacccccugcuggaagcuccacaccuccccccucugcaccaccaacaccaaggagggcuccaacaucugccucacccgcaccgaccgcggcugguacugcgacaacgccggcuccgucuccuucuucccccaggccgagaccugcaagguccaguccaaccgcgucuucugcgacaccaugaacucccucacccuccccuccgaggucaaccucugcaacaucgacaucuucaaccccaaguacgacugcaagaucaugaccuccaagaccgacgucuccuccuccgucaucaccucccucggcgccaucgucuccugcuacggcaagaccaagugcaccgccuccaacaagaaccgcggcaucaucaagaccuucuccaacggcugcgacuacgucuccaacaagggcgucgacaccgucuccgucggcaacacccucuacugcgucaacaagcaggagggccagucccucuacgucaagggcgagcccaucaucaacuucuacgacccccucgucuuccccuccgacgaguucgacgccuccaucucccaggucaacgagaagaucaaccagucccucgccuucauccgcaaguccgacgagcuccuccacaacgucaacgucggcaaguccaccaccaacaucaugaucaccaccaucaucaucgucaucaucgucauccuccuccuccucaucgccgucggccucuuccucuacugcaaggcccgcuccacccccgucacccucuccaaggaccagcucuccggcaucaacaacaucgccuucuccaacugaggacuaguacuggcugcaucucccuuuccucuguccuccauccuucucccaggauggugaagggggaccugguacccagugauccccaccccaggauccuaaaucaugacuuaccugcuaauaaaaacucauuggaaaagugagaagaucuaaaaaaaaaaaaaaaaaaaaaaaaaaaaaaaaaaaaaaaaaaaaaaaaaaaaaaaaaaaaaaaaugcaucccccccccccccccccccccccccccccccaaaggcucuuuucagagccaccagaauu

SEQ ID NO: 15010 - RNA, 2061 nt, Artificial Sequence
  mRNA product Design h-5 comprising derived and/or modified sequence from HRSV(Memphis-37)__AIY60640.1__F_DSCav1_mut2 (opt3)
gggagagggcgcuuggcuugcaaggacccugagcugcggcauugaagcacacccaacccaacucgacugaagucagccucacugaaccggaucugagaaucuucucucucugggcuugccagggcucuccgaaccuagcuagcauccucuucaauuccaacuagaaagcuuaccauggagcugcccauccucaagaccaacgccauuacaacuauacuugcugcagugacgcugugcuucgccagcucccagaauaucaccgaagaguuuuaccaaucuacauguucagcggucaguaaaggcuauuugggggcuuuaagaacuggaugguacaccagcguuauuacaaucgaacuguccaacauuaaggagaauaaaugcaacgguaccgacgccaaggugaaacuaaucaagcaggaacucgauaaguauaaaaaugcaguaacugaccugcagcuucugaugcagucuacuccugccgcuggcucggggucagcaauauguagcggaaucgccgugugcaaggucuugcaccucgagggcgaggugaacaaaauuaagaaugcucugcugaguaccaacaaagccguugugucccucucuaauggugucagcguguuaacguucaagguacuggaucuuaagaacuacaucgacaaacaauugcugccaauucuaaauaagcaguccuguucaaucccgaacauagaaacuguuauugaguuucagcagaaaaauaacaggcuccuggaaaucacccgggaguucagugugaaugcgggggucacaacucccgugagcaccuauaugcuuacaaacucugagcuguugucccucauuaacgauaugccuaucaccaaugaccaaaagaaacugaugucaaacaaugugcagaucguccgccagcagagcuacaguauuaugugcauaaucaaggaagagguuuuagcauaugugguacaacugccacucuacggagugauugauacgcccuguuggaaacuucauacuucuccucugugcacaaccaacacuaaggaaggcuccaauaucuguuugacacgaaccgaccguggcugguacugcgauaacgccgggagcgucucguuuuucccacaggcugagacguguaaggugcagucuaauagaguuuucugcgacaccaugaacucccuaacacugcccucagaagugaaucucugcaacauagauauuuucaauccuaaauaugacuguaagaucaugacaaguaaaaccgaugucagcuccucugugaucacaagccugggagccauuguaucaugcuacgguaagacuaaauguaccgcaaguaacaagaauaggggcaucauuaagacauuuuccaacgggugcgacuauguuagcaauaaaggaguggacaccgucucugugggcaacacucuuuacugugucaacaagcaagagggucagucacuguaugugaaaggggagccaauaaucaauuucuacgauccguugguuuuucccagugacgaauuugaugcuagcauuucccaggugaacgagaagaucaaucagucucucgccuuuauccggaaaucggacgaacuguuacacaacguaaaugucggaaagagcacgacaaacauuaugauaaccacuaucauuaucgugauuaucguuauacugcuacuccugaucgcggugggccuuuucuuguauugcaaggcccgcuccaccccugucacacugucaaaagaucaacucaguggcauuaauaacaucgcauucucuaauugaggacuaguacuggcugcaucucccuuuccucuguccuccauccuucucccaggauggugaagggggaccugguacccagugauccccaccccaggauccuaaaucaugacuuaccugcuaauaaaaacucauuggaaaagugagaagaucuaaaaaaaaaaaaaaaaaaaaaaaaaaaaaaaaaaaaaaaaaaaaaaaaaaaaaaaaaaaaaaaaugcaucccccccccccccccccccccccccccccccaaaggcucuuuucagagccaccagaauu

SEQ ID NO: 15011 - RNA, 2061 nt, Artificial Sequence
  mRNA product Design h-5 comprising derived and/or modified sequence from HRSV(Memphis-37)__AIY60640.1__F_DSCav1_mut2 (opt4)
gggagagggcgcuuggcuugcaaggacccugagcugcggcauugaagcacacccaacccaacucgacugaagucagccucacugaaccggaucugagaaucuucucucucugggcuugccagggcucuccgaaccuagcuagcauccucuucaauuccaacuagaaagcuuaccauggagcugcccauccugaagaccaacgccaucaccaccauccuggccgccgugacccugugcuucgccagcagccagaacaucaccgaggaguucuaccagagcaccugcagcgccgugagcaagggcuaccugggcgcccugagaaccggcugguacaccagcgugaucaccaucgagcugagcaacaucaaggagaacaagugcaacggcaccgacgccaaggugaagcugaucaagcaggagcuggacaaguacaagaacgccgugaccgaccugcagcugcugaugcagagcacccccgccgccggcagcggcagcgccaucugcagcggcaucgccgugugcaaggugcugcaccuggagggcgaggugaacaagaucaagaacgcccugcugagcaccaacaaggccguggugagccugagcaacggcgugagcgugcugaccuucaaggugcuggaccugaagaacuacaucgacaagcagcugcugcccauccugaacaagcagagcugcagcauccccaacaucgagaccgugaucgaguuccagcagaagaacaacagacugcuggagaucaccagagaguucagcgugaacgccggcgugaccacccccgugagcaccuacaugcugaccaacagcgagcugcugagccugaucaacgacaugcccaucaccaacgaccagaagaagcugaugagcaacaacgugcagaucgugagacagcagagcuacagcaucaugugcaucaucaaggaggaggugcuggccuacguggugcagcugccccuguacggcgugaucgacacccccugcuggaagcugcacaccagcccccugugcaccaccaacaccaaggagggcagcaacaucugccugaccagaaccgacagaggcugguacugcgacaacgccggcagcgugagcuucuucccccaggccgagaccugcaaggugcagagcaacagaguguucugcgacaccaugaacagccugacccugcccagcgaggugaaccugugcaacaucgacaucuucaaccccaaguacgacugcaagaucaugaccagcaagaccgacgugagcagcagcgugaucaccagccugggcgccaucgugagcugcuacggcaagaccaagugcaccgccagcaacaagaacagaggcaucaucaagaccuucagcaacggcugcgacuacgugagcaacaagggcguggacaccgugagcgugggcaacacccuguacugcgugaacaagcaggagggccagagccuguacgugaagggcgagcccaucaucaacuucuacgacccccugguguuccccagcgacgaguucgacgccagcaucagccaggugaacgagaagaucaaccagagccuggccuucaucagaaagagcgacgagcugcugcacaacgugaacgugggcaagagcaccaccaacaucaugaucaccaccaucaucaucgugaucaucgugauccugcugcugcugaucgccgugggccuguuccuguacugcaaggccagaagcacccccgugacccugagcaaggaccagcugagcggcaucaacaacaucgccuucagcaacugaggacuaguacuggcugcaucucccuuuccucuguccuccauccuucucccaggauggugaagggggaccugguacccagugauccccaccccaggauccuaaaucaugacuuaccugcuaauaaaaacucauuggaaaagugagaagaucuaaaaaaaaaaaaaaaaaaaaaaaaaaaaaaaaaaaaaaaaaaaaaaaaaaaaaaaaaaaaaaaaugcaucccccccccccccccccccccccccccccccaaaggcucuuuucagagccaccagaauu

SEQ ID NO: 15012 - RNA, 2061 nt, Artificial Sequence
  mRNA product Design h-5 comprising derived and/or modified sequence from HRSV(Memphis-37)__AIY60640.1__F_DSCav1_mut2 (opt5)
gggagagggcgcuuggcuugcaaggacccugagcugcggcauugaagcacacccaacccaacucgacugaagucagccucacugaaccggaucugagaaucuucucucucugggcuugccagggcucuccgaaccuagcuagcauccucuucaauuccaacuagaaagcuuaccauggagcugcccauccucaagaccaacgccauuacaacgauccuggcugccgugacccuuugcuucgcgagcucccagaauauuacagaagaguuuuaccaaucuaccuguagcgcugucuccaaaggcuaucugggggcccucagaacaggaugguacaccucuguuaucacaauugaacugagcaacaucaaggagaauaaaugcaacggcaccgacgccaaggugaaacuuaucaagcaggaacuggauaaguauaaaaaugcugugacggaccuccagcugcugaugcaguccaccccugccgcugggucuggaagcgccauuuguuccggcaucgcggucugcaaggugcuccaccuggagggggagguuaacaaaauuaagaaugcccuucugagcacaaacaaagcuguggucucucucuccaauggagugagcguucugaccuucaaggugcuugaucugaagaacuacaucgacaaacaacuccugccgauucugaauaagcagucuuguuccauccccaacauugaaacagucaucgaguuucagcagaaaaauaaccggcuccuggaaaucacccgcgaguucagcgugaaugccggcgugacgacaccugucucuaccuauaugcuuacaaacuccgagcugcucagccugauuaacgauaugcccaucaccaaugaccaaaagaaacuuauguccaacaauguucagauugugagacagcagucuuacagcaucaugugcauuaucaaggaagaggugcuggcuuaugucgugcaacucccucuguacggcguuaucgauacccccuguuggaaacugcauacauccccucucugcacgaccaacacaaaggaagggagcaauauuugucugacccggacagaccgcggaugguacugcgauaacgccggcucuguguccuuuuucccgcaggcggagaccuguaagguccagagcaauagaguguuuugcgacacgaugaacucucuuacacugcccagcgaaguuaaucucugcaacaucgauauuuucaauccuaaauaugacuguaagaucaugaccuccaaaaccgaugugucuagcuccgucauuacaagccugggggccaucgugucuugcuacggaaagaccaaauguacagcuuccaacaagaaucggggcaucauuaagacguuuagcaacgggugcgacuaugucucuaauaaaggaguggacaccguuuccgugggcaacacacuuuacugugucaacaagcaagagggccagagccuguaugugaaaggggagcccaucauuaauuucuacgauccucucguuuuucccuccgacgaguucgaugccucuaucagccaggugaacgaaaagauuaaucagucccuggcuuuuauccgcaaaucugacgaacugcuccacaacgucaaugugggaaagagcaccacaaacauuaugaucaccacgaucauuaucgugauuaucguuauucugcuucugcucaucgccgucggccuguuccuguauugcaaggccagauccaccccggugacacuuagcaaagaucaacucucugggaucaauaacauugcuuucuccaauugaggacuaguacuggcugcaucucccuuuccucuguccuccauccuucucccaggauggugaagggggaccugguacccagugauccccaccccaggauccuaaaucaugacuuaccugcuaauaaaaacucauuggaaaagugagaagaucuaaaaaaaaaaaaaaaaaaaaaaaaaaaaaaaaaaaaaaaaaaaaaaaaaaaaaaaaaaaaaaaaugcaucccccccccccccccccccccccccccccccaaaggcucuuuucagagccaccagaauu

SEQ ID NO: 15013 - RNA, 2061 nt, Artificial Sequence
  mRNA product Design h-5 comprising derived and/or modified sequence from HRSV(Memphis-37)__AIY60640.1__F_DSCav1_mut2 (opt6)
gggagagggcgcuuggcuugcaaggacccugagcugcggcauugaagcacacccaacccaacucgacugaagucagccucacugaaccggaucugagaaucuucucucucugggcuugccagggcucuccgaaccuagcuagcauccucuucaauuccaacuagaaagcuuaccauggagcuuccaauauuaaaaacaaacgcuauaacaacuauacucgcagcaguuacacucugcuucgcauccucacaaaacauaacugaagaauuuuaccaauccacuugcucagccguaucaaaaggauaucuaggagcacuuagaaccggaugguauacaucagugauaacaauagaacuaagcaacauaaaagaaaacaagugcaacggaacugacgcaaaagucaaacuaaucaaacaagaacuagacaaauacaaaaacgcaguaacagaccuacaauuacuaaugcaaucaacaccagcagcaggaucagguucagccauaugcucagguaucgcuguaugcaaaguccuucaccuagaaggugaaguaaacaaaauuaaaaacgcccuacucaguacaaauaaagcugucguaaguuuaucaaacggaguaucaguccuuacauucaaaguauuagaccuaaaaaauuauauagacaaacaauuacuaccaauacucaacaaacaaucaugcucaauaccaaauauagaaaccguaauagaauuucagcaaaaaaauaacagauuacuagaaauaaccagagaauuuucagucaacgcaggagucacaacacccgucucaaccuacaugcuaaccaacucagaacuucuaucucuuaucaacgacaugcccauaaccaaugaucaaaaaaaauuaaugucuaauaacguucaaauaguaagacaacaaucauacucaauaaugugcauaaucaaagaagaaguauuagcauacguaguacaacuaccccuauauggaguaauagacacacccugcuggaaacuacacacauccccccucuguacaacaaacacuaaagaaggaucaaacauuugccuaacaagaacagaccgcggaugguacugcgacaacgcaggcuccguaucuuucuuuccacaagccgaaacuuguaaaguucaaucaaacagaguauuuugcgauacaaugaacuccuuaacauuaccuucagaaguaaaccuaugcaacauagacaucuucaacccaaaauacgacugcaaaauaaugaccucaaaaacagacguauccucaucagucauaaccuccuuaggagcaauaguaucauguuacggaaaaacaaaauguacagcaucaaauaaaaauagaggaauaauaaaaaccuucuccaacggaugcgacuacguauccaauaaaggaguagacaccguaucaguaggaaacacacuauacuguguaaacaaacaagaaggccaaucucuauauguaaaaggcgaaccaaucauaaauuuuuacgacccacuugucuuccccuccgacgaauuugacgcaagcauaucacaaguaaacgaaaaaaucaaccaaagccuagccuucauaaggaaaucugacgaauuacuucauaacguaaauguuggaaaaucaaccacaaacauaaugauaaccaccaucauaauuguaauaauaguaauacuacuacuacuaauugcaguaggacucuuccuauauugcaaagcucgcucaacaccaguuaccuuaucaaaagaccaacuaucuggaauaaacaacauagccuuuuccaacuaaggacuaguacuggcugcaucucccuuuccucuguccuccauccuucucccaggauggugaagggggaccugguacccagugauccccaccccaggauccuaaaucaugacuuaccugcuaauaaaaacucauuggaaaagugagaagaucuaaaaaaaaaaaaaaaaaaaaaaaaaaaaaaaaaaaaaaaaaaaaaaaaaaaaaaaaaaaaaaaaugcaucccccccccccccccccccccccccccccccaaaggcucuuuucagagccaccagaauu

SEQ ID NO: 15014 - RNA, 2061 nt, Artificial Sequence
  mRNA product Design h-5 comprising derived and/or modified sequence from HRSV(Memphis-37)__AIY60640.1__F_DSCav1_mut2 (opt11)
gggagagggcgcuuggcuugcaaggacccugagcugcggcauugaagcacacccaacccaacucgacugaagucagccucacugaaccggaucugagaaucuucucucucugggcuugccagggcucuccgaaccuagcuagcauccucuucaauuccaacuagaaagcuuaccauggaacucccaauccuaaaaaccaacgccaucaccaccauccucgccgcugucaccuuaugcuuugccagcagccaaaacaucaccgaagaauuuuaccaaucaacaugcuccgccgucucaaaaggauaccucggcgcccuacgcaccggcugguacacaagcgucauaaccaucgagcucuccaacaucaaggaaaacaaaugcaauggaaccgacgccaaagucaaacuaaucaaacaagaacuagacaaguacaagaacgcagucaccgaccuccaacuccucaugcaguccacccccgcagcaggcucuggcucagcaauaugcuccggcaucgcugucugcaaaguccuacaccucgaaggcgaagucaacaaaaucaaaaacgcccuacuguccacaaacaaagccgucgucucccuauccaacggcgucucgguccuaaccuuuaagguucucgaucucaaaaauuacauagacaaacaacuacuccccauccucaacaaacaaucuugcucaauccccaacaucgaaaccgucaucgaguuccaacagaaaaacaacagacuacucgaaaucacccgcgaguucucagucaacgcgggcgucacaacacccgucagcaccuacaugcuaaccaacuccgaacuccucagccucauuaacgacaugcccaucaccaacgaccaaaagaaacuuauguccaacaacguucaaaucguccgccaacaauccuacuccaucaugugcaucaucaaagaagaaguacucgccuacguaguccaacugccccucuacggcgucaucgauaccccaugcuggaaacuacacaccagcccccucugcaccaccaacaccaaagaaggcuccaauaucugcuuaacccgcacagaccguggcugguacugcgauaacgccggcuccgucuccuucuucccccaagcagaaaccugcaaaguacaauccaaccgagucuucugugacaccaugaacucccuaacccuuccaucagaagucaaccucugcaacaucgacaucuucaaccccaaguacgacugcaaaaucaugacauccaaaaccgaugucucaagcagcgucauaaccucacucggcgcuaucguaagcugcuacggcaaaaccaaaugcaccgcaucaaacaaaaaccgcggaaucaucaaaaccuucagcaacggaugcgacuacguuuccaacaaaggcguagacaccgucuccgucggaaacacccucuacugcguaaacaaacaggaaggccaaucccucuacgucaaaggcgaacccaucauaaacuucuacgauccccuugucuucccguccgaugaguucgacgccuccaucucgcaagucaacgaaaagauaaaccaaucacuagcauucauccguaaauccgacgaacuccuccacaacgucaacgucggaaaauccaccaccaacauaaugaucaccaccauaaucaucgucaucaucguaauacuauuacuccucauagccgucggccucuuccuauauugcaaagcccgaucaacccccguaacccuuucuaaagaccaacuguccggaaucaacaacaucgcuuucagcaacugaggacuaguacuggcugcaucucccuuuccucuguccuccauccuucucccaggauggugaagggggaccugguacccagugauccccaccccaggauccuaaaucaugacuuaccugcuaauaaaaacucauuggaaaagugagaagaucuaaaaaaaaaaaaaaaaaaaaaaaaaaaaaaaaaaaaaaaaaaaaaaaaaaaaaaaaaaaaaaaaugcaucccccccccccccccccccccccccccccccaaaggcucuuuucagagccaccagaauu

SEQ ID NO: 15015 - RNA, 1994 nt, Artificial Sequence
  mRNA product Design i-1 comprising derived and/or modified sequence from HRSV(Memphis-37)__AIY60640.1__F_DSCav1_mut2 (opt1)
gggagagggcgcuuggcuugcaaggacccugagcugcggcauugaagcacacccaacccaacucgacugaagucagccucacugaaccggaucugagaaucuucucucucugggcuugccagggcucuccgaaccuagcuagcauccucuucaauuccaacuagaaagcuuaccauggagcugcccauccucaagaccaacgccaucaccacgauccuggccgcggugacccugugcuucgccagcucccagaacaucaccgaggaguucuaccagagcacgugcuccgccgucagcaagggcuaccucggcgcccugcgcaccgggugguacaccagcgugaucaccaucgagcuguccaacaucaaggagaacaagugcaacggcaccgacgccaaggugaagcucaucaagcaggagcuggacaaguacaagaacgcggucacggaccugcagcuccugaugcagagcaccccggccgccggcuccgggagcgcgaucugcuccggcaucgccgucugcaaggugcugcaccucgagggcgaggugaacaagaucaagaacgcccugcuguccaccaacaaggccgucgugagccucuccaacggggugagcguccugaccuucaaggugcuggaccucaagaacuacaucgacaagcagcugcugcccauccugaacaagcagagcugcuccauccccaacaucgagaccgucaucgaguuccagcagaagaacaaccgccuccuggagaucacgcgggaguucagcgugaacgcgggcgugaccacccccgucuccaccuacaugcugacgaacagcgagcuccugucccugaucaacgacaugccgaucaccaacgaccagaagaagcucaugagcaacaacgugcagaucgugcgccagcaguccuacagcaucaugugcaucaucaaggaggagguccuggccuacguggugcagcugccccucuacggggucaucgacacccccugcuggaagcugcacaccagcccccugugcacgaccaacaccaaggagggcuccaacaucugccucacccggacggaccgcgggugguacugcgacaacgccggcagcguguccuucuucccgcaggccgagaccugcaagguccagagcaaccggguguucugcgacaccaugaacucccugacccugcccagcgaggugaaccucugcaacaucgacaucuucaaccccaaguacgacugcaagaucaugacguccaagaccgacgucagcuccagcgugaucaccucccugggcgccaucgugagcugcuacgggaagaccaagugcacggcgagcaacaagaaccgcggcaucaucaagaccuucuccaacgggugcgacuacgucagcaacaagggcguggacaccguguccgucggcaacacccuguacugcgugaacaagcaggagggccagagccucuacgugaagggggagcccaucaucaacuucuacgacccgcuggucuuccccuccgacgaguucgacgccagcaucucccaggugaacgagaagaucaaccagagccuggccuucauccggaaguccgacgagcuccugcacaacgugaacgucggcaagagcaccacgaacaucaugaucaccaccaucaucaucgugaucaucgugauccugcugcuccugaucgccgucgggcuguuccucuacugcaaggcccgcuccacccccgugacgcugagcaaggaccagcuguccgggaucaacaacaucgcguucagcaacugaggacuaguguccaccugucccuccugggcugcuggauugucucguuuuccugccaaauaaacaggaucagcgcuuuacagaucuaaaaaaaaaaaaaaaaaaaaaaaaaaaaaaaaaaaaaaaaaaaaaaaaaaaaaaaaaaaaaaaaugcaucccccccccccccccccccccccccccccccaaaggcucuuuucagagccaccagaauu

SEQ ID NO: 15016 - RNA, 1994 nt, Artificial Sequence
  mRNA product Design i-1 comprising derived and/or modified sequence from HRSV(Memphis-37)__AIY60640.1__F_DSCav1_mut2 (opt1)
gggagagggcgcuuggcuugcaaggacccugagcugcggcauugaagcacacccaacccaacucgacugaagucagccucacugaaccggaucugagaaucuucucucucugggcuugccagggcucuccgaaccuagcuagcauccucuucaauuccaacuagaaagcuuaccauggagcugcccauccucaagaccaacgccaucaccacgauccuggccgcggugacccugugcuucgccagcucccagaacaucaccgaggaguucuaccagagcacgugcuccgccgucagcaagggcuaccucggggcccugcgcaccggcugguacaccuccgugaucaccaucgagcugagcaacaucaaggagaacaagugcaacgggaccgacgccaaggugaagcucaucaagcaggagcuggacaaguacaagaacgcggucacggaccugcagcuccugaugcaguccaccccggccgccggcagcggguccgccaucugcagcggcaucgcggugugcaaggugcugcaccucgagggcgaggucaacaagaucaagaacgcccugcuguccaccaacaaggccguggugagccucuccaacggggucagcgugcugaccuucaaggugcuggaccucaagaacuacaucgacaagcagcugcugcccauccucaacaagcaguccugcagcauccccaacaucgagacggucaucgaguuccagcagaagaacaaccggcugcuggagaucacccgcgaguucuccgugaacgccggcgugaccacccccgucagcacguacaugcucaccaacuccgagcugcugagccucaucaacgacaugccgaucaccaacgaccagaagaagcugaugagcaacaacgugcagaucgugcggcagcaguccuacagcaucaugugcaucaucaaggaggagguccuggccuacguggugcagcucccccuguacggggucaucgacacccccugcuggaagcugcacacgagcccccucugcaccaccaacaccaaggagggcuccaacaucugccugacgcgcaccgaccgggggugguacugcgacaacgcgggcuccgugagcuucuucccgcaggccgagaccugcaaggugcaguccaaccgcgucuucugcgacaccaugaacagccugacgcuccccuccgaggugaaccugugcaacaucgacaucuucaaccccaaguacgacugcaagaucaugaccagcaagaccgacgucuccagcuccgugaucaccagccugggcgccaucguguccugcuacgggaagacgaagugcaccgccagcaacaagaaccggggcaucaucaagaccuucuccaacgggugcgacuacgucagcaacaagggcguggacaccguguccgucggcaacacgcucuacugcgugaacaagcaggaggggcagagccuguacgugaagggcgagcccaucaucaacuucuacgacccgcuggucuuccccagcgacgaguucgacgccuccaucagccaggugaacgagaagaucaaccagucccucgcguucauccgcaagagcgacgagcugcugcacaacgugaacgucgggaaguccaccaccaacaucaugaucaccaccaucaucaucgugaucaucgugauccuccugcugcucaucgccgucggccuguuccuguacugcaaggcccggagcacgcccgugacccuguccaaggaccagcucagcgggaucaacaacaucgccuucuccaacugaggacuaguguccaccugucccuccugggcugcuggauugucucguuuuccugccaaauaaacaggaucagcgcuuuacagaucuaaaaaaaaaaaaaaaaaaaaaaaaaaaaaaaaaaaaaaaaaaaaaaaaaaaaaaaaaaaaaaaaugcaucccccccccccccccccccccccccccccccaaaggcucuuuucagagccaccagaauu

SEQ ID NO: 15017 - RNA, 1994 nt, Artificial Sequence
  mRNA product Design i-1 comprising derived and/or modified sequence from HRSV(Memphis-37)__AIY60640.1__F_DSCav1_mut2 (opt2)
gggagagggcgcuuggcuugcaaggacccugagcugcggcauugaagcacacccaacccaacucgacugaagucagccucacugaaccggaucugagaaucuucucucucugggcuugccagggcucuccgaaccuagcuagcauccucuucaauuccaacuagaaagcuuaccauggagcuccccauccucaagaccaacgccaucaccaccauccucgccgccgucacccucugcuucgccuccucccagaacaucaccgaggaguucuaccaguccaccugcuccgccgucuccaagggcuaccucggcgcccuccgcaccggcugguacaccuccgucaucaccaucgagcucuccaacaucaaggagaacaagugcaacggcaccgacgccaaggucaagcucaucaagcaggagcucgacaaguacaagaacgccgucaccgaccuccagcuccucaugcaguccacccccgccgccggcuccggcuccgccaucugcuccggcaucgccgucugcaagguccuccaccucgagggcgaggucaacaagaucaagaacgcccuccucuccaccaacaaggccgucgucucccucuccaacggcgucuccguccucaccuucaagguccucgaccucaagaacuacaucgacaagcagcuccuccccauccucaacaagcaguccugcuccauccccaacaucgagaccgucaucgaguuccagcagaagaacaaccgccuccucgagaucacccgcgaguucuccgucaacgccggcgucaccacccccgucuccaccuacaugcucaccaacuccgagcuccucucccucaucaacgacaugcccaucaccaacgaccagaagaagcucauguccaacaacguccagaucguccgccagcaguccuacuccaucaugugcaucaucaaggaggagguccucgccuacgucguccagcucccccucuacggcgucaucgacacccccugcuggaagcuccacaccuccccccucugcaccaccaacaccaaggagggcuccaacaucugccucacccgcaccgaccgcggcugguacugcgacaacgccggcuccgucuccuucuucccccaggccgagaccugcaagguccaguccaaccgcgucuucugcgacaccaugaacucccucacccuccccuccgaggucaaccucugcaacaucgacaucuucaaccccaaguacgacugcaagaucaugaccuccaagaccgacgucuccuccuccgucaucaccucccucggcgccaucgucuccugcuacggcaagaccaagugcaccgccuccaacaagaaccgcggcaucaucaagaccuucuccaacggcugcgacuacgucuccaacaagggcgucgacaccgucuccgucggcaacacccucuacugcgucaacaagcaggagggccagucccucuacgucaagggcgagcccaucaucaacuucuacgacccccucgucuuccccuccgacgaguucgacgccuccaucucccaggucaacgagaagaucaaccagucccucgccuucauccgcaaguccgacgagcuccuccacaacgucaacgucggcaaguccaccaccaacaucaugaucaccaccaucaucaucgucaucaucgucauccuccuccuccucaucgccgucggccucuuccucuacugcaaggcccgcuccacccccgucacccucuccaaggaccagcucuccggcaucaacaacaucgccuucuccaacugaggacuaguguccaccugucccuccugggcugcuggauugucucguuuuccugccaaauaaacaggaucagcgcuuuacagaucuaaaaaaaaaaaaaaaaaaaaaaaaaaaaaaaaaaaaaaaaaaaaaaaaaaaaaaaaaaaaaaaaugcaucccccccccccccccccccccccccccccccaaaggcucuuuucagagccaccagaauu

SEQ ID NO: 15018 - RNA, 1994 nt, Artificial Sequence
  mRNA product Design i-1 comprising derived and/or modified sequence from HRSV(Memphis-37)__AIY60640.1__F_DSCav1_mut2 (opt3)
gggagagggcgcuuggcuugcaaggacccugagcugcggcauugaagcacacccaacccaacucgacugaagucagccucacugaaccggaucugagaaucuucucucucugggcuugccagggcucuccgaaccuagcuagcauccucuucaauuccaacuagaaagcuuaccauggagcugcccauccucaagaccaacgccauuacaacuauacuugcugcagugacgcugugcuucgccagcucccagaauaucaccgaagaguuuuaccaaucuacauguucagcggucaguaaaggcuauuugggggcuuuaagaacuggaugguacaccagcguuauuacaaucgaacuguccaacauuaaggagaauaaaugcaacgguaccgacgccaaggugaaacuaaucaagcaggaacucgauaaguauaaaaaugcaguaacugaccugcagcuucugaugcagucuacuccugccgcuggcucggggucagcaauauguagcggaaucgccgugugcaaggucuugcaccucgagggcgaggugaacaaaauuaagaaugcucugcugaguaccaacaaagccguugugucccucucuaauggugucagcguguuaacguucaagguacuggaucuuaagaacuacaucgacaaacaauugcugccaauucuaaauaagcaguccuguucaaucccgaacauagaaacuguuauugaguuucagcagaaaaauaacaggcuccuggaaaucacccgggaguucagugugaaugcgggggucacaacucccgugagcaccuauaugcuuacaaacucugagcuguugucccucauuaacgauaugccuaucaccaaugaccaaaagaaacugaugucaaacaaugugcagaucguccgccagcagagcuacaguauuaugugcauaaucaaggaagagguuuuagcauaugugguacaacugccacucuacggagugauugauacgcccuguuggaaacuucauacuucuccucugugcacaaccaacacuaaggaaggcuccaauaucuguuugacacgaaccgaccguggcugguacugcgauaacgccgggagcgucucguuuuucccacaggcugagacguguaaggugcagucuaauagaguuuucugcgacaccaugaacucccuaacacugcccucagaagugaaucucugcaacauagauauuuucaauccuaaauaugacuguaagaucaugacaaguaaaaccgaugucagcuccucugugaucacaagccugggagccauuguaucaugcuacgguaagacuaaauguaccgcaaguaacaagaauaggggcaucauuaagacauuuuccaacgggugcgacuauguuagcaauaaaggaguggacaccgucucugugggcaacacucuuuacugugucaacaagcaagagggucagucacuguaugugaaaggggagccaauaaucaauuucuacgauccguugguuuuucccagugacgaauuugaugcuagcauuucccaggugaacgagaagaucaaucagucucucgccuuuauccggaaaucggacgaacuguuacacaacguaaaugucggaaagagcacgacaaacauuaugauaaccacuaucauuaucgugauuaucguuauacugcuacuccugaucgcggugggccuuuucuuguauugcaaggcccgcuccaccccugucacacugucaaaagaucaacucaguggcauuaauaacaucgcauucucuaauugaggacuaguguccaccugucccuccugggcugcuggauugucucguuuuccugccaaauaaacaggaucagcgcuuuacagaucuaaaaaaaaaaaaaaaaaaaaaaaaaaaaaaaaaaaaaaaaaaaaaaaaaaaaaaaaaaaaaaaaugcaucccccccccccccccccccccccccccccccaaaggcucuuuucagagccaccagaauu

SEQ ID NO: 15019 - RNA, 1994 nt, Artificial Sequence
  mRNA product Design i-1 comprising derived and/or modified sequence from HRSV(Memphis-37)__AIY60640.1__F_DSCav1_mut2 (opt4)
gggagagggcgcuuggcuugcaaggacccugagcugcggcauugaagcacacccaacccaacucgacugaagucagccucacugaaccggaucugagaaucuucucucucugggcuugccagggcucuccgaaccuagcuagcauccucuucaauuccaacuagaaagcuuaccauggagcugcccauccugaagaccaacgccaucaccaccauccuggccgccgugacccugugcuucgccagcagccagaacaucaccgaggaguucuaccagagcaccugcagcgccgugagcaagggcuaccugggcgcccugagaaccggcugguacaccagcgugaucaccaucgagcugagcaacaucaaggagaacaagugcaacggcaccgacgccaaggugaagcugaucaagcaggagcuggacaaguacaagaacgccgugaccgaccugcagcugcugaugcagagcacccccgccgccggcagcggcagcgccaucugcagcggcaucgccgugugcaaggugcugcaccuggagggcgaggugaacaagaucaagaacgcccugcugagcaccaacaaggccguggugagccugagcaacggcgugagcgugcugaccuucaaggugcuggaccugaagaacuacaucgacaagcagcugcugcccauccugaacaagcagagcugcagcauccccaacaucgagaccgugaucgaguuccagcagaagaacaacagacugcuggagaucaccagagaguucagcgugaacgccggcgugaccacccccgugagcaccuacaugcugaccaacagcgagcugcugagccugaucaacgacaugcccaucaccaacgaccagaagaagcugaugagcaacaacgugcagaucgugagacagcagagcuacagcaucaugugcaucaucaaggaggaggugcuggccuacguggugcagcugccccuguacggcgugaucgacacccccugcuggaagcugcacaccagcccccugugcaccaccaacaccaaggagggcagcaacaucugccugaccagaaccgacagaggcugguacugcgacaacgccggcagcgugagcuucuucccccaggccgagaccugcaaggugcagagcaacagaguguucugcgacaccaugaacagccugacccugcccagcgaggugaaccugugcaacaucgacaucuucaaccccaaguacgacugcaagaucaugaccagcaagaccgacgugagcagcagcgugaucaccagccugggcgccaucgugagcugcuacggcaagaccaagugcaccgccagcaacaagaacagaggcaucaucaagaccuucagcaacggcugcgacuacgugagcaacaagggcguggacaccgugagcgugggcaacacccuguacugcgugaacaagcaggagggccagagccuguacgugaagggcgagcccaucaucaacuucuacgacccccugguguuccccagcgacgaguucgacgccagcaucagccaggugaacgagaagaucaaccagagccuggccuucaucagaaagagcgacgagcugcugcacaacgugaacgugggcaagagcaccaccaacaucaugaucaccaccaucaucaucgugaucaucgugauccugcugcugcugaucgccgugggccuguuccuguacugcaaggccagaagcacccccgugacccugagcaaggaccagcugagcggcaucaacaacaucgccuucagcaacugaggacuaguguccaccugucccuccugggcugcuggauugucucguuuuccugccaaauaaacaggaucagcgcuuuacagaucuaaaaaaaaaaaaaaaaaaaaaaaaaaaaaaaaaaaaaaaaaaaaaaaaaaaaaaaaaaaaaaaaugcaucccccccccccccccccccccccccccccccaaaggcucuuuucagagccaccagaauu

SEQ ID NO: 15020 - RNA, 1994 nt, Artificial Sequence
  mRNA product Design i-1 comprising derived and/or modified sequence from HRSV(Memphis-37)__AIY60640.1__F_DSCav1_mut2 (opt5)
gggagagggcgcuuggcuugcaaggacccugagcugcggcauugaagcacacccaacccaacucgacugaagucagccucacugaaccggaucugagaaucuucucucucugggcuugccagggcucuccgaaccuagcuagcauccucuucaauuccaacuagaaagcuuaccauggagcugcccauccucaagaccaacgccauuacaacgauccuggcugccgugacccuuugcuucgcgagcucccagaauauuacagaagaguuuuaccaaucuaccuguagcgcugucuccaaaggcuaucugggggcccucagaacaggaugguacaccucuguuaucacaauugaacugagcaacaucaaggagaauaaaugcaacggcaccgacgccaaggugaaacuuaucaagcaggaacuggauaaguauaaaaaugcugugacggaccuccagcugcugaugcaguccaccccugccgcugggucuggaagcgccauuuguuccggcaucgcggucugcaaggugcuccaccuggagggggagguuaacaaaauuaagaaugcccuucugagcacaaacaaagcuguggucucucucuccaauggagugagcguucugaccuucaaggugcuugaucugaagaacuacaucgacaaacaacuccugccgauucugaauaagcagucuuguuccauccccaacauugaaacagucaucgaguuucagcagaaaaauaaccggcuccuggaaaucacccgcgaguucagcgugaaugccggcgugacgacaccugucucuaccuauaugcuuacaaacuccgagcugcucagccugauuaacgauaugcccaucaccaaugaccaaaagaaacuuauguccaacaauguucagauugugagacagcagucuuacagcaucaugugcauuaucaaggaagaggugcuggcuuaugucgugcaacucccucuguacggcguuaucgauacccccuguuggaaacugcauacauccccucucugcacgaccaacacaaaggaagggagcaauauuugucugacccggacagaccgcggaugguacugcgauaacgccggcucuguguccuuuuucccgcaggcggagaccuguaagguccagagcaauagaguguuuugcgacacgaugaacucucuuacacugcccagcgaaguuaaucucugcaacaucgauauuuucaauccuaaauaugacuguaagaucaugaccuccaaaaccgaugugucuagcuccgucauuacaagccugggggccaucgugucuugcuacggaaagaccaaauguacagcuuccaacaagaaucggggcaucauuaagacguuuagcaacgggugcgacuaugucucuaauaaaggaguggacaccguuuccgugggcaacacacuuuacugugucaacaagcaagagggccagagccuguaugugaaaggggagcccaucauuaauuucuacgauccucucguuuuucccuccgacgaguucgaugccucuaucagccaggugaacgaaaagauuaaucagucccuggcuuuuauccgcaaaucugacgaacugcuccacaacgucaaugugggaaagagcaccacaaacauuaugaucaccacgaucauuaucgugauuaucguuauucugcuucugcucaucgccgucggccuguuccuguauugcaaggccagauccaccccggugacacuuagcaaagaucaacucucugggaucaauaacauugcuuucuccaauugaggacuaguguccaccugucccuccugggcugcuggauugucucguuuuccugccaaauaaacaggaucagcgcuuuacagaucuaaaaaaaaaaaaaaaaaaaaaaaaaaaaaaaaaaaaaaaaaaaaaaaaaaaaaaaaaaaaaaaaugcaucccccccccccccccccccccccccccccccaaaggcucuuuucagagccaccagaauu

SEQ ID NO: 15021 - RNA, 1994 nt, Artificial Sequence
  mRNA product Design i-1 comprising derived and/or modified sequence from HRSV(Memphis-37)__AIY60640.1__F_DSCav1_mut2 (opt6)
gggagagggcgcuuggcuugcaaggacccugagcugcggcauugaagcacacccaacccaacucgacugaagucagccucacugaaccggaucugagaaucuucucucucugggcuugccagggcucuccgaaccuagcuagcauccucuucaauuccaacuagaaagcuuaccauggagcuuccaauauuaaaaacaaacgcuauaacaacuauacucgcagcaguuacacucugcuucgcauccucacaaaacauaacugaagaauuuuaccaauccacuugcucagccguaucaaaaggauaucuaggagcacuuagaaccggaugguauacaucagugauaacaauagaacuaagcaacauaaaagaaaacaagugcaacggaacugacgcaaaagucaaacuaaucaaacaagaacuagacaaauacaaaaacgcaguaacagaccuacaauuacuaaugcaaucaacaccagcagcaggaucagguucagccauaugcucagguaucgcuguaugcaaaguccuucaccuagaaggugaaguaaacaaaauuaaaaacgcccuacucaguacaaauaaagcugucguaaguuuaucaaacggaguaucaguccuuacauucaaaguauuagaccuaaaaaauuauauagacaaacaauuacuaccaauacucaacaaacaaucaugcucaauaccaaauauagaaaccguaauagaauuucagcaaaaaaauaacagauuacuagaaauaaccagagaauuuucagucaacgcaggagucacaacacccgucucaaccuacaugcuaaccaacucagaacuucuaucucuuaucaacgacaugcccauaaccaaugaucaaaaaaaauuaaugucuaauaacguucaaauaguaagacaacaaucauacucaauaaugugcauaaucaaagaagaaguauuagcauacguaguacaacuaccccuauauggaguaauagacacacccugcuggaaacuacacacauccccccucuguacaacaaacacuaaagaaggaucaaacauuugccuaacaagaacagaccgcggaugguacugcgacaacgcaggcuccguaucuuucuuuccacaagccgaaacuuguaaaguucaaucaaacagaguauuuugcgauacaaugaacuccuuaacauuaccuucagaaguaaaccuaugcaacauagacaucuucaacccaaaauacgacugcaaaauaaugaccucaaaaacagacguauccucaucagucauaaccuccuuaggagcaauaguaucauguuacggaaaaacaaaauguacagcaucaaauaaaaauagaggaauaauaaaaaccuucuccaacggaugcgacuacguauccaauaaaggaguagacaccguaucaguaggaaacacacuauacuguguaaacaaacaagaaggccaaucucuauauguaaaaggcgaaccaaucauaaauuuuuacgacccacuugucuuccccuccgacgaauuugacgcaagcauaucacaaguaaacgaaaaaaucaaccaaagccuagccuucauaaggaaaucugacgaauuacuucauaacguaaauguuggaaaaucaaccacaaacauaaugauaaccaccaucauaauuguaauaauaguaauacuacuacuacuaauugcaguaggacucuuccuauauugcaaagcucgcucaacaccaguuaccuuaucaaaagaccaacuaucuggaauaaacaacauagccuuuuccaacuaaggacuaguguccaccugucccuccugggcugcuggauugucucguuuuccugccaaauaaacaggaucagcgcuuuacagaucuaaaaaaaaaaaaaaaaaaaaaaaaaaaaaaaaaaaaaaaaaaaaaaaaaaaaaaaaaaaaaaaaugcaucccccccccccccccccccccccccccccccaaaggcucuuuucagagccaccagaauu

SEQ ID NO: 15022 - RNA, 1994 nt, Artificial Sequence
  mRNA product Design i-1 comprising derived and/or modified sequence from HRSV(Memphis-37)__AIY60640.1__F_DSCav1_mut2 (opt11)
gggagagggcgcuuggcuugcaaggacccugagcugcggcauugaagcacacccaacccaacucgacugaagucagccucacugaaccggaucugagaaucuucucucucugggcuugccagggcucuccgaaccuagcuagcauccucuucaauuccaacuagaaagcuuaccauggaacucccaauccuaaaaaccaacgccaucaccaccauccucgccgcugucaccuuaugcuuugccagcagccaaaacaucaccgaagaauuuuaccaaucaacaugcuccgccgucucaaaaggauaccucggcgcccuacgcaccggcugguacacaagcgucauaaccaucgagcucuccaacaucaaggaaaacaaaugcaauggaaccgacgccaaagucaaacuaaucaaacaagaacuagacaaguacaagaacgcagucaccgaccuccaacuccucaugcaguccacccccgcagcaggcucuggcucagcaauaugcuccggcaucgcugucugcaaaguccuacaccucgaaggcgaagucaacaaaaucaaaaacgcccuacuguccacaaacaaagccgucgucucccuauccaacggcgucucgguccuaaccuuuaagguucucgaucucaaaaauuacauagacaaacaacuacuccccauccucaacaaacaaucuugcucaauccccaacaucgaaaccgucaucgaguuccaacagaaaaacaacagacuacucgaaaucacccgcgaguucucagucaacgcgggcgucacaacacccgucagcaccuacaugcuaaccaacuccgaacuccucagccucauuaacgacaugcccaucaccaacgaccaaaagaaacuuauguccaacaacguucaaaucguccgccaacaauccuacuccaucaugugcaucaucaaagaagaaguacucgccuacguaguccaacugccccucuacggcgucaucgauaccccaugcuggaaacuacacaccagcccccucugcaccaccaacaccaaagaaggcuccaauaucugcuuaacccgcacagaccguggcugguacugcgauaacgccggcuccgucuccuucuucccccaagcagaaaccugcaaaguacaauccaaccgagucuucugugacaccaugaacucccuaacccuuccaucagaagucaaccucugcaacaucgacaucuucaaccccaaguacgacugcaaaaucaugacauccaaaaccgaugucucaagcagcgucauaaccucacucggcgcuaucguaagcugcuacggcaaaaccaaaugcaccgcaucaaacaaaaaccgcggaaucaucaaaaccuucagcaacggaugcgacuacguuuccaacaaaggcguagacaccgucuccgucggaaacacccucuacugcguaaacaaacaggaaggccaaucccucuacgucaaaggcgaacccaucauaaacuucuacgauccccuugucuucccguccgaugaguucgacgccuccaucucgcaagucaacgaaaagauaaaccaaucacuagcauucauccguaaauccgacgaacuccuccacaacgucaacgucggaaaauccaccaccaacauaaugaucaccaccauaaucaucgucaucaucguaauacuauuacuccucauagccgucggccucuuccuauauugcaaagcccgaucaacccccguaacccuuucuaaagaccaacuguccggaaucaacaacaucgcuuucagcaacugaggacuaguguccaccugucccuccugggcugcuggauugucucguuuuccugccaaauaaacaggaucagcgcuuuacagaucuaaaaaaaaaaaaaaaaaaaaaaaaaaaaaaaaaaaaaaaaaaaaaaaaaaaaaaaaaaaaaaaaugcaucccccccccccccccccccccccccccccccaaaggcucuuuucagagccaccagaauu

SEQ ID NO: 15023 - RNA, 1994 nt, Artificial Sequence
  mRNA product Design i-2 comprising derived and/or modified sequence from HRSV(Memphis-37)__AIY60640.1__F_DSCav1_mut2 (opt1)
gggagaggcgcugccuacggagguggcagccaucuccuucucggcaucaagcuuaccauggagcugcccauccucaagaccaacgccaucaccacgauccuggccgcggugacccugugcuucgccagcucccagaacaucaccgaggaguucuaccagagcacgugcuccgccgucagcaagggcuaccucggcgcccugcgcaccgggugguacaccagcgugaucaccaucgagcuguccaacaucaaggagaacaagugcaacggcaccgacgccaaggugaagcucaucaagcaggagcuggacaaguacaagaacgcggucacggaccugcagcuccugaugcagagcaccccggccgccggcuccgggagcgcgaucugcuccggcaucgccgucugcaaggugcugcaccucgagggcgaggugaacaagaucaagaacgcccugcuguccaccaacaaggccgucgugagccucuccaacggggugagcguccugaccuucaaggugcuggaccucaagaacuacaucgacaagcagcugcugcccauccugaacaagcagagcugcuccauccccaacaucgagaccgucaucgaguuccagcagaagaacaaccgccuccuggagaucacgcgggaguucagcgugaacgcgggcgugaccacccccgucuccaccuacaugcugacgaacagcgagcuccugucccugaucaacgacaugccgaucaccaacgaccagaagaagcucaugagcaacaacgugcagaucgugcgccagcaguccuacagcaucaugugcaucaucaaggaggagguccuggccuacguggugcagcugccccucuacggggucaucgacacccccugcuggaagcugcacaccagcccccugugcacgaccaacaccaaggagggcuccaacaucugccucacccggacggaccgcgggugguacugcgacaacgccggcagcguguccuucuucccgcaggccgagaccugcaagguccagagcaaccggguguucugcgacaccaugaacucccugacccugcccagcgaggugaaccucugcaacaucgacaucuucaaccccaaguacgacugcaagaucaugacguccaagaccgacgucagcuccagcgugaucaccucccugggcgccaucgugagcugcuacgggaagaccaagugcacggcgagcaacaagaaccgcggcaucaucaagaccuucuccaacgggugcgacuacgucagcaacaagggcguggacaccguguccgucggcaacacccuguacugcgugaacaagcaggagggccagagccucuacgugaagggggagcccaucaucaacuucuacgacccgcuggucuuccccuccgacgaguucgacgccagcaucucccaggugaacgagaagaucaaccagagccuggccuucauccggaaguccgacgagcuccugcacaacgugaacgucggcaagagcaccacgaacaucaugaucaccaccaucaucaucgugaucaucgugauccugcugcuccugaucgccgucgggcuguuccucuacugcaaggcccgcuccacccccgugacgcugagcaaggaccagcuguccgggaucaacaacaucgcguucagcaacugaggacuagugcaucacauuuaaaagcaucucagccuaccaugagaauaagagaaagaaaaugaagaucaauagcuuauucaucucuuuuucuuuuucguugguguaaagccaacacccugucuaaaaaacauaaauuucuuuaaucauuuugccucuuuucucugugcuucaauuaauaaaaaauggaaagaaccuagaucuaaaaaaaaaaaaaaaaaaaaaaaaaaaaaaaaaaaaaaaaaaaaaaaaaaaaaaaaaaaaaaaaugcaucccccccccccccccccccccccccccccccaaaggcucuuuucagagccaccagaauu

SEQ ID NO: 15024 - RNA, 1994 nt, Artificial Sequence
  mRNA product Design i-2 comprising derived and/or modified sequence from HRSV(Memphis-37)__AIY60640.1__F_DSCav1_mut2 (opt1)
gggagaggcgcugccuacggagguggcagccaucuccuucucggcaucaagcuuaccauggagcugcccauccucaagaccaacgccaucaccacgauccuggccgcggugacccugugcuucgccagcucccagaacaucaccgaggaguucuaccagagcacgugcuccgccgucagcaagggcuaccucggggcccugcgcaccggcugguacaccuccgugaucaccaucgagcugagcaacaucaaggagaacaagugcaacgggaccgacgccaaggugaagcucaucaagcaggagcuggacaaguacaagaacgcggucacggaccugcagcuccugaugcaguccaccccggccgccggcagcggguccgccaucugcagcggcaucgcggugugcaaggugcugcaccucgagggcgaggucaacaagaucaagaacgcccugcuguccaccaacaaggccguggugagccucuccaacggggucagcgugcugaccuucaaggugcuggaccucaagaacuacaucgacaagcagcugcugcccauccucaacaagcaguccugcagcauccccaacaucgagacggucaucgaguuccagcagaagaacaaccggcugcuggagaucacccgcgaguucuccgugaacgccggcgugaccacccccgucagcacguacaugcucaccaacuccgagcugcugagccucaucaacgacaugccgaucaccaacgaccagaagaagcugaugagcaacaacgugcagaucgugcggcagcaguccuacagcaucaugugcaucaucaaggaggagguccuggccuacguggugcagcucccccuguacggggucaucgacacccccugcuggaagcugcacacgagcccccucugcaccaccaacaccaaggagggcuccaacaucugccugacgcgcaccgaccgggggugguacugcgacaacgcgggcuccgugagcuucuucccgcaggccgagaccugcaaggugcaguccaaccgcgucuucugcgacaccaugaacagccugacgcuccccuccgaggugaaccugugcaacaucgacaucuucaaccccaaguacgacugcaagaucaugaccagcaagaccgacgucuccagcuccgugaucaccagccugggcgccaucguguccugcuacgggaagacgaagugcaccgccagcaacaagaaccggggcaucaucaagaccuucuccaacgggugcgacuacgucagcaacaagggcguggacaccguguccgucggcaacacgcucuacugcgugaacaagcaggaggggcagagccuguacgugaagggcgagcccaucaucaacuucuacgacccgcuggucuuccccagcgacgaguucgacgccuccaucagccaggugaacgagaagaucaaccagucccucgcguucauccgcaagagcgacgagcugcugcacaacgugaacgucgggaaguccaccaccaacaucaugaucaccaccaucaucaucgugaucaucgugauccuccugcugcucaucgccgucggccuguuccuguacugcaaggcccggagcacgcccgugacccuguccaaggaccagcucagcgggaucaacaacaucgccuucuccaacugaggacuagugcaucacauuuaaaagcaucucagccuaccaugagaauaagagaaagaaaaugaagaucaauagcuuauucaucucuuuuucuuuuucguugguguaaagccaacacccugucuaaaaaacauaaauuucuuuaaucauuuugccucuuuucucugugcuucaauuaauaaaaaauggaaagaaccuagaucuaaaaaaaaaaaaaaaaaaaaaaaaaaaaaaaaaaaaaaaaaaaaaaaaaaaaaaaaaaaaaaaaugcaucccccccccccccccccccccccccccccccaaaggcucuuuucagagccaccagaauu

SEQ ID NO: 15025 - RNA, 1994 nt, Artificial Sequence
  mRNA product Design i-2 comprising derived and/or modified sequence from HRSV(Memphis-37)__AIY60640.1__F_DSCav1_mut2 (opt2)
gggagaggcgcugccuacggagguggcagccaucuccuucucggcaucaagcuuaccauggagcuccccauccucaagaccaacgccaucaccaccauccucgccgccgucacccucugcuucgccuccucccagaacaucaccgaggaguucuaccaguccaccugcuccgccgucuccaagggcuaccucggcgcccuccgcaccggcugguacaccuccgucaucaccaucgagcucuccaacaucaaggagaacaagugcaacggcaccgacgccaaggucaagcucaucaagcaggagcucgacaaguacaagaacgccgucaccgaccuccagcuccucaugcaguccacccccgccgccggcuccggcuccgccaucugcuccggcaucgccgucugcaagguccuccaccucgagggcgaggucaacaagaucaagaacgcccuccucuccaccaacaaggccgucgucucccucuccaacggcgucuccguccucaccuucaagguccucgaccucaagaacuacaucgacaagcagcuccuccccauccucaacaagcaguccugcuccauccccaacaucgagaccgucaucgaguuccagcagaagaacaaccgccuccucgagaucacccgcgaguucuccgucaacgccggcgucaccacccccgucuccaccuacaugcucaccaacuccgagcuccucucccucaucaacgacaugcccaucaccaacgaccagaagaagcucauguccaacaacguccagaucguccgccagcaguccuacuccaucaugugcaucaucaaggaggagguccucgccuacgucguccagcucccccucuacggcgucaucgacacccccugcuggaagcuccacaccuccccccucugcaccaccaacaccaaggagggcuccaacaucugccucacccgcaccgaccgcggcugguacugcgacaacgccggcuccgucuccuucuucccccaggccgagaccugcaagguccaguccaaccgcgucuucugcgacaccaugaacucccucacccuccccuccgaggucaaccucugcaacaucgacaucuucaaccccaaguacgacugcaagaucaugaccuccaagaccgacgucuccuccuccgucaucaccucccucggcgccaucgucuccugcuacggcaagaccaagugcaccgccuccaacaagaaccgcggcaucaucaagaccuucuccaacggcugcgacuacgucuccaacaagggcgucgacaccgucuccgucggcaacacccucuacugcgucaacaagcaggagggccagucccucuacgucaagggcgagcccaucaucaacuucuacgacccccucgucuuccccuccgacgaguucgacgccuccaucucccaggucaacgagaagaucaaccagucccucgccuucauccgcaaguccgacgagcuccuccacaacgucaacgucggcaaguccaccaccaacaucaugaucaccaccaucaucaucgucaucaucgucauccuccuccuccucaucgccgucggccucuuccucuacugcaaggcccgcuccacccccgucacccucuccaaggaccagcucuccggcaucaacaacaucgccuucuccaacugaggacuagugcaucacauuuaaaagcaucucagccuaccaugagaauaagagaaagaaaaugaagaucaauagcuuauucaucucuuuuucuuuuucguugguguaaagccaacacccugucuaaaaaacauaaauuucuuuaaucauuuugccucuuuucucugugcuucaauuaauaaaaaauggaaagaaccuagaucuaaaaaaaaaaaaaaaaaaaaaaaaaaaaaaaaaaaaaaaaaaaaaaaaaaaaaaaaaaaaaaaaugcaucccccccccccccccccccccccccccccccaaaggcucuuuucagagccaccagaauu

SEQ ID NO: 15026 - RNA, 1994 nt, Artificial Sequence
  mRNA product Design i-2 comprising derived and/or modified sequence from HRSV(Memphis-37)__AIY60640.1__F_DSCav1_mut2 (opt3)
gggagaggcgcugccuacggagguggcagccaucuccuucucggcaucaagcuuaccauggagcugcccauccucaagaccaacgccauuacaacuauacuugcugcagugacgcugugcuucgccagcucccagaauaucaccgaagaguuuuaccaaucuacauguucagcggucaguaaaggcuauuugggggcuuuaagaacuggaugguacaccagcguuauuacaaucgaacuguccaacauuaaggagaauaaaugcaacgguaccgacgccaaggugaaacuaaucaagcaggaacucgauaaguauaaaaaugcaguaacugaccugcagcuucugaugcagucuacuccugccgcuggcucggggucagcaauauguagcggaaucgccgugugcaaggucuugcaccucgagggcgaggugaacaaaauuaagaaugcucugcugaguaccaacaaagccguugugucccucucuaauggugucagcguguuaacguucaagguacuggaucuuaagaacuacaucgacaaacaauugcugccaauucuaaauaagcaguccuguucaaucccgaacauagaaacuguuauugaguuucagcagaaaaauaacaggcuccuggaaaucacccgggaguucagugugaaugcgggggucacaacucccgugagcaccuauaugcuuacaaacucugagcuguugucccucauuaacgauaugccuaucaccaaugaccaaaagaaacugaugucaaacaaugugcagaucguccgccagcagagcuacaguauuaugugcauaaucaaggaagagguuuuagcauaugugguacaacugccacucuacggagugauugauacgcccuguuggaaacuucauacuucuccucugugcacaaccaacacuaaggaaggcuccaauaucuguuugacacgaaccgaccguggcugguacugcgauaacgccgggagcgucucguuuuucccacaggcugagacguguaaggugcagucuaauagaguuuucugcgacaccaugaacucccuaacacugcccucagaagugaaucucugcaacauagauauuuucaauccuaaauaugacuguaagaucaugacaaguaaaaccgaugucagcuccucugugaucacaagccugggagccauuguaucaugcuacgguaagacuaaauguaccgcaaguaacaagaauaggggcaucauuaagacauuuuccaacgggugcgacuauguuagcaauaaaggaguggacaccgucucugugggcaacacucuuuacugugucaacaagcaagagggucagucacuguaugugaaaggggagccaauaaucaauuucuacgauccguugguuuuucccagugacgaauuugaugcuagcauuucccaggugaacgagaagaucaaucagucucucgccuuuauccggaaaucggacgaacuguuacacaacguaaaugucggaaagagcacgacaaacauuaugauaaccacuaucauuaucgugauuaucguuauacugcuacuccugaucgcggugggccuuuucuuguauugcaaggcccgcuccaccccugucacacugucaaaagaucaacucaguggcauuaauaacaucgcauucucuaauugaggacuagugcaucacauuuaaaagcaucucagccuaccaugagaauaagagaaagaaaaugaagaucaauagcuuauucaucucuuuuucuuuuucguugguguaaagccaacacccugucuaaaaaacauaaauuucuuuaaucauuuugccucuuuucucugugcuucaauuaauaaaaaauggaaagaaccuagaucuaaaaaaaaaaaaaaaaaaaaaaaaaaaaaaaaaaaaaaaaaaaaaaaaaaaaaaaaaaaaaaaaugcaucccccccccccccccccccccccccccccccaaaggcucuuuucagagccaccagaauu

SEQ ID NO: 15027 - RNA, 1994 nt, Artificial Sequence
  mRNA product Design i-2 comprising derived and/or modified sequence from HRSV(Memphis-37)__AIY60640.1__F_DSCav1_mut2 (opt4)
gggagaggcgcugccuacggagguggcagccaucuccuucucggcaucaagcuuaccauggagcugcccauccugaagaccaacgccaucaccaccauccuggccgccgugacccugugcuucgccagcagccagaacaucaccgaggaguucuaccagagcaccugcagcgccgugagcaagggcuaccugggcgcccugagaaccggcugguacaccagcgugaucaccaucgagcugagcaacaucaaggagaacaagugcaacggcaccgacgccaaggugaagcugaucaagcaggagcuggacaaguacaagaacgccgugaccgaccugcagcugcugaugcagagcacccccgccgccggcagcggcagcgccaucugcagcggcaucgccgugugcaaggugcugcaccuggagggcgaggugaacaagaucaagaacgcccugcugagcaccaacaaggccguggugagccugagcaacggcgugagcgugcugaccuucaaggugcuggaccugaagaacuacaucgacaagcagcugcugcccauccugaacaagcagagcugcagcauccccaacaucgagaccgugaucgaguuccagcagaagaacaacagacugcuggagaucaccagagaguucagcgugaacgccggcgugaccacccccgugagcaccuacaugcugaccaacagcgagcugcugagccugaucaacgacaugcccaucaccaacgaccagaagaagcugaugagcaacaacgugcagaucgugagacagcagagcuacagcaucaugugcaucaucaaggaggaggugcuggccuacguggugcagcugccccuguacggcgugaucgacacccccugcuggaagcugcacaccagcccccugugcaccaccaacaccaaggagggcagcaacaucugccugaccagaaccgacagaggcugguacugcgacaacgccggcagcgugagcuucuucccccaggccgagaccugcaaggugcagagcaacagaguguucugcgacaccaugaacagccugacccugcccagcgaggugaaccugugcaacaucgacaucuucaaccccaaguacgacugcaagaucaugaccagcaagaccgacgugagcagcagcgugaucaccagccugggcgccaucgugagcugcuacggcaagaccaagugcaccgccagcaacaagaacagaggcaucaucaagaccuucagcaacggcugcgacuacgugagcaacaagggcguggacaccgugagcgugggcaacacccuguacugcgugaacaagcaggagggccagagccuguacgugaagggcgagcccaucaucaacuucuacgacccccugguguuccccagcgacgaguucgacgccagcaucagccaggugaacgagaagaucaaccagagccuggccuucaucagaaagagcgacgagcugcugcacaacgugaacgugggcaagagcaccaccaacaucaugaucaccaccaucaucaucgugaucaucgugauccugcugcugcugaucgccgugggccuguuccuguacugcaaggccagaagcacccccgugacccugagcaaggaccagcugagcggcaucaacaacaucgccuucagcaacugaggacuagugcaucacauuuaaaagcaucucagccuaccaugagaauaagagaaagaaaaugaagaucaauagcuuauucaucucuuuuucuuuuucguugguguaaagccaacacccugucuaaaaaacauaaauuucuuuaaucauuuugccucuuuucucugugcuucaauuaauaaaaaauggaaagaaccuagaucuaaaaaaaaaaaaaaaaaaaaaaaaaaaaaaaaaaaaaaaaaaaaaaaaaaaaaaaaaaaaaaaaugcaucccccccccccccccccccccccccccccccaaaggcucuuuucagagccaccagaauu

SEQ ID NO: 15028 - RNA, 1994 nt, Artificial Sequence
  mRNA product Design i-2 comprising derived and/or modified sequence from HRSV(Memphis-37)__AIY60640.1__F_DSCav1_mut2 (opt5)
gggagaggcgcugccuacggagguggcagccaucuccuucucggcaucaagcuuaccauggagcugcccauccucaagaccaacgccauuacaacgauccuggcugccgugacccuuugcuucgcgagcucccagaauauuacagaagaguuuuaccaaucuaccuguagcgcugucuccaaaggcuaucugggggcccucagaacaggaugguacaccucuguuaucacaauugaacugagcaacaucaaggagaauaaaugcaacggcaccgacgccaaggugaaacuuaucaagcaggaacuggauaaguauaaaaaugcugugacggaccuccagcugcugaugcaguccaccccugccgcugggucuggaagcgccauuuguuccggcaucgcggucugcaaggugcuccaccuggagggggagguuaacaaaauuaagaaugcccuucugagcacaaacaaagcuguggucucucucuccaauggagugagcguucugaccuucaaggugcuugaucugaagaacuacaucgacaaacaacuccugccgauucugaauaagcagucuuguuccauccccaacauugaaacagucaucgaguuucagcagaaaaauaaccggcuccuggaaaucacccgcgaguucagcgugaaugccggcgugacgacaccugucucuaccuauaugcuuacaaacuccgagcugcucagccugauuaacgauaugcccaucaccaaugaccaaaagaaacuuauguccaacaauguucagauugugagacagcagucuuacagcaucaugugcauuaucaaggaagaggugcuggcuuaugucgugcaacucccucuguacggcguuaucgauacccccuguuggaaacugcauacauccccucucugcacgaccaacacaaaggaagggagcaauauuugucugacccggacagaccgcggaugguacugcgauaacgccggcucuguguccuuuuucccgcaggcggagaccuguaagguccagagcaauagaguguuuugcgacacgaugaacucucuuacacugcccagcgaaguuaaucucugcaacaucgauauuuucaauccuaaauaugacuguaagaucaugaccuccaaaaccgaugugucuagcuccgucauuacaagccugggggccaucgugucuugcuacggaaagaccaaauguacagcuuccaacaagaaucggggcaucauuaagacguuuagcaacgggugcgacuaugucucuaauaaaggaguggacaccguuuccgugggcaacacacuuuacugugucaacaagcaagagggccagagccuguaugugaaaggggagcccaucauuaauuucuacgauccucucguuuuucccuccgacgaguucgaugccucuaucagccaggugaacgaaaagauuaaucagucccuggcuuuuauccgcaaaucugacgaacugcuccacaacgucaaugugggaaagagcaccacaaacauuaugaucaccacgaucauuaucgugauuaucguuauucugcuucugcucaucgccgucggccuguuccuguauugcaaggccagauccaccccggugacacuuagcaaagaucaacucucugggaucaauaacauugcuuucuccaauugaggacuagugcaucacauuuaaaagcaucucagccuaccaugagaauaagagaaagaaaaugaagaucaauagcuuauucaucucuuuuucuuuuucguugguguaaagccaacacccugucuaaaaaacauaaauuucuuuaaucauuuugccucuuuucucugugcuucaauuaauaaaaaauggaaagaaccuagaucuaaaaaaaaaaaaaaaaaaaaaaaaaaaaaaaaaaaaaaaaaaaaaaaaaaaaaaaaaaaaaaaaugcaucccccccccccccccccccccccccccccccaaaggcucuuuucagagccaccagaauu

SEQ ID NO: 15029 - RNA, 1994 nt, Artificial Sequence
  mRNA product Design i-2 comprising derived and/or modified sequence from HRSV(Memphis-37)__AIY60640.1__F_DSCav1_mut2 (opt6)
gggagaggcgcugccuacggagguggcagccaucuccuucucggcaucaagcuuaccauggagcuuccaauauuaaaaacaaacgcuauaacaacuauacucgcagcaguuacacucugcuucgcauccucacaaaacauaacugaagaauuuuaccaauccacuugcucagccguaucaaaaggauaucuaggagcacuuagaaccggaugguauacaucagugauaacaauagaacuaagcaacauaaaagaaaacaagugcaacggaacugacgcaaaagucaaacuaaucaaacaagaacuagacaaauacaaaaacgcaguaacagaccuacaauuacuaaugcaaucaacaccagcagcaggaucagguucagccauaugcucagguaucgcuguaugcaaaguccuucaccuagaaggugaaguaaacaaaauuaaaaacgcccuacucaguacaaauaaagcugucguaaguuuaucaaacggaguaucaguccuuacauucaaaguauuagaccuaaaaaauuauauagacaaacaauuacuaccaauacucaacaaacaaucaugcucaauaccaaauauagaaaccguaauagaauuucagcaaaaaaauaacagauuacuagaaauaaccagagaauuuucagucaacgcaggagucacaacacccgucucaaccuacaugcuaaccaacucagaacuucuaucucuuaucaacgacaugcccauaaccaaugaucaaaaaaaauuaaugucuaauaacguucaaauaguaagacaacaaucauacucaauaaugugcauaaucaaagaagaaguauuagcauacguaguacaacuaccccuauauggaguaauagacacacccugcuggaaacuacacacauccccccucuguacaacaaacacuaaagaaggaucaaacauuugccuaacaagaacagaccgcggaugguacugcgacaacgcaggcuccguaucuuucuuuccacaagccgaaacuuguaaaguucaaucaaacagaguauuuugcgauacaaugaacuccuuaacauuaccuucagaaguaaaccuaugcaacauagacaucuucaacccaaaauacgacugcaaaauaaugaccucaaaaacagacguauccucaucagucauaaccuccuuaggagcaauaguaucauguuacggaaaaacaaaauguacagcaucaaauaaaaauagaggaauaauaaaaaccuucuccaacggaugcgacuacguauccaauaaaggaguagacaccguaucaguaggaaacacacuauacuguguaaacaaacaagaaggccaaucucuauauguaaaaggcgaaccaaucauaaauuuuuacgacccacuugucuuccccuccgacgaauuugacgcaagcauaucacaaguaaacgaaaaaaucaaccaaagccuagccuucauaaggaaaucugacgaauuacuucauaacguaaauguuggaaaaucaaccacaaacauaaugauaaccaccaucauaauuguaauaauaguaauacuacuacuacuaauugcaguaggacucuuccuauauugcaaagcucgcucaacaccaguuaccuuaucaaaagaccaacuaucuggaauaaacaacauagccuuuuccaacuaaggacuagugcaucacauuuaaaagcaucucagccuaccaugagaauaagagaaagaaaaugaagaucaauagcuuauucaucucuuuuucuuuuucguugguguaaagccaacacccugucuaaaaaacauaaauuucuuuaaucauuuugccucuuuucucugugcuucaauuaauaaaaaauggaaagaaccuagaucuaaaaaaaaaaaaaaaaaaaaaaaaaaaaaaaaaaaaaaaaaaaaaaaaaaaaaaaaaaaaaaaaugcaucccccccccccccccccccccccccccccccaaaggcucuuuucagagccaccagaauu

SEQ ID NO: 15030 - RNA, 1994 nt, Artificial Sequence
  mRNA product Design i-2 comprising derived and/or modified sequence from HRSV(Memphis-37)__AIY60640.1__F_DSCav1_mut2 (opt11)
gggagaggcgcugccuacggagguggcagccaucuccuucucggcaucaagcuuaccauggaacucccaauccuaaaaaccaacgccaucaccaccauccucgccgcugucaccuuaugcuuugccagcagccaaaacaucaccgaagaauuuuaccaaucaacaugcuccgccgucucaaaaggauaccucggcgcccuacgcaccggcugguacacaagcgucauaaccaucgagcucuccaacaucaaggaaaacaaaugcaauggaaccgacgccaaagucaaacuaaucaaacaagaacuagacaaguacaagaacgcagucaccgaccuccaacuccucaugcaguccacccccgcagcaggcucuggcucagcaauaugcuccggcaucgcugucugcaaaguccuacaccucgaaggcgaagucaacaaaaucaaaaacgcccuacuguccacaaacaaagccgucgucucccuauccaacggcgucucgguccuaaccuuuaagguucucgaucucaaaaauuacauagacaaacaacuacuccccauccucaacaaacaaucuugcucaauccccaacaucgaaaccgucaucgaguuccaacagaaaaacaacagacuacucgaaaucacccgcgaguucucagucaacgcgggcgucacaacacccgucagcaccuacaugcuaaccaacuccgaacuccucagccucauuaacgacaugcccaucaccaacgaccaaaagaaacuuauguccaacaacguucaaaucguccgccaacaauccuacuccaucaugugcaucaucaaagaagaaguacucgccuacguaguccaacugccccucuacggcgucaucgauaccccaugcuggaaacuacacaccagcccccucugcaccaccaacaccaaagaaggcuccaauaucugcuuaacccgcacagaccguggcugguacugcgauaacgccggcuccgucuccuucuucccccaagcagaaaccugcaaaguacaauccaaccgagucuucugugacaccaugaacucccuaacccuuccaucagaagucaaccucugcaacaucgacaucuucaaccccaaguacgacugcaaaaucaugacauccaaaaccgaugucucaagcagcgucauaaccucacucggcgcuaucguaagcugcuacggcaaaaccaaaugcaccgcaucaaacaaaaaccgcggaaucaucaaaaccuucagcaacggaugcgacuacguuuccaacaaaggcguagacaccgucuccgucggaaacacccucuacugcguaaacaaacaggaaggccaaucccucuacgucaaaggcgaacccaucauaaacuucuacgauccccuugucuucccguccgaugaguucgacgccuccaucucgcaagucaacgaaaagauaaaccaaucacuagcauucauccguaaauccgacgaacuccuccacaacgucaacgucggaaaauccaccaccaacauaaugaucaccaccauaaucaucgucaucaucguaauacuauuacuccucauagccgucggccucuuccuauauugcaaagcccgaucaacccccguaacccuuucuaaagaccaacuguccggaaucaacaacaucgcuuucagcaacugaggacuagugcaucacauuuaaaagcaucucagccuaccaugagaauaagagaaagaaaaugaagaucaauagcuuauucaucucuuuuucuuuuucguugguguaaagccaacacccugucuaaaaaacauaaauuucuuuaaucauuuugccucuuuucucugugcuucaauuaauaaaaaauggaaagaaccuagaucuaaaaaaaaaaaaaaaaaaaaaaaaaaaaaaaaaaaaaaaaaaaaaaaaaaaaaaaaaaaaaaaaugcaucccccccccccccccccccccccccccccccaaaggcucuuuucagagccaccagaauu

SEQ ID NO: 15031 - RNA, 1990 nt, Artificial Sequence
  mRNA product Design i-2 comprising derived and/or modified sequence from HRSV(Memphis-37)__AIY60640.1__F_DSCav1_mut2 (opt1)
ggggcgcugccuacggagguggcagccaucuccuucucggcaucaagcuuaccauggagcugcccauccucaagaccaacgccaucaccacgauccuggccgcggugacccugugcuucgccagcucccagaacaucaccgaggaguucuaccagagcacgugcuccgccgucagcaagggcuaccucggcgcccugcgcaccgggugguacaccagcgugaucaccaucgagcuguccaacaucaaggagaacaagugcaacggcaccgacgccaaggugaagcucaucaagcaggagcuggacaaguacaagaacgcggucacggaccugcagcuccugaugcagagcaccccggccgccggcuccgggagcgcgaucugcuccggcaucgccgucugcaaggugcugcaccucgagggcgaggugaacaagaucaagaacgcccugcuguccaccaacaaggccgucgugagccucuccaacggggugagcguccugaccuucaaggugcuggaccucaagaacuacaucgacaagcagcugcugcccauccugaacaagcagagcugcuccauccccaacaucgagaccgucaucgaguuccagcagaagaacaaccgccuccuggagaucacgcgggaguucagcgugaacgcgggcgugaccacccccgucuccaccuacaugcugacgaacagcgagcuccugucccugaucaacgacaugccgaucaccaacgaccagaagaagcucaugagcaacaacgugcagaucgugcgccagcaguccuacagcaucaugugcaucaucaaggaggagguccuggccuacguggugcagcugccccucuacggggucaucgacacccccugcuggaagcugcacaccagcccccugugcacgaccaacaccaaggagggcuccaacaucugccucacccggacggaccgcgggugguacugcgacaacgccggcagcguguccuucuucccgcaggccgagaccugcaagguccagagcaaccggguguucugcgacaccaugaacucccugacccugcccagcgaggugaaccucugcaacaucgacaucuucaaccccaaguacgacugcaagaucaugacguccaagaccgacgucagcuccagcgugaucaccucccugggcgccaucgugagcugcuacgggaagaccaagugcacggcgagcaacaagaaccgcggcaucaucaagaccuucuccaacgggugcgacuacgucagcaacaagggcguggacaccguguccgucggcaacacccuguacugcgugaacaagcaggagggccagagccucuacgugaagggggagcccaucaucaacuucuacgacccgcuggucuuccccuccgacgaguucgacgccagcaucucccaggugaacgagaagaucaaccagagccuggccuucauccggaaguccgacgagcuccugcacaacgugaacgucggcaagagcaccacgaacaucaugaucaccaccaucaucaucgugaucaucgugauccugcugcuccugaucgccgucgggcuguuccucuacugcaaggcccgcuccacccccgugacgcugagcaaggaccagcuguccgggaucaacaacaucgcguucagcaacugaggacuagugcaucacauuuaaaagcaucucagccuaccaugagaauaagagaaagaaaaugaagaucaauagcuuauucaucucuuuuucuuuuucguugguguaaagccaacacccugucuaaaaaacauaaauuucuuuaaucauuuugccucuuuucucugugcuucaauuaauaaaaaauggaaagaaccuagaucuaaaaaaaaaaaaaaaaaaaaaaaaaaaaaaaaaaaaaaaaaaaaaaaaaaaaaaaaaaaaaaaaugcaucccccccccccccccccccccccccccccccaaaggcucuuuucagagccaccagaauu

SEQ ID NO: 15032 - RNA, 1990 nt, Artificial Sequence
  mRNA product Design i-2 comprising derived and/or modified sequence from HRSV(Memphis-37)__AIY60640.1__F_DSCav1_mut2 (opt1)
ggggcgcugccuacggagguggcagccaucuccuucucggcaucaagcuuaccauggagcugcccauccucaagaccaacgccaucaccacgauccuggccgcggugacccugugcuucgccagcucccagaacaucaccgaggaguucuaccagagcacgugcuccgccgucagcaagggcuaccucggggcccugcgcaccggcugguacaccuccgugaucaccaucgagcugagcaacaucaaggagaacaagugcaacgggaccgacgccaaggugaagcucaucaagcaggagcuggacaaguacaagaacgcggucacggaccugcagcuccugaugcaguccaccccggccgccggcagcggguccgccaucugcagcggcaucgcggugugcaaggugcugcaccucgagggcgaggucaacaagaucaagaacgcccugcuguccaccaacaaggccguggugagccucuccaacggggucagcgugcugaccuucaaggugcuggaccucaagaacuacaucgacaagcagcugcugcccauccucaacaagcaguccugcagcauccccaacaucgagacggucaucgaguuccagcagaagaacaaccggcugcuggagaucacccgcgaguucuccgugaacgccggcgugaccacccccgucagcacguacaugcucaccaacuccgagcugcugagccucaucaacgacaugccgaucaccaacgaccagaagaagcugaugagcaacaacgugcagaucgugcggcagcaguccuacagcaucaugugcaucaucaaggaggagguccuggccuacguggugcagcucccccuguacggggucaucgacacccccugcuggaagcugcacacgagcccccucugcaccaccaacaccaaggagggcuccaacaucugccugacgcgcaccgaccgggggugguacugcgacaacgcgggcuccgugagcuucuucccgcaggccgagaccugcaaggugcaguccaaccgcgucuucugcgacaccaugaacagccugacgcuccccuccgaggugaaccugugcaacaucgacaucuucaaccccaaguacgacugcaagaucaugaccagcaagaccgacgucuccagcuccgugaucaccagccugggcgccaucguguccugcuacgggaagacgaagugcaccgccagcaacaagaaccggggcaucaucaagaccuucuccaacgggugcgacuacgucagcaacaagggcguggacaccguguccgucggcaacacgcucuacugcgugaacaagcaggaggggcagagccuguacgugaagggcgagcccaucaucaacuucuacgacccgcuggucuuccccagcgacgaguucgacgccuccaucagccaggugaacgagaagaucaaccagucccucgcguucauccgcaagagcgacgagcugcugcacaacgugaacgucgggaaguccaccaccaacaucaugaucaccaccaucaucaucgugaucaucgugauccuccugcugcucaucgccgucggccuguuccuguacugcaaggcccggagcacgcccgugacccuguccaaggaccagcucagcgggaucaacaacaucgccuucuccaacugaggacuagugcaucacauuuaaaagcaucucagccuaccaugagaauaagagaaagaaaaugaagaucaauagcuuauucaucucuuuuucuuuuucguugguguaaagccaacacccugucuaaaaaacauaaauuucuuuaaucauuuugccucuuuucucugugcuucaauuaauaaaaaauggaaagaaccuagaucuaaaaaaaaaaaaaaaaaaaaaaaaaaaaaaaaaaaaaaaaaaaaaaaaaaaaaaaaaaaaaaaaugcaucccccccccccccccccccccccccccccccaaaggcucuuuucagagccaccagaauu

SEQ ID NO: 15033 - RNA, 1990 nt, Artificial Sequence
  mRNA product Design i-2 comprising derived and/or modified sequence from HRSV(Memphis-37)__AIY60640.1__F_DSCav1_mut2 (opt2)
ggggcgcugccuacggagguggcagccaucuccuucucggcaucaagcuuaccauggagcuccccauccucaagaccaacgccaucaccaccauccucgccgccgucacccucugcuucgccuccucccagaacaucaccgaggaguucuaccaguccaccugcuccgccgucuccaagggcuaccucggcgcccuccgcaccggcugguacaccuccgucaucaccaucgagcucuccaacaucaaggagaacaagugcaacggcaccgacgccaaggucaagcucaucaagcaggagcucgacaaguacaagaacgccgucaccgaccuccagcuccucaugcaguccacccccgccgccggcuccggcuccgccaucugcuccggcaucgccgucugcaagguccuccaccucgagggcgaggucaacaagaucaagaacgcccuccucuccaccaacaaggccgucgucucccucuccaacggcgucuccguccucaccuucaagguccucgaccucaagaacuacaucgacaagcagcuccuccccauccucaacaagcaguccugcuccauccccaacaucgagaccgucaucgaguuccagcagaagaacaaccgccuccucgagaucacccgcgaguucuccgucaacgccggcgucaccacccccgucuccaccuacaugcucaccaacuccgagcuccucucccucaucaacgacaugcccaucaccaacgaccagaagaagcucauguccaacaacguccagaucguccgccagcaguccuacuccaucaugugcaucaucaaggaggagguccucgccuacgucguccagcucccccucuacggcgucaucgacacccccugcuggaagcuccacaccuccccccucugcaccaccaacaccaaggagggcuccaacaucugccucacccgcaccgaccgcggcugguacugcgacaacgccggcuccgucuccuucuucccccaggccgagaccugcaagguccaguccaaccgcgucuucugcgacaccaugaacucccucacccuccccuccgaggucaaccucugcaacaucgacaucuucaaccccaaguacgacugcaagaucaugaccuccaagaccgacgucuccuccuccgucaucaccucccucggcgccaucgucuccugcuacggcaagaccaagugcaccgccuccaacaagaaccgcggcaucaucaagaccuucuccaacggcugcgacuacgucuccaacaagggcgucgacaccgucuccgucggcaacacccucuacugcgucaacaagcaggagggccagucccucuacgucaagggcgagcccaucaucaacuucuacgacccccucgucuuccccuccgacgaguucgacgccuccaucucccaggucaacgagaagaucaaccagucccucgccuucauccgcaaguccgacgagcuccuccacaacgucaacgucggcaaguccaccaccaacaucaugaucaccaccaucaucaucgucaucaucgucauccuccuccuccucaucgccgucggccucuuccucuacugcaaggcccgcuccacccccgucacccucuccaaggaccagcucuccggcaucaacaacaucgccuucuccaacugaggacuagugcaucacauuuaaaagcaucucagccuaccaugagaauaagagaaagaaaaugaagaucaauagcuuauucaucucuuuuucuuuuucguugguguaaagccaacacccugucuaaaaaacauaaauuucuuuaaucauuuugccucuuuucucugugcuucaauuaauaaaaaauggaaagaaccuagaucuaaaaaaaaaaaaaaaaaaaaaaaaaaaaaaaaaaaaaaaaaaaaaaaaaaaaaaaaaaaaaaaaugcaucccccccccccccccccccccccccccccccaaaggcucuuuucagagccaccagaauu

SEQ ID NO: 15034 - RNA, 1990 nt, Artificial Sequence
  mRNA product Design i-2 comprising derived and/or modified sequence from HRSV(Memphis-37)__AIY60640.1__F_DSCav1_mut2 (opt3)
ggggcgcugccuacggagguggcagccaucuccuucucggcaucaagcuuaccauggagcugcccauccucaagaccaacgccauuacaacuauacuugcugcagugacgcugugcuucgccagcucccagaauaucaccgaagaguuuuaccaaucuacauguucagcggucaguaaaggcuauuugggggcuuuaagaacuggaugguacaccagcguuauuacaaucgaacuguccaacauuaaggagaauaaaugcaacgguaccgacgccaaggugaaacuaaucaagcaggaacucgauaaguauaaaaaugcaguaacugaccugcagcuucugaugcagucuacuccugccgcuggcucggggucagcaauauguagcggaaucgccgugugcaaggucuugcaccucgagggcgaggugaacaaaauuaagaaugcucugcugaguaccaacaaagccguugugucccucucuaauggugucagcguguuaacguucaagguacuggaucuuaagaacuacaucgacaaacaauugcugccaauucuaaauaagcaguccuguucaaucccgaacauagaaacuguuauugaguuucagcagaaaaauaacaggcuccuggaaaucacccgggaguucagugugaaugcgggggucacaacucccgugagcaccuauaugcuuacaaacucugagcuguugucccucauuaacgauaugccuaucaccaaugaccaaaagaaacugaugucaaacaaugugcagaucguccgccagcagagcuacaguauuaugugcauaaucaaggaagagguuuuagcauaugugguacaacugccacucuacggagugauugauacgcccuguuggaaacuucauacuucuccucugugcacaaccaacacuaaggaaggcuccaauaucuguuugacacgaaccgaccguggcugguacugcgauaacgccgggagcgucucguuuuucccacaggcugagacguguaaggugcagucuaauagaguuuucugcgacaccaugaacucccuaacacugcccucagaagugaaucucugcaacauagauauuuucaauccuaaauaugacuguaagaucaugacaaguaaaaccgaugucagcuccucugugaucacaagccugggagccauuguaucaugcuacgguaagacuaaauguaccgcaaguaacaagaauaggggcaucauuaagacauuuuccaacgggugcgacuauguuagcaauaaaggaguggacaccgucucugugggcaacacucuuuacugugucaacaagcaagagggucagucacuguaugugaaaggggagccaauaaucaauuucuacgauccguugguuuuucccagugacgaauuugaugcuagcauuucccaggugaacgagaagaucaaucagucucucgccuuuauccggaaaucggacgaacuguuacacaacguaaaugucggaaagagcacgacaaacauuaugauaaccacuaucauuaucgugauuaucguuauacugcuacuccugaucgcggugggccuuuucuuguauugcaaggcccgcuccaccccugucacacugucaaaagaucaacucaguggcauuaauaacaucgcauucucuaauugaggacuagugcaucacauuuaaaagcaucucagccuaccaugagaauaagagaaagaaaaugaagaucaauagcuuauucaucucuuuuucuuuuucguugguguaaagccaacacccugucuaaaaaacauaaauuucuuuaaucauuuugccucuuuucucugugcuucaauuaauaaaaaauggaaagaaccuagaucuaaaaaaaaaaaaaaaaaaaaaaaaaaaaaaaaaaaaaaaaaaaaaaaaaaaaaaaaaaaaaaaaugcaucccccccccccccccccccccccccccccccaaaggcucuuuucagagccaccagaauu

SEQ ID NO: 15035 - RNA, 1990 nt, Artificial Sequence
  mRNA product Design i-2 comprising derived and/or modified sequence from HRSV(Memphis-37)__AIY60640.1__F_DSCav1_mut2 (opt4)
ggggcgcugccuacggagguggcagccaucuccuucucggcaucaagcuuaccauggagcugcccauccugaagaccaacgccaucaccaccauccuggccgccgugacccugugcuucgccagcagccagaacaucaccgaggaguucuaccagagcaccugcagcgccgugagcaagggcuaccugggcgcccugagaaccggcugguacaccagcgugaucaccaucgagcugagcaacaucaaggagaacaagugcaacggcaccgacgccaaggugaagcugaucaagcaggagcuggacaaguacaagaacgccgugaccgaccugcagcugcugaugcagagcacccccgccgccggcagcggcagcgccaucugcagcggcaucgccgugugcaaggugcugcaccuggagggcgaggugaacaagaucaagaacgcccugcugagcaccaacaaggccguggugagccugagcaacggcgugagcgugcugaccuucaaggugcuggaccugaagaacuacaucgacaagcagcugcugcccauccugaacaagcagagcugcagcauccccaacaucgagaccgugaucgaguuccagcagaagaacaacagacugcuggagaucaccagagaguucagcgugaacgccggcgugaccacccccgugagcaccuacaugcugaccaacagcgagcugcugagccugaucaacgacaugcccaucaccaacgaccagaagaagcugaugagcaacaacgugcagaucgugagacagcagagcuacagcaucaugugcaucaucaaggaggaggugcuggccuacguggugcagcugccccuguacggcgugaucgacacccccugcuggaagcugcacaccagcccccugugcaccaccaacaccaaggagggcagcaacaucugccugaccagaaccgacagaggcugguacugcgacaacgccggcagcgugagcuucuucccccaggccgagaccugcaaggugcagagcaacagaguguucugcgacaccaugaacagccugacccugcccagcgaggugaaccugugcaacaucgacaucuucaaccccaaguacgacugcaagaucaugaccagcaagaccgacgugagcagcagcgugaucaccagccugggcgccaucgugagcugcuacggcaagaccaagugcaccgccagcaacaagaacagaggcaucaucaagaccuucagcaacggcugcgacuacgugagcaacaagggcguggacaccgugagcgugggcaacacccuguacugcgugaacaagcaggagggccagagccuguacgugaagggcgagcccaucaucaacuucuacgacccccugguguuccccagcgacgaguucgacgccagcaucagccaggugaacgagaagaucaaccagagccuggccuucaucagaaagagcgacgagcugcugcacaacgugaacgugggcaagagcaccaccaacaucaugaucaccaccaucaucaucgugaucaucgugauccugcugcugcugaucgccgugggccuguuccuguacugcaaggccagaagcacccccgugacccugagcaaggaccagcugagcggcaucaacaacaucgccuucagcaacugaggacuagugcaucacauuuaaaagcaucucagccuaccaugagaauaagagaaagaaaaugaagaucaauagcuuauucaucucuuuuucuuuuucguugguguaaagccaacacccugucuaaaaaacauaaauuucuuuaaucauuuugccucuuuucucugugcuucaauuaauaaaaaauggaaagaaccuagaucuaaaaaaaaaaaaaaaaaaaaaaaaaaaaaaaaaaaaaaaaaaaaaaaaaaaaaaaaaaaaaaaaugcaucccccccccccccccccccccccccccccccaaaggcucuuuucagagccaccagaauu

SEQ ID NO: 15036 - RNA, 1990 nt, Artificial Sequence
  mRNA product Design i-2 comprising derived and/or modified sequence from HRSV(Memphis-37)__AIY60640.1__F_DSCav1_mut2 (opt5)
ggggcgcugccuacggagguggcagccaucuccuucucggcaucaagcuuaccauggagcugcccauccucaagaccaacgccauuacaacgauccuggcugccgugacccuuugcuucgcgagcucccagaauauuacagaagaguuuuaccaaucuaccuguagcgcugucuccaaaggcuaucugggggcccucagaacaggaugguacaccucuguuaucacaauugaacugagcaacaucaaggagaauaaaugcaacggcaccgacgccaaggugaaacuuaucaagcaggaacuggauaaguauaaaaaugcugugacggaccuccagcugcugaugcaguccaccccugccgcugggucuggaagcgccauuuguuccggcaucgcggucugcaaggugcuccaccuggagggggagguuaacaaaauuaagaaugcccuucugagcacaaacaaagcuguggucucucucuccaauggagugagcguucugaccuucaaggugcuugaucugaagaacuacaucgacaaacaacuccugccgauucugaauaagcagucuuguuccauccccaacauugaaacagucaucgaguuucagcagaaaaauaaccggcuccuggaaaucacccgcgaguucagcgugaaugccggcgugacgacaccugucucuaccuauaugcuuacaaacuccgagcugcucagccugauuaacgauaugcccaucaccaaugaccaaaagaaacuuauguccaacaauguucagauugugagacagcagucuuacagcaucaugugcauuaucaaggaagaggugcuggcuuaugucgugcaacucccucuguacggcguuaucgauacccccuguuggaaacugcauacauccccucucugcacgaccaacacaaaggaagggagcaauauuugucugacccggacagaccgcggaugguacugcgauaacgccggcucuguguccuuuuucccgcaggcggagaccuguaagguccagagcaauagaguguuuugcgacacgaugaacucucuuacacugcccagcgaaguuaaucucugcaacaucgauauuuucaauccuaaauaugacuguaagaucaugaccuccaaaaccgaugugucuagcuccgucauuacaagccugggggccaucgugucuugcuacggaaagaccaaauguacagcuuccaacaagaaucggggcaucauuaagacguuuagcaacgggugcgacuaugucucuaauaaaggaguggacaccguuuccgugggcaacacacuuuacugugucaacaagcaagagggccagagccuguaugugaaaggggagcccaucauuaauuucuacgauccucucguuuuucccuccgacgaguucgaugccucuaucagccaggugaacgaaaagauuaaucagucccuggcuuuuauccgcaaaucugacgaacugcuccacaacgucaaugugggaaagagcaccacaaacauuaugaucaccacgaucauuaucgugauuaucguuauucugcuucugcucaucgccgucggccuguuccuguauugcaaggccagauccaccccggugacacuuagcaaagaucaacucucugggaucaauaacauugcuuucuccaauugaggacuagugcaucacauuuaaaagcaucucagccuaccaugagaauaagagaaagaaaaugaagaucaauagcuuauucaucucuuuuucuuuuucguugguguaaagccaacacccugucuaaaaaacauaaauuucuuuaaucauuuugccucuuuucucugugcuucaauuaauaaaaaauggaaagaaccuagaucuaaaaaaaaaaaaaaaaaaaaaaaaaaaaaaaaaaaaaaaaaaaaaaaaaaaaaaaaaaaaaaaaugcaucccccccccccccccccccccccccccccccaaaggcucuuuucagagccaccagaauu

SEQ ID NO: 15037 - RNA, 1990 nt, Artificial Sequence
  mRNA product Design i-2 comprising derived and/or modified sequence from HRSV(Memphis-37)__AIY60640.1__F_DSCav1_mut2 (opt6)
ggggcgcugccuacggagguggcagccaucuccuucucggcaucaagcuuaccauggagcuuccaauauuaaaaacaaacgcuauaacaacuauacucgcagcaguuacacucugcuucgcauccucacaaaacauaacugaagaauuuuaccaauccacuugcucagccguaucaaaaggauaucuaggagcacuuagaaccggaugguauacaucagugauaacaauagaacuaagcaacauaaaagaaaacaagugcaacggaacugacgcaaaagucaaacuaaucaaacaagaacuagacaaauacaaaaacgcaguaacagaccuacaauuacuaaugcaaucaacaccagcagcaggaucagguucagccauaugcucagguaucgcuguaugcaaaguccuucaccuagaaggugaaguaaacaaaauuaaaaacgcccuacucaguacaaauaaagcugucguaaguuuaucaaacggaguaucaguccuuacauucaaaguauuagaccuaaaaaauuauauagacaaacaauuacuaccaauacucaacaaacaaucaugcucaauaccaaauauagaaaccguaauagaauuucagcaaaaaaauaacagauuacuagaaauaaccagagaauuuucagucaacgcaggagucacaacacccgucucaaccuacaugcuaaccaacucagaacuucuaucucuuaucaacgacaugcccauaaccaaugaucaaaaaaaauuaaugucuaauaacguucaaauaguaagacaacaaucauacucaauaaugugcauaaucaaagaagaaguauuagcauacguaguacaacuaccccuauauggaguaauagacacacccugcuggaaacuacacacauccccccucuguacaacaaacacuaaagaaggaucaaacauuugccuaacaagaacagaccgcggaugguacugcgacaacgcaggcuccguaucuuucuuuccacaagccgaaacuuguaaaguucaaucaaacagaguauuuugcgauacaaugaacuccuuaacauuaccuucagaaguaaaccuaugcaacauagacaucuucaacccaaaauacgacugcaaaauaaugaccucaaaaacagacguauccucaucagucauaaccuccuuaggagcaauaguaucauguuacggaaaaacaaaauguacagcaucaaauaaaaauagaggaauaauaaaaaccuucuccaacggaugcgacuacguauccaauaaaggaguagacaccguaucaguaggaaacacacuauacuguguaaacaaacaagaaggccaaucucuauauguaaaaggcgaaccaaucauaaauuuuuacgacccacuugucuuccccuccgacgaauuugacgcaagcauaucacaaguaaacgaaaaaaucaaccaaagccuagccuucauaaggaaaucugacgaauuacuucauaacguaaauguuggaaaaucaaccacaaacauaaugauaaccaccaucauaauuguaauaauaguaauacuacuacuacuaauugcaguaggacucuuccuauauugcaaagcucgcucaacaccaguuaccuuaucaaaagaccaacuaucuggaauaaacaacauagccuuuuccaacuaaggacuagugcaucacauuuaaaagcaucucagccuaccaugagaauaagagaaagaaaaugaagaucaauagcuuauucaucucuuuuucuuuuucguugguguaaagccaacacccugucuaaaaaacauaaauuucuuuaaucauuuugccucuuuucucugugcuucaauuaauaaaaaauggaaagaaccuagaucuaaaaaaaaaaaaaaaaaaaaaaaaaaaaaaaaaaaaaaaaaaaaaaaaaaaaaaaaaaaaaaaaugcaucccccccccccccccccccccccccccccccaaaggcucuuuucagagccaccagaauu

SEQ ID NO: 15038 - RNA, 1990 nt, Artificial Sequence
  mRNA product Design i-2 comprising derived and/or modified sequence from HRSV(Memphis-37)__AIY60640.1__F_DSCav1_mut2 (opt11)
ggggcgcugccuacggagguggcagccaucuccuucucggcaucaagcuuaccauggaacucccaauccuaaaaaccaacgccaucaccaccauccucgccgcugucaccuuaugcuuugccagcagccaaaacaucaccgaagaauuuuaccaaucaacaugcuccgccgucucaaaaggauaccucggcgcccuacgcaccggcugguacacaagcgucauaaccaucgagcucuccaacaucaaggaaaacaaaugcaauggaaccgacgccaaagucaaacuaaucaaacaagaacuagacaaguacaagaacgcagucaccgaccuccaacuccucaugcaguccacccccgcagcaggcucuggcucagcaauaugcuccggcaucgcugucugcaaaguccuacaccucgaaggcgaagucaacaaaaucaaaaacgcccuacuguccacaaacaaagccgucgucucccuauccaacggcgucucgguccuaaccuuuaagguucucgaucucaaaaauuacauagacaaacaacuacuccccauccucaacaaacaaucuugcucaauccccaacaucgaaaccgucaucgaguuccaacagaaaaacaacagacuacucgaaaucacccgcgaguucucagucaacgcgggcgucacaacacccgucagcaccuacaugcuaaccaacuccgaacuccucagccucauuaacgacaugcccaucaccaacgaccaaaagaaacuuauguccaacaacguucaaaucguccgccaacaauccuacuccaucaugugcaucaucaaagaagaaguacucgccuacguaguccaacugccccucuacggcgucaucgauaccccaugcuggaaacuacacaccagcccccucugcaccaccaacaccaaagaaggcuccaauaucugcuuaacccgcacagaccguggcugguacugcgauaacgccggcuccgucuccuucuucccccaagcagaaaccugcaaaguacaauccaaccgagucuucugugacaccaugaacucccuaacccuuccaucagaagucaaccucugcaacaucgacaucuucaaccccaaguacgacugcaaaaucaugacauccaaaaccgaugucucaagcagcgucauaaccucacucggcgcuaucguaagcugcuacggcaaaaccaaaugcaccgcaucaaacaaaaaccgcggaaucaucaaaaccuucagcaacggaugcgacuacguuuccaacaaaggcguagacaccgucuccgucggaaacacccucuacugcguaaacaaacaggaaggccaaucccucuacgucaaaggcgaacccaucauaaacuucuacgauccccuugucuucccguccgaugaguucgacgccuccaucucgcaagucaacgaaaagauaaaccaaucacuagcauucauccguaaauccgacgaacuccuccacaacgucaacgucggaaaauccaccaccaacauaaugaucaccaccauaaucaucgucaucaucguaauacuauuacuccucauagccgucggccucuuccuauauugcaaagcccgaucaacccccguaacccuuucuaaagaccaacuguccggaaucaacaacaucgcuuucagcaacugaggacuagugcaucacauuuaaaagcaucucagccuaccaugagaauaagagaaagaaaaugaagaucaauagcuuauucaucucuuuuucuuuuucguugguguaaagccaacacccugucuaaaaaacauaaauuucuuuaaucauuuugccucuuuucucugugcuucaauuaauaaaaaauggaaagaaccuagaucuaaaaaaaaaaaaaaaaaaaaaaaaaaaaaaaaaaaaaaaaaaaaaaaaaaaaaaaaaaaaaaaaugcaucccccccccccccccccccccccccccccccaaaggcucuuuucagagccaccagaauu

SEQ ID NO: 15039 - RNA, 1825 nt, Artificial Sequence
  mRNA product Design i-3 comprising derived and/or modified sequence from HRSV(Memphis-37)__AIY60640.1__F_DSCav1_mut2 (opt1)
gggagaaagcuuaccauggagcugcccauccucaagaccaacgccaucaccacgauccuggccgcggugacccugugcuucgccagcucccagaacaucaccgaggaguucuaccagagcacgugcuccgccgucagcaagggcuaccucggcgcccugcgcaccgggugguacaccagcgugaucaccaucgagcuguccaacaucaaggagaacaagugcaacggcaccgacgccaaggugaagcucaucaagcaggagcuggacaaguacaagaacgcggucacggaccugcagcuccugaugcagagcaccccggccgccggcuccgggagcgcgaucugcuccggcaucgccgucugcaaggugcugcaccucgagggcgaggugaacaagaucaagaacgcccugcuguccaccaacaaggccgucgugagccucuccaacggggugagcguccugaccuucaaggugcuggaccucaagaacuacaucgacaagcagcugcugcccauccugaacaagcagagcugcuccauccccaacaucgagaccgucaucgaguuccagcagaagaacaaccgccuccuggagaucacgcgggaguucagcgugaacgcgggcgugaccacccccgucuccaccuacaugcugacgaacagcgagcuccugucccugaucaacgacaugccgaucaccaacgaccagaagaagcucaugagcaacaacgugcagaucgugcgccagcaguccuacagcaucaugugcaucaucaaggaggagguccuggccuacguggugcagcugccccucuacggggucaucgacacccccugcuggaagcugcacaccagcccccugugcacgaccaacaccaaggagggcuccaacaucugccucacccggacggaccgcgggugguacugcgacaacgccggcagcguguccuucuucccgcaggccgagaccugcaagguccagagcaaccggguguucugcgacaccaugaacucccugacccugcccagcgaggugaaccucugcaacaucgacaucuucaaccccaaguacgacugcaagaucaugacguccaagaccgacgucagcuccagcgugaucaccucccugggcgccaucgugagcugcuacgggaagaccaagugcacggcgagcaacaagaaccgcggcaucaucaagaccuucuccaacgggugcgacuacgucagcaacaagggcguggacaccguguccgucggcaacacccuguacugcgugaacaagcaggagggccagagccucuacgugaagggggagcccaucaucaacuucuacgacccgcuggucuuccccuccgacgaguucgacgccagcaucucccaggugaacgagaagaucaaccagagccuggccuucauccggaaguccgacgagcuccugcacaacgugaacgucggcaagagcaccacgaacaucaugaucaccaccaucaucaucgugaucaucgugauccugcugcuccugaucgccgucgggcuguuccucuacugcaaggcccgcuccacccccgugacgcugagcaaggaccagcuguccgggaucaacaacaucgcguucagcaacugaggacuaguuauaagacugacuagcccgaugggccucccaacgggcccuccuccccuccuugcaccgagauuaauaaaaaaaaaaaaaaaaaaaaaaaaaaaaaaaaaaaaaaaaaaaaaaaaaaaaaaaaaaaaaaaaugcaucccccccccccccccccccccccccccccccaaaggcucuuuucagagccaccagaauu

SEQ ID NO: 15040 - RNA, 1825 nt, Artificial Sequence
  mRNA product Design i-3 comprising derived and/or modified sequence from HRSV(Memphis-37)__AIY60640.1__F_DSCav1_mut2 (opt1)
gggagaaagcuuaccauggagcugcccauccucaagaccaacgccaucaccacgauccuggccgcggugacccugugcuucgccagcucccagaacaucaccgaggaguucuaccagagcacgugcuccgccgucagcaagggcuaccucggggcccugcgcaccggcugguacaccuccgugaucaccaucgagcugagcaacaucaaggagaacaagugcaacgggaccgacgccaaggugaagcucaucaagcaggagcuggacaaguacaagaacgcggucacggaccugcagcuccugaugcaguccaccccggccgccggcagcggguccgccaucugcagcggcaucgcggugugcaaggugcugcaccucgagggcgaggucaacaagaucaagaacgcccugcuguccaccaacaaggccguggugagccucuccaacggggucagcgugcugaccuucaaggugcuggaccucaagaacuacaucgacaagcagcugcugcccauccucaacaagcaguccugcagcauccccaacaucgagacggucaucgaguuccagcagaagaacaaccggcugcuggagaucacccgcgaguucuccgugaacgccggcgugaccacccccgucagcacguacaugcucaccaacuccgagcugcugagccucaucaacgacaugccgaucaccaacgaccagaagaagcugaugagcaacaacgugcagaucgugcggcagcaguccuacagcaucaugugcaucaucaaggaggagguccuggccuacguggugcagcucccccuguacggggucaucgacacccccugcuggaagcugcacacgagcccccucugcaccaccaacaccaaggagggcuccaacaucugccugacgcgcaccgaccgggggugguacugcgacaacgcgggcuccgugagcuucuucccgcaggccgagaccugcaaggugcaguccaaccgcgucuucugcgacaccaugaacagccugacgcuccccuccgaggugaaccugugcaacaucgacaucuucaaccccaaguacgacugcaagaucaugaccagcaagaccgacgucuccagcuccgugaucaccagccugggcgccaucguguccugcuacgggaagacgaagugcaccgccagcaacaagaaccggggcaucaucaagaccuucuccaacgggugcgacuacgucagcaacaagggcguggacaccguguccgucggcaacacgcucuacugcgugaacaagcaggaggggcagagccuguacgugaagggcgagcccaucaucaacuucuacgacccgcuggucuuccccagcgacgaguucgacgccuccaucagccaggugaacgagaagaucaaccagucccucgcguucauccgcaagagcgacgagcugcugcacaacgugaacgucgggaaguccaccaccaacaucaugaucaccaccaucaucaucgugaucaucgugauccuccugcugcucaucgccgucggccuguuccuguacugcaaggcccggagcacgcccgugacccuguccaaggaccagcucagcgggaucaacaacaucgccuucuccaacugaggacuaguuauaagacugacuagcccgaugggccucccaacgggcccuccuccccuccuugcaccgagauuaauaaaaaaaaaaaaaaaaaaaaaaaaaaaaaaaaaaaaaaaaaaaaaaaaaaaaaaaaaaaaaaaaugcaucccccccccccccccccccccccccccccccaaaggcucuuuucagagccaccagaauu

SEQ ID NO: 15041 - RNA, 1825 nt, Artificial Sequence
  mRNA product Design i-3 comprising derived and/or modified sequence from HRSV(Memphis-37)__AIY60640.1__F_DSCav1_mut2 (opt2)
gggagaaagcuuaccauggagcuccccauccucaagaccaacgccaucaccaccauccucgccgccgucacccucugcuucgccuccucccagaacaucaccgaggaguucuaccaguccaccugcuccgccgucuccaagggcuaccucggcgcccuccgcaccggcugguacaccuccgucaucaccaucgagcucuccaacaucaaggagaacaagugcaacggcaccgacgccaaggucaagcucaucaagcaggagcucgacaaguacaagaacgccgucaccgaccuccagcuccucaugcaguccacccccgccgccggcuccggcuccgccaucugcuccggcaucgccgucugcaagguccuccaccucgagggcgaggucaacaagaucaagaacgcccuccucuccaccaacaaggccgucgucucccucuccaacggcgucuccguccucaccuucaagguccucgaccucaagaacuacaucgacaagcagcuccuccccauccucaacaagcaguccugcuccauccccaacaucgagaccgucaucgaguuccagcagaagaacaaccgccuccucgagaucacccgcgaguucuccgucaacgccggcgucaccacccccgucuccaccuacaugcucaccaacuccgagcuccucucccucaucaacgacaugcccaucaccaacgaccagaagaagcucauguccaacaacguccagaucguccgccagcaguccuacuccaucaugugcaucaucaaggaggagguccucgccuacgucguccagcucccccucuacggcgucaucgacacccccugcuggaagcuccacaccuccccccucugcaccaccaacaccaaggagggcuccaacaucugccucacccgcaccgaccgcggcugguacugcgacaacgccggcuccgucuccuucuucccccaggccgagaccugcaagguccaguccaaccgcgucuucugcgacaccaugaacucccucacccuccccuccgaggucaaccucugcaacaucgacaucuucaaccccaaguacgacugcaagaucaugaccuccaagaccgacgucuccuccuccgucaucaccucccucggcgccaucgucuccugcuacggcaagaccaagugcaccgccuccaacaagaaccgcggcaucaucaagaccuucuccaacggcugcgacuacgucuccaacaagggcgucgacaccgucuccgucggcaacacccucuacugcgucaacaagcaggagggccagucccucuacgucaagggcgagcccaucaucaacuucuacgacccccucgucuuccccuccgacgaguucgacgccuccaucucccaggucaacgagaagaucaaccagucccucgccuucauccgcaaguccgacgagcuccuccacaacgucaacgucggcaaguccaccaccaacaucaugaucaccaccaucaucaucgucaucaucgucauccuccuccuccucaucgccgucggccucuuccucuacugcaaggcccgcuccacccccgucacccucuccaaggaccagcucuccggcaucaacaacaucgccuucuccaacugaggacuaguuauaagacugacuagcccgaugggccucccaacgggcccuccuccccuccuugcaccgagauuaauaaaaaaaaaaaaaaaaaaaaaaaaaaaaaaaaaaaaaaaaaaaaaaaaaaaaaaaaaaaaaaaaugcaucccccccccccccccccccccccccccccccaaaggcucuuuucagagccaccagaauu

SEQ ID NO: 15042 - RNA, 1825 nt, Artificial Sequence
  mRNA product Design i-3 comprising derived and/or modified sequence from HRSV(Memphis-37)__AIY60640.1__F_DSCav1_mut2 (opt3)
gggagaaagcuuaccauggagcugcccauccucaagaccaacgccauuacaacuauacuugcugcagugacgcugugcuucgccagcucccagaauaucaccgaagaguuuuaccaaucuacauguucagcggucaguaaaggcuauuugggggcuuuaagaacuggaugguacaccagcguuauuacaaucgaacuguccaacauuaaggagaauaaaugcaacgguaccgacgccaaggugaaacuaaucaagcaggaacucgauaaguauaaaaaugcaguaacugaccugcagcuucugaugcagucuacuccugccgcuggcucggggucagcaauauguagcggaaucgccgugugcaaggucuugcaccucgagggcgaggugaacaaaauuaagaaugcucugcugaguaccaacaaagccguugugucccucucuaauggugucagcguguuaacguucaagguacuggaucuuaagaacuacaucgacaaacaauugcugccaauucuaaauaagcaguccuguucaaucccgaacauagaaacuguuauugaguuucagcagaaaaauaacaggcuccuggaaaucacccgggaguucagugugaaugcgggggucacaacucccgugagcaccuauaugcuuacaaacucugagcuguugucccucauuaacgauaugccuaucaccaaugaccaaaagaaacugaugucaaacaaugugcagaucguccgccagcagagcuacaguauuaugugcauaaucaaggaagagguuuuagcauaugugguacaacugccacucuacggagugauugauacgcccuguuggaaacuucauacuucuccucugugcacaaccaacacuaaggaaggcuccaauaucuguuugacacgaaccgaccguggcugguacugcgauaacgccgggagcgucucguuuuucccacaggcugagacguguaaggugcagucuaauagaguuuucugcgacaccaugaacucccuaacacugcccucagaagugaaucucugcaacauagauauuuucaauccuaaauaugacuguaagaucaugacaaguaaaaccgaugucagcuccucugugaucacaagccugggagccauuguaucaugcuacgguaagacuaaauguaccgcaaguaacaagaauaggggcaucauuaagacauuuuccaacgggugcgacuauguuagcaauaaaggaguggacaccgucucugugggcaacacucuuuacugugucaacaagcaagagggucagucacuguaugugaaaggggagccaauaaucaauuucuacgauccguugguuuuucccagugacgaauuugaugcuagcauuucccaggugaacgagaagaucaaucagucucucgccuuuauccggaaaucggacgaacuguuacacaacguaaaugucggaaagagcacgacaaacauuaugauaaccacuaucauuaucgugauuaucguuauacugcuacuccugaucgcggugggccuuuucuuguauugcaaggcccgcuccaccccugucacacugucaaaagaucaacucaguggcauuaauaacaucgcauucucuaauugaggacuaguuauaagacugacuagcccgaugggccucccaacgggcccuccuccccuccuugcaccgagauuaauaaaaaaaaaaaaaaaaaaaaaaaaaaaaaaaaaaaaaaaaaaaaaaaaaaaaaaaaaaaaaaaaugcaucccccccccccccccccccccccccccccccaaaggcucuuuucagagccaccagaauu

SEQ ID NO: 15043 - RNA, 1825 nt, Artificial Sequence
  mRNA product Design i-3 comprising derived and/or modified sequence from HRSV(Memphis-37)__AIY60640.1__F_DSCav1_mut2 (opt4)
gggagaaagcuuaccauggagcugcccauccugaagaccaacgccaucaccaccauccuggccgccgugacccugugcuucgccagcagccagaacaucaccgaggaguucuaccagagcaccugcagcgccgugagcaagggcuaccugggcgcccugagaaccggcugguacaccagcgugaucaccaucgagcugagcaacaucaaggagaacaagugcaacggcaccgacgccaaggugaagcugaucaagcaggagcuggacaaguacaagaacgccgugaccgaccugcagcugcugaugcagagcacccccgccgccggcagcggcagcgccaucugcagcggcaucgccgugugcaaggugcugcaccuggagggcgaggugaacaagaucaagaacgcccugcugagcaccaacaaggccguggugagccugagcaacggcgugagcgugcugaccuucaaggugcuggaccugaagaacuacaucgacaagcagcugcugcccauccugaacaagcagagcugcagcauccccaacaucgagaccgugaucgaguuccagcagaagaacaacagacugcuggagaucaccagagaguucagcgugaacgccggcgugaccacccccgugagcaccuacaugcugaccaacagcgagcugcugagccugaucaacgacaugcccaucaccaacgaccagaagaagcugaugagcaacaacgugcagaucgugagacagcagagcuacagcaucaugugcaucaucaaggaggaggugcuggccuacguggugcagcugccccuguacggcgugaucgacacccccugcuggaagcugcacaccagcccccugugcaccaccaacaccaaggagggcagcaacaucugccugaccagaaccgacagaggcugguacugcgacaacgccggcagcgugagcuucuucccccaggccgagaccugcaaggugcagagcaacagaguguucugcgacaccaugaacagccugacccugcccagcgaggugaaccugugcaacaucgacaucuucaaccccaaguacgacugcaagaucaugaccagcaagaccgacgugagcagcagcgugaucaccagccugggcgccaucgugagcugcuacggcaagaccaagugcaccgccagcaacaagaacagaggcaucaucaagaccuucagcaacggcugcgacuacgugagcaacaagggcguggacaccgugagcgugggcaacacccuguacugcgugaacaagcaggagggccagagccuguacgugaagggcgagcccaucaucaacuucuacgacccccugguguuccccagcgacgaguucgacgccagcaucagccaggugaacgagaagaucaaccagagccuggccuucaucagaaagagcgacgagcugcugcacaacgugaacgugggcaagagcaccaccaacaucaugaucaccaccaucaucaucgugaucaucgugauccugcugcugcugaucgccgugggccuguuccuguacugcaaggccagaagcacccccgugacccugagcaaggaccagcugagcggcaucaacaacaucgccuucagcaacugaggacuaguuauaagacugacuagcccgaugggccucccaacgggcccuccuccccuccuugcaccgagauuaauaaaaaaaaaaaaaaaaaaaaaaaaaaaaaaaaaaaaaaaaaaaaaaaaaaaaaaaaaaaaaaaaugcaucccccccccccccccccccccccccccccccaaaggcucuuuucagagccaccagaauu

SEQ ID NO: 15044 - RNA, 1825 nt, Artificial Sequence
  mRNA product Design i-3 comprising derived and/or modified sequence from HRSV(Memphis-37)__AIY60640.1__F_DSCav1_mut2 (opt5)
gggagaaagcuuaccauggagcugcccauccucaagaccaacgccauuacaacgauccuggcugccgugacccuuugcuucgcgagcucccagaauauuacagaagaguuuuaccaaucuaccuguagcgcugucuccaaaggcuaucugggggcccucagaacaggaugguacaccucuguuaucacaauugaacugagcaacaucaaggagaauaaaugcaacggcaccgacgccaaggugaaacuuaucaagcaggaacuggauaaguauaaaaaugcugugacggaccuccagcugcugaugcaguccaccccugccgcugggucuggaagcgccauuuguuccggcaucgcggucugcaaggugcuccaccuggagggggagguuaacaaaauuaagaaugcccuucugagcacaaacaaagcuguggucucucucuccaauggagugagcguucugaccuucaaggugcuugaucugaagaacuacaucgacaaacaacuccugccgauucugaauaagcagucuuguuccauccccaacauugaaacagucaucgaguuucagcagaaaaauaaccggcuccuggaaaucacccgcgaguucagcgugaaugccggcgugacgacaccugucucuaccuauaugcuuacaaacuccgagcugcucagccugauuaacgauaugcccaucaccaaugaccaaaagaaacuuauguccaacaauguucagauugugagacagcagucuuacagcaucaugugcauuaucaaggaagaggugcuggcuuaugucgugcaacucccucuguacggcguuaucgauacccccuguuggaaacugcauacauccccucucugcacgaccaacacaaaggaagggagcaauauuugucugacccggacagaccgcggaugguacugcgauaacgccggcucuguguccuuuuucccgcaggcggagaccuguaagguccagagcaauagaguguuuugcgacacgaugaacucucuuacacugcccagcgaaguuaaucucugcaacaucgauauuuucaauccuaaauaugacuguaagaucaugaccuccaaaaccgaugugucuagcuccgucauuacaagccugggggccaucgugucuugcuacggaaagaccaaauguacagcuuccaacaagaaucggggcaucauuaagacguuuagcaacgggugcgacuaugucucuaauaaaggaguggacaccguuuccgugggcaacacacuuuacugugucaacaagcaagagggccagagccuguaugugaaaggggagcccaucauuaauuucuacgauccucucguuuuucccuccgacgaguucgaugccucuaucagccaggugaacgaaaagauuaaucagucccuggcuuuuauccgcaaaucugacgaacugcuccacaacgucaaugugggaaagagcaccacaaacauuaugaucaccacgaucauuaucgugauuaucguuauucugcuucugcucaucgccgucggccuguuccuguauugcaaggccagauccaccccggugacacuuagcaaagaucaacucucugggaucaauaacauugcuuucuccaauugaggacuaguuauaagacugacuagcccgaugggccucccaacgggcccuccuccccuccuugcaccgagauuaauaaaaaaaaaaaaaaaaaaaaaaaaaaaaaaaaaaaaaaaaaaaaaaaaaaaaaaaaaaaaaaaaugcaucccccccccccccccccccccccccccccccaaaggcucuuuucagagccaccagaauu

SEQ ID NO: 15045 - RNA, 1825 nt, Artificial Sequence
  mRNA product Design i-3 comprising derived and/or modified sequence from HRSV(Memphis-37)__AIY60640.1__F_DSCav1_mut2 (opt6)
gggagaaagcuuaccauggagcuuccaauauuaaaaacaaacgcuauaacaacuauacucgcagcaguuacacucugcuucgcauccucacaaaacauaacugaagaauuuuaccaauccacuugcucagccguaucaaaaggauaucuaggagcacuuagaaccggaugguauacaucagugauaacaauagaacuaagcaacauaaaagaaaacaagugcaacggaacugacgcaaaagucaaacuaaucaaacaagaacuagacaaauacaaaaacgcaguaacagaccuacaauuacuaaugcaaucaacaccagcagcaggaucagguucagccauaugcucagguaucgcuguaugcaaaguccuucaccuagaaggugaaguaaacaaaauuaaaaacgcccuacucaguacaaauaaagcugucguaaguuuaucaaacggaguaucaguccuuacauucaaaguauuagaccuaaaaaauuauauagacaaacaauuacuaccaauacucaacaaacaaucaugcucaauaccaaauauagaaaccguaauagaauuucagcaaaaaaauaacagauuacuagaaauaaccagagaauuuucagucaacgcaggagucacaacacccgucucaaccuacaugcuaaccaacucagaacuucuaucucuuaucaacgacaugcccauaaccaaugaucaaaaaaaauuaaugucuaauaacguucaaauaguaagacaacaaucauacucaauaaugugcauaaucaaagaagaaguauuagcauacguaguacaacuaccccuauauggaguaauagacacacccugcuggaaacuacacacauccccccucuguacaacaaacacuaaagaaggaucaaacauuugccuaacaagaacagaccgcggaugguacugcgacaacgcaggcuccguaucuuucuuuccacaagccgaaacuuguaaaguucaaucaaacagaguauuuugcgauacaaugaacuccuuaacauuaccuucagaaguaaaccuaugcaacauagacaucuucaacccaaaauacgacugcaaaauaaugaccucaaaaacagacguauccucaucagucauaaccuccuuaggagcaauaguaucauguuacggaaaaacaaaauguacagcaucaaauaaaaauagaggaauaauaaaaaccuucuccaacggaugcgacuacguauccaauaaaggaguagacaccguaucaguaggaaacacacuauacuguguaaacaaacaagaaggccaaucucuauauguaaaaggcgaaccaaucauaaauuuuuacgacccacuugucuuccccuccgacgaauuugacgcaagcauaucacaaguaaacgaaaaaaucaaccaaagccuagccuucauaaggaaaucugacgaauuacuucauaacguaaauguuggaaaaucaaccacaaacauaaugauaaccaccaucauaauuguaauaauaguaauacuacuacuacuaauugcaguaggacucuuccuauauugcaaagcucgcucaacaccaguuaccuuaucaaaagaccaacuaucuggaauaaacaacauagccuuuuccaacuaaggacuaguuauaagacugacuagcccgaugggccucccaacgggcccuccuccccuccuugcaccgagauuaauaaaaaaaaaaaaaaaaaaaaaaaaaaaaaaaaaaaaaaaaaaaaaaaaaaaaaaaaaaaaaaaaugcaucccccccccccccccccccccccccccccccaaaggcucuuuucagagccaccagaauu

SEQ ID NO: 15046 - RNA, 1825 nt, Artificial Sequence
  mRNA product Design i-3 comprising derived and/or modified sequence from HRSV(Memphis-37)__AIY60640.1__F_DSCav1_mut2 (opt11)
gggagaaagcuuaccauggaacucccaauccuaaaaaccaacgccaucaccaccauccucgccgcugucaccuuaugcuuugccagcagccaaaacaucaccgaagaauuuuaccaaucaacaugcuccgccgucucaaaaggauaccucggcgcccuacgcaccggcugguacacaagcgucauaaccaucgagcucuccaacaucaaggaaaacaaaugcaauggaaccgacgccaaagucaaacuaaucaaacaagaacuagacaaguacaagaacgcagucaccgaccuccaacuccucaugcaguccacccccgcagcaggcucuggcucagcaauaugcuccggcaucgcugucugcaaaguccuacaccucgaaggcgaagucaacaaaaucaaaaacgcccuacuguccacaaacaaagccgucgucucccuauccaacggcgucucgguccuaaccuuuaagguucucgaucucaaaaauuacauagacaaacaacuacuccccauccucaacaaacaaucuugcucaauccccaacaucgaaaccgucaucgaguuccaacagaaaaacaacagacuacucgaaaucacccgcgaguucucagucaacgcgggcgucacaacacccgucagcaccuacaugcuaaccaacuccgaacuccucagccucauuaacgacaugcccaucaccaacgaccaaaagaaacuuauguccaacaacguucaaaucguccgccaacaauccuacuccaucaugugcaucaucaaagaagaaguacucgccuacguaguccaacugccccucuacggcgucaucgauaccccaugcuggaaacuacacaccagcccccucugcaccaccaacaccaaagaaggcuccaauaucugcuuaacccgcacagaccguggcugguacugcgauaacgccggcuccgucuccuucuucccccaagcagaaaccugcaaaguacaauccaaccgagucuucugugacaccaugaacucccuaacccuuccaucagaagucaaccucugcaacaucgacaucuucaaccccaaguacgacugcaaaaucaugacauccaaaaccgaugucucaagcagcgucauaaccucacucggcgcuaucguaagcugcuacggcaaaaccaaaugcaccgcaucaaacaaaaaccgcggaaucaucaaaaccuucagcaacggaugcgacuacguuuccaacaaaggcguagacaccgucuccgucggaaacacccucuacugcguaaacaaacaggaaggccaaucccucuacgucaaaggcgaacccaucauaaacuucuacgauccccuugucuucccguccgaugaguucgacgccuccaucucgcaagucaacgaaaagauaaaccaaucacuagcauucauccguaaauccgacgaacuccuccacaacgucaacgucggaaaauccaccaccaacauaaugaucaccaccauaaucaucgucaucaucguaauacuauuacuccucauagccgucggccucuuccuauauugcaaagcccgaucaacccccguaacccuuucuaaagaccaacuguccggaaucaacaacaucgcuuucagcaacugaggacuaguuauaagacugacuagcccgaugggccucccaacgggcccuccuccccuccuugcaccgagauuaauaaaaaaaaaaaaaaaaaaaaaaaaaaaaaaaaaaaaaaaaaaaaaaaaaaaaaaaaaaaaaaaaugcaucccccccccccccccccccccccccccccccaaaggcucuuuucagagccaccagaauu

SEQ ID NO: 15047 - protein, 514 aa, Artificial Sequence
  derived and/or modified protein sequence (artificial) from HRSV(Memphis-37)__AIY60640.1__F-del_DSCav1_mut2
MELPILKTNAITTILAAVTLCFASSQNITEEFYQSTCSAVSKGYLGALRTGWYTSVITIELSNIKENKCNGTDAKVKLIKQELDKYKNAVTDLQLLMQSTPAAGSGSAICSGIAVCKVLHLEGEVNKIKNALLSTNKAVVSLSNGVSVLTFKVLDLKNYIDKQLLPILNKQSCSIPNIETVIEFQQKNNRLLEITREFSVNAGVTTPVSTYMLTNSELLSLINDMPITNDQKKLMSNNVQIVRQQSYSIMCIIKEEVLAYVVQLPLYGVIDTPCWKLHTSPLCTTNTKEGSNICLTRTDRGWYCDNAGSVSFFPQAETCKVQSNRVFCDTMNSLTLPSEVNLCNIDIFNPKYDCKIMTSKTDVSSSVITSLGAIVSCYGKTKCTASNKNRGIIKTFSNGCDYVSNKGVDTVSVGNTLYCVNKQEGQSLYVKGEPIINFYDPLVFPSDEFDASISQVNEKINQSLAFIRKSDELLHNVNVGKSTTNIMITTIIIVIIVILLLLIAVGLFLYCKAR

SEQ ID NO: 15048 - RNA, 1545 nt, Artificial Sequence
  derived and/or modified CDS sequence (opt1) from HRSV(Memphis-37)__AIY60640.1__F-del_DSCav1_mut2
auggagcugcccauccucaagaccaacgccaucaccacgauccuggccgcggugacccugugcuucgccagcucccagaacaucaccgaggaguucuaccagagcacgugcuccgccgucagcaagggcuaccucggcgcccugcgcaccgggugguacaccagcgugaucaccaucgagcuguccaacaucaaggagaacaagugcaacggcaccgacgccaaggugaagcucaucaagcaggagcuggacaaguacaagaacgcggucacggaccugcagcuccugaugcagagcaccccggccgccggcuccgggagcgcgaucugcuccggcaucgccgucugcaaggugcugcaccucgagggcgaggugaacaagaucaagaacgcccugcuguccaccaacaaggccgucgugagccucuccaacggggugagcguccugaccuucaaggugcuggaccucaagaacuacaucgacaagcagcugcugcccauccugaacaagcagagcugcuccauccccaacaucgagaccgucaucgaguuccagcagaagaacaaccgccuccuggagaucacgcgggaguucagcgugaacgcgggcgugaccacccccgucuccaccuacaugcugacgaacagcgagcuccugucccugaucaacgacaugccgaucaccaacgaccagaagaagcucaugagcaacaacgugcagaucgugcgccagcaguccuacagcaucaugugcaucaucaaggaggagguccuggccuacguggugcagcugccccucuacggggucaucgacacccccugcuggaagcugcacaccagcccccugugcacgaccaacaccaaggagggcuccaacaucugccucacccggacggaccgcgggugguacugcgacaacgccggcagcguguccuucuucccgcaggccgagaccugcaagguccagagcaaccggguguucugcgacaccaugaacucccugacccugcccagcgaggugaaccucugcaacaucgacaucuucaaccccaaguacgacugcaagaucaugacguccaagaccgacgucagcuccagcgugaucaccucccugggcgccaucgugagcugcuacgggaagaccaagugcacggcgagcaacaagaaccgcggcaucaucaagaccuucuccaacgggugcgacuacgucagcaacaagggcguggacaccguguccgucggcaacacccuguacugcgugaacaagcaggagggccagagccucuacgugaagggggagcccaucaucaacuucuacgacccgcuggucuuccccuccgacgaguucgacgccagcaucucccaggugaacgagaagaucaaccagagccuggccuucauccggaaguccgacgagcuccugcacaacgugaacgucggcaagagcaccacgaacaucaugaucaccaccaucaucaucgugaucaucgugauccugcugcuccugaucgccgucgggcuguuccucuacugcaaggcccgcuga

SEQ ID NO: 15049 - RNA, 1545 nt, Artificial Sequence
  derived and/or modified CDS sequence (opt1) from HRSV(Memphis-37)__AIY60640.1__F-del_DSCav1_mut2
auggagcugcccauccucaagaccaacgccaucaccacgauccuggccgcggugacccugugcuucgccagcucccagaacaucaccgaggaguucuaccagagcacgugcuccgccgucagcaagggcuaccucggggcccugcgcaccggcugguacaccuccgugaucaccaucgagcugagcaacaucaaggagaacaagugcaacgggaccgacgccaaggugaagcucaucaagcaggagcuggacaaguacaagaacgcggucacggaccugcagcuccugaugcaguccaccccggccgccggcagcggguccgccaucugcagcggcaucgcggugugcaaggugcugcaccucgagggcgaggucaacaagaucaagaacgcccugcuguccaccaacaaggccguggugagccucuccaacggggucagcgugcugaccuucaaggugcuggaccucaagaacuacaucgacaagcagcugcugcccauccucaacaagcaguccugcagcauccccaacaucgagacggucaucgaguuccagcagaagaacaaccggcugcuggagaucacccgcgaguucuccgugaacgccggcgugaccacccccgucagcacguacaugcucaccaacuccgagcugcugagccucaucaacgacaugccgaucaccaacgaccagaagaagcugaugagcaacaacgugcagaucgugcggcagcaguccuacagcaucaugugcaucaucaaggaggagguccuggccuacguggugcagcucccccuguacggggucaucgacacccccugcuggaagcugcacacgagcccccucugcaccaccaacaccaaggagggcuccaacaucugccugacgcgcaccgaccgggggugguacugcgacaacgcgggcuccgugagcuucuucccgcaggccgagaccugcaaggugcaguccaaccgcgucuucugcgacaccaugaacagccugacgcuccccuccgaggugaaccugugcaacaucgacaucuucaaccccaaguacgacugcaagaucaugaccagcaagaccgacgucuccagcuccgugaucaccagccugggcgccaucguguccugcuacgggaagacgaagugcaccgccagcaacaagaaccggggcaucaucaagaccuucuccaacgggugcgacuacgucagcaacaagggcguggacaccguguccgucggcaacacgcucuacugcgugaacaagcaggaggggcagagccuguacgugaagggcgagcccaucaucaacuucuacgacccgcuggucuuccccagcgacgaguucgacgccuccaucagccaggugaacgagaagaucaaccagucccucgcguucauccgcaagagcgacgagcugcugcacaacgugaacgucgggaaguccaccaccaacaucaugaucaccaccaucaucaucgugaucaucgugauccuccugcugcucaucgccgucggccuguuccuguacugcaaggcccgguga

SEQ ID NO: 15050 - RNA, 1545 nt, Artificial Sequence
  derived and/or modified CDS sequence (opt2) from HRSV(Memphis-37)__AIY60640.1__F-del_DSCav1_mut2
auggagcuccccauccucaagaccaacgccaucaccaccauccucgccgccgucacccucugcuucgccuccucccagaacaucaccgaggaguucuaccaguccaccugcuccgccgucuccaagggcuaccucggcgcccuccgcaccggcugguacaccuccgucaucaccaucgagcucuccaacaucaaggagaacaagugcaacggcaccgacgccaaggucaagcucaucaagcaggagcucgacaaguacaagaacgccgucaccgaccuccagcuccucaugcaguccacccccgccgccggcuccggcuccgccaucugcuccggcaucgccgucugcaagguccuccaccucgagggcgaggucaacaagaucaagaacgcccuccucuccaccaacaaggccgucgucucccucuccaacggcgucuccguccucaccuucaagguccucgaccucaagaacuacaucgacaagcagcuccuccccauccucaacaagcaguccugcuccauccccaacaucgagaccgucaucgaguuccagcagaagaacaaccgccuccucgagaucacccgcgaguucuccgucaacgccggcgucaccacccccgucuccaccuacaugcucaccaacuccgagcuccucucccucaucaacgacaugcccaucaccaacgaccagaagaagcucauguccaacaacguccagaucguccgccagcaguccuacuccaucaugugcaucaucaaggaggagguccucgccuacgucguccagcucccccucuacggcgucaucgacacccccugcuggaagcuccacaccuccccccucugcaccaccaacaccaaggagggcuccaacaucugccucacccgcaccgaccgcggcugguacugcgacaacgccggcuccgucuccuucuucccccaggccgagaccugcaagguccaguccaaccgcgucuucugcgacaccaugaacucccucacccuccccuccgaggucaaccucugcaacaucgacaucuucaaccccaaguacgacugcaagaucaugaccuccaagaccgacgucuccuccuccgucaucaccucccucggcgccaucgucuccugcuacggcaagaccaagugcaccgccuccaacaagaaccgcggcaucaucaagaccuucuccaacggcugcgacuacgucuccaacaagggcgucgacaccgucuccgucggcaacacccucuacugcgucaacaagcaggagggccagucccucuacgucaagggcgagcccaucaucaacuucuacgacccccucgucuuccccuccgacgaguucgacgccuccaucucccaggucaacgagaagaucaaccagucccucgccuucauccgcaaguccgacgagcuccuccacaacgucaacgucggcaaguccaccaccaacaucaugaucaccaccaucaucaucgucaucaucgucauccuccuccuccucaucgccgucggccucuuccucuacugcaaggcccgcuga

SEQ ID NO: 15051 - RNA, 1545 nt, Artificial Sequence
  derived and/or modified CDS sequence (opt3) from HRSV(Memphis-37)__AIY60640.1__F-del_DSCav1_mut2
auggagcugcccauccucaagaccaacgccauuacaacuauacuugcugcagugacgcugugcuucgccagcucccagaauaucaccgaagaguuuuaccaaucuacauguucagcggucaguaaaggcuauuugggggcuuuaagaacuggaugguacaccagcguuauuacaaucgaacuguccaacauuaaggagaauaaaugcaacgguaccgacgccaaggugaaacuaaucaagcaggaacucgauaaguauaaaaaugcaguaacugaccugcagcuucugaugcagucuacuccugccgcuggcucggggucagcaauauguagcggaaucgccgugugcaaggucuugcaccucgagggcgaggugaacaaaauuaagaaugcucugcugaguaccaacaaagccguugugucccucucuaauggugucagcguguuaacguucaagguacuggaucuuaagaacuacaucgacaaacaauugcugccaauucuaaauaagcaguccuguucaaucccgaacauagaaacuguuauugaguuucagcagaaaaauaacaggcuccuggaaaucacccgggaguucagugugaaugcgggggucacaacucccgugagcaccuauaugcuuacaaacucugagcuguugucccucauuaacgauaugccuaucaccaaugaccaaaagaaacugaugucaaacaaugugcagaucguccgccagcagagcuacaguauuaugugcauaaucaaggaagagguuuuagcauaugugguacaacugccacucuacggagugauugauacgcccuguuggaaacuucauacuucuccucugugcacaaccaacacuaaggaaggcuccaauaucuguuugacacgaaccgaccguggcugguacugcgauaacgccgggagcgucucguuuuucccacaggcugagacguguaaggugcagucuaauagaguuuucugcgacaccaugaacucccuaacacugcccucagaagugaaucucugcaacauagauauuuucaauccuaaauaugacuguaagaucaugacaaguaaaaccgaugucagcuccucugugaucacaagccugggagccauuguaucaugcuacgguaagacuaaauguaccgcaaguaacaagaauaggggcaucauuaagacauuuuccaacgggugcgacuauguuagcaauaaaggaguggacaccgucucugugggcaacacucuuuacugugucaacaagcaagagggucagucacuguaugugaaaggggagccaauaaucaauuucuacgauccguugguuuuucccagugacgaauuugaugcuagcauuucccaggugaacgagaagaucaaucagucucucgccuuuauccggaaaucggacgaacuguuacacaacguaaaugucggaaagagcacgacaaacauuaugauaaccacuaucauuaucgugauuaucguuauacugcuacuccugaucgcggugggccuuuucuuguauugcaaggcccgcuga

SEQ ID NO: 15052 - RNA, 1545 nt, Artificial Sequence
  derived and/or modified CDS sequence (opt4) from HRSV(Memphis-37)__AIY60640.1__F-del_DSCav1_mut2
auggagcugcccauccugaagaccaacgccaucaccaccauccuggccgccgugacccugugcuucgccagcagccagaacaucaccgaggaguucuaccagagcaccugcagcgccgugagcaagggcuaccugggcgcccugagaaccggcugguacaccagcgugaucaccaucgagcugagcaacaucaaggagaacaagugcaacggcaccgacgccaaggugaagcugaucaagcaggagcuggacaaguacaagaacgccgugaccgaccugcagcugcugaugcagagcacccccgccgccggcagcggcagcgccaucugcagcggcaucgccgugugcaaggugcugcaccuggagggcgaggugaacaagaucaagaacgcccugcugagcaccaacaaggccguggugagccugagcaacggcgugagcgugcugaccuucaaggugcuggaccugaagaacuacaucgacaagcagcugcugcccauccugaacaagcagagcugcagcauccccaacaucgagaccgugaucgaguuccagcagaagaacaacagacugcuggagaucaccagagaguucagcgugaacgccggcgugaccacccccgugagcaccuacaugcugaccaacagcgagcugcugagccugaucaacgacaugcccaucaccaacgaccagaagaagcugaugagcaacaacgugcagaucgugagacagcagagcuacagcaucaugugcaucaucaaggaggaggugcuggccuacguggugcagcugccccuguacggcgugaucgacacccccugcuggaagcugcacaccagcccccugugcaccaccaacaccaaggagggcagcaacaucugccugaccagaaccgacagaggcugguacugcgacaacgccggcagcgugagcuucuucccccaggccgagaccugcaaggugcagagcaacagaguguucugcgacaccaugaacagccugacccugcccagcgaggugaaccugugcaacaucgacaucuucaaccccaaguacgacugcaagaucaugaccagcaagaccgacgugagcagcagcgugaucaccagccugggcgccaucgugagcugcuacggcaagaccaagugcaccgccagcaacaagaacagaggcaucaucaagaccuucagcaacggcugcgacuacgugagcaacaagggcguggacaccgugagcgugggcaacacccuguacugcgugaacaagcaggagggccagagccuguacgugaagggcgagcccaucaucaacuucuacgacccccugguguuccccagcgacgaguucgacgccagcaucagccaggugaacgagaagaucaaccagagccuggccuucaucagaaagagcgacgagcugcugcacaacgugaacgugggcaagagcaccaccaacaucaugaucaccaccaucaucaucgugaucaucgugauccugcugcugcugaucgccgugggccuguuccuguacugcaaggccagauga

SEQ ID NO: 15053 - RNA, 1545 nt, Artificial Sequence
  derived and/or modified CDS sequence (opt5) from HRSV(Memphis-37)__AIY60640.1__F-del_DSCav1_mut2
auggagcugcccauccucaagaccaacgccauuacaacgauccuggcugccgugacccuuugcuucgcgagcucccagaauauuacagaagaguuuuaccaaucuaccuguagcgcugucuccaaaggcuaucugggggcccucagaacaggaugguacaccucuguuaucacaauugaacugagcaacaucaaggagaauaaaugcaacggcaccgacgccaaggugaaacuuaucaagcaggaacuggauaaguauaaaaaugcugugacggaccuccagcugcugaugcaguccaccccugccgcugggucuggaagcgccauuuguuccggcaucgcggucugcaaggugcuccaccuggagggggagguuaacaaaauuaagaaugcccuucugagcacaaacaaagcuguggucucucucuccaauggagugagcguucugaccuucaaggugcuugaucugaagaacuacaucgacaaacaacuccugccgauucugaauaagcagucuuguuccauccccaacauugaaacagucaucgaguuucagcagaaaaauaaccggcuccuggaaaucacccgcgaguucagcgugaaugccggcgugacgacaccugucucuaccuauaugcuuacaaacuccgagcugcucagccugauuaacgauaugcccaucaccaaugaccaaaagaaacuuauguccaacaauguucagauugugagacagcagucuuacagcaucaugugcauuaucaaggaagaggugcuggcuuaugucgugcaacucccucuguacggcguuaucgauacccccuguuggaaacugcauacauccccucucugcacgaccaacacaaaggaagggagcaauauuugucugacccggacagaccgcggaugguacugcgauaacgccggcucuguguccuuuuucccgcaggcggagaccuguaagguccagagcaauagaguguuuugcgacacgaugaacucucuuacacugcccagcgaaguuaaucucugcaacaucgauauuuucaauccuaaauaugacuguaagaucaugaccuccaaaaccgaugugucuagcuccgucauuacaagccugggggccaucgugucuugcuacggaaagaccaaauguacagcuuccaacaagaaucggggcaucauuaagacguuuagcaacgggugcgacuaugucucuaauaaaggaguggacaccguuuccgugggcaacacacuuuacugugucaacaagcaagagggccagagccuguaugugaaaggggagcccaucauuaauuucuacgauccucucguuuuucccuccgacgaguucgaugccucuaucagccaggugaacgaaaagauuaaucagucccuggcuuuuauccgcaaaucugacgaacugcuccacaacgucaaugugggaaagagcaccacaaacauuaugaucaccacgaucauuaucgugauuaucguuauucugcuucugcucaucgccgucggccuguuccuguauugcaaggccagauga

SEQ ID NO: 15054 - RNA, 1545 nt, Artificial Sequence
  derived and/or modified CDS sequence (opt6) from HRSV(Memphis-37)__AIY60640.1__F-del_DSCav1_mut2
auggaacuaccaauacucaaaacaaacgcaauaacaacaauuuuagcugcaguaacacuuuguuucgcauccucccaaaauauaacagaagaauuuuaucaaucaaccugcucagccgucuccaaaggauaucuaggugcacuacgcacuggaugguacacaagugucaucacaauagaacuuuccaacaucaaagaaaauaaauguaauggaacugacgcaaaaguaaaacucauaaaacaagaacuagacaaauacaaaaacgcaguaacagaccuacaacuauuaaugcaaucaacaccagcagcaggauccggcagugccauaugcucuggaauagcagucugcaaaguuuuacacuuagaaggcgaaguaaacaaaaucaaaaacgcccuacuaucuacaaauaaagccgucguaucucucucaaauggaguaucaguacuaacauucaaaguauuagacuuaaaaaacuacaucgauaaacaauuauugccaauauuaaacaaacaaucuugcucaauaccaaauauagaaacagucauagaauuucaacaaaaaaauaaccgauuauuagaaauaacacgagaauuuucaguaaaugccggagucaccacaccaguaucaacauacaugcuaacaaauucagaacuauuaucauuaauaaacgacaugccuauuacaaaugaucaaaaaaaacuaauguccaacaauguacaaauaguccgacaacaaagcuacucaaucauguguauaauaaaagaagaaguacuugcauacguaguacaauuaccacuauacggaguuaucgacacaccaugcuggaaacuccacacuucaccacucugcaccacaaacacaaaagaaggcucaaacauaugccuaacaagaacagaccgaggaugguacugcgacaacgcaggaucaguaucauucuucccacaagcagaaacuugcaaaguacaaucuaacagaguuuucugugacaccaugaauagccuaacacuccccuccgaaguuaaccuauguaacauagauauauuuaaucccaaauaugauugcaaaaucaugacaucuaaaaccgacguaucaucaucuguaaucacaucacuaggugccauagucucaugcuacggcaaaacaaaaugcaccgccucaaacaaaaaccgagguauaauaaaaaccuucaguaauggaugugacuacguaucaaacaaagguguugauaccguaagcgucggcaacacccuauacugcguaaauaaacaagaaggccaaucacuauacgucaaaggcgaaccaauuauuaacuucuaugacccacucgucuuucccuccgacgaauuugacgcaagcauaucacaaguaaacgaaaaaauaaaccaaucacuagcauucauacgcaaaucagaugaacuacuacauaacguaaacguaggaaaauccacuacaaauauaaugaucacaacaauaauaaucguaauuauagucauauuauuacuacuaauagcaguaggacuuuuccuauacuguaaagcaagauaa

SEQ ID NO: 15055 - RNA, 1545 nt, Artificial Sequence
  derived and/or modified CDS sequence (opt11) from HRSV(Memphis-37)__AIY60640.1__F-del_DSCav1_mut2
auggaacuucccauccucaagaccaacgcuauuacgaccauccucgccgcagucacccucugcuucgcgucaucccaaaacaucaccgaagaauuuuaccaauccacaugcuccgcagucucaaaaggcuaccuaggagcccuacgcaccggaugguacacauccgucaucacaaucgaacucuccaacauaaaagaaaacaaaugcaacggcaccgaugccaaaguaaaacugauuaaacaagaacucgacaaauacaagaacgccgucacagaccuacagcuccucaugcaaucaacucccgccgccggcagcggauccgcuaucugcucaggcaucgccguaugcaaaguccuccaccuagaaggcgaaguaaacaaaaucaagaacgcacuacucucaacaaacaaagccgucgucucccucuccaacggcgucuccguccuuaccuucaaaguccucgaccuuaagaacuacauugacaaacaacuccuacccauccucaacaaacaauccugcucuauaccuaauauagaaaccguaaucgaauuucaacagaaaaacaaccgccuccucgaaauuacccgcgaguucucaguaaacgccggcguaaccacccccgucuccaccuacaugcucacaaauucagaacuccucagccucaucaacgacaugcccauaaccaacgaccaaaagaaacucaugucaaacaacguccaaaucgucaggcaacaaagcuacagcaucaugugcaucauuaaagaagaaguacucgccuacgucgugcaacuaccccucuacggcgucauagacacacccugcuggaaacuucacacaucaccgcucugcaccacaaacaccaaagaaggcaguaacauaugccucacccgaaccgaccgcggaugguacugcgacaacgccggauccgucagcuucuucccacaagccgaaaccugcaaaguacaauccaaccgagucuucugcgacaccaugaacucucuuacgcuccccucagaagucaaccuaugcaacaucgacaucuucaaccccaaauacgacugcaaaaucaugaccuccaaaacagacgucuccuccucagugauaaccucccucggcgccauugucuccugcuacggcaaaaccaaaugcaccgccuccaacaaaaaccgugggaucaucaaaaccuucucaaacggcugcgacuacguauccaauaagggugucgacacagucuccguaggcaauacccucuauugcgucaacaaacaagaaggccaaucccucuacgucaaaggcgaaccuaucaucaacuucuacgacccgcuagucuuccccucagacgaguucgacgcauccaucucacaagucaacgaaaagaucaaccagucccucgcauucauccgaaaauccgacgaacuucuccacaacguuaacgucggcaaauccaccacuaacauaaugaucaccacgaucaucauaguaauuaucgucauacuccuccuccuaaucgcugucggacucuuccucuacugcaaggcccgcuaa

SEQ ID NO: 15056 - RNA, 1821 nt, Artificial Sequence
  mRNA product Design a-1 comprising derived and/or modified sequence from HRSV(Memphis-37)__AIY60640.1__F-del_DSCav1_mut2 (opt1)
gggagagucccgcagucggcguccagcggcucugcuuguucgugugugugucguugcaggccuuauucaagcuuaccauggagcugcccauccucaagaccaacgccaucaccacgauccuggccgcggugacccugugcuucgccagcucccagaacaucaccgaggaguucuaccagagcacgugcuccgccgucagcaagggcuaccucggcgcccugcgcaccgggugguacaccagcgugaucaccaucgagcuguccaacaucaaggagaacaagugcaacggcaccgacgccaaggugaagcucaucaagcaggagcuggacaaguacaagaacgcggucacggaccugcagcuccugaugcagagcaccccggccgccggcuccgggagcgcgaucugcuccggcaucgccgucugcaaggugcugcaccucgagggcgaggugaacaagaucaagaacgcccugcuguccaccaacaaggccgucgugagccucuccaacggggugagcguccugaccuucaaggugcuggaccucaagaacuacaucgacaagcagcugcugcccauccugaacaagcagagcugcuccauccccaacaucgagaccgucaucgaguuccagcagaagaacaaccgccuccuggagaucacgcgggaguucagcgugaacgcgggcgugaccacccccgucuccaccuacaugcugacgaacagcgagcuccugucccugaucaacgacaugccgaucaccaacgaccagaagaagcucaugagcaacaacgugcagaucgugcgccagcaguccuacagcaucaugugcaucaucaaggaggagguccuggccuacguggugcagcugccccucuacggggucaucgacacccccugcuggaagcugcacaccagcccccugugcacgaccaacaccaaggagggcuccaacaucugccucacccggacggaccgcgggugguacugcgacaacgccggcagcguguccuucuucccgcaggccgagaccugcaagguccagagcaaccggguguucugcgacaccaugaacucccugacccugcccagcgaggugaaccucugcaacaucgacaucuucaaccccaaguacgacugcaagaucaugacguccaagaccgacgucagcuccagcgugaucaccucccugggcgccaucgugagcugcuacgggaagaccaagugcacggcgagcaacaagaaccgcggcaucaucaagaccuucuccaacgggugcgacuacgucagcaacaagggcguggacaccguguccgucggcaacacccuguacugcgugaacaagcaggagggccagagccucuacgugaagggggagcccaucaucaacuucuacgacccgcuggucuuccccuccgacgaguucgacgccagcaucucccaggugaacgagaagaucaaccagagccuggccuucauccggaaguccgacgagcuccugcacaacgugaacgucggcaagagcaccacgaacaucaugaucaccaccaucaucaucgugaucaucgugauccugcugcuccugaucgccgucgggcuguuccucuacugcaaggcccgcugaggacuagucccuguucccagagcccacuuuuuuuucuuuuuuugaaauaaaauagccugucuuucagaucuaaaaaaaaaaaaaaaaaaaaaaaaaaaaaaaaaaaaaaaaaaaaaaaaaaaaaaaaaaaaaaaaugcaucccccccccccccccccccccccccccccccaaaggcucuuuucagagccaccagaauu

SEQ ID NO: 15057 - RNA, 1821 nt, Artificial Sequence
  mRNA product Design a-1 comprising derived and/or modified sequence from HRSV(Memphis-37)__AIY60640.1__F-del_DSCav1_mut2 (opt1)
gggagagucccgcagucggcguccagcggcucugcuuguucgugugugugucguugcaggccuuauucaagcuuaccauggagcugcccauccucaagaccaacgccaucaccacgauccuggccgcggugacccugugcuucgccagcucccagaacaucaccgaggaguucuaccagagcacgugcuccgccgucagcaagggcuaccucggggcccugcgcaccggcugguacaccuccgugaucaccaucgagcugagcaacaucaaggagaacaagugcaacgggaccgacgccaaggugaagcucaucaagcaggagcuggacaaguacaagaacgcggucacggaccugcagcuccugaugcaguccaccccggccgccggcagcggguccgccaucugcagcggcaucgcggugugcaaggugcugcaccucgagggcgaggucaacaagaucaagaacgcccugcuguccaccaacaaggccguggugagccucuccaacggggucagcgugcugaccuucaaggugcuggaccucaagaacuacaucgacaagcagcugcugcccauccucaacaagcaguccugcagcauccccaacaucgagacggucaucgaguuccagcagaagaacaaccggcugcuggagaucacccgcgaguucuccgugaacgccggcgugaccacccccgucagcacguacaugcucaccaacuccgagcugcugagccucaucaacgacaugccgaucaccaacgaccagaagaagcugaugagcaacaacgugcagaucgugcggcagcaguccuacagcaucaugugcaucaucaaggaggagguccuggccuacguggugcagcucccccuguacggggucaucgacacccccugcuggaagcugcacacgagcccccucugcaccaccaacaccaaggagggcuccaacaucugccugacgcgcaccgaccgggggugguacugcgacaacgcgggcuccgugagcuucuucccgcaggccgagaccugcaaggugcaguccaaccgcgucuucugcgacaccaugaacagccugacgcuccccuccgaggugaaccugugcaacaucgacaucuucaaccccaaguacgacugcaagaucaugaccagcaagaccgacgucuccagcuccgugaucaccagccugggcgccaucguguccugcuacgggaagacgaagugcaccgccagcaacaagaaccggggcaucaucaagaccuucuccaacgggugcgacuacgucagcaacaagggcguggacaccguguccgucggcaacacgcucuacugcgugaacaagcaggaggggcagagccuguacgugaagggcgagcccaucaucaacuucuacgacccgcuggucuuccccagcgacgaguucgacgccuccaucagccaggugaacgagaagaucaaccagucccucgcguucauccgcaagagcgacgagcugcugcacaacgugaacgucgggaaguccaccaccaacaucaugaucaccaccaucaucaucgugaucaucgugauccuccugcugcucaucgccgucggccuguuccuguacugcaaggcccggugaggacuagucccuguucccagagcccacuuuuuuuucuuuuuuugaaauaaaauagccugucuuucagaucuaaaaaaaaaaaaaaaaaaaaaaaaaaaaaaaaaaaaaaaaaaaaaaaaaaaaaaaaaaaaaaaaugcaucccccccccccccccccccccccccccccccaaaggcucuuuucagagccaccagaauu

SEQ ID NO: 15058 - RNA, 1821 nt, Artificial Sequence
  mRNA product Design a-1 comprising derived and/or modified sequence from HRSV(Memphis-37)__AIY60640.1__F-del_DSCav1_mut2 (opt2)
gggagagucccgcagucggcguccagcggcucugcuuguucgugugugugucguugcaggccuuauucaagcuuaccauggagcuccccauccucaagaccaacgccaucaccaccauccucgccgccgucacccucugcuucgccuccucccagaacaucaccgaggaguucuaccaguccaccugcuccgccgucuccaagggcuaccucggcgcccuccgcaccggcugguacaccuccgucaucaccaucgagcucuccaacaucaaggagaacaagugcaacggcaccgacgccaaggucaagcucaucaagcaggagcucgacaaguacaagaacgccgucaccgaccuccagcuccucaugcaguccacccccgccgccggcuccggcuccgccaucugcuccggcaucgccgucugcaagguccuccaccucgagggcgaggucaacaagaucaagaacgcccuccucuccaccaacaaggccgucgucucccucuccaacggcgucuccguccucaccuucaagguccucgaccucaagaacuacaucgacaagcagcuccuccccauccucaacaagcaguccugcuccauccccaacaucgagaccgucaucgaguuccagcagaagaacaaccgccuccucgagaucacccgcgaguucuccgucaacgccggcgucaccacccccgucuccaccuacaugcucaccaacuccgagcuccucucccucaucaacgacaugcccaucaccaacgaccagaagaagcucauguccaacaacguccagaucguccgccagcaguccuacuccaucaugugcaucaucaaggaggagguccucgccuacgucguccagcucccccucuacggcgucaucgacacccccugcuggaagcuccacaccuccccccucugcaccaccaacaccaaggagggcuccaacaucugccucacccgcaccgaccgcggcugguacugcgacaacgccggcuccgucuccuucuucccccaggccgagaccugcaagguccaguccaaccgcgucuucugcgacaccaugaacucccucacccuccccuccgaggucaaccucugcaacaucgacaucuucaaccccaaguacgacugcaagaucaugaccuccaagaccgacgucuccuccuccgucaucaccucccucggcgccaucgucuccugcuacggcaagaccaagugcaccgccuccaacaagaaccgcggcaucaucaagaccuucuccaacggcugcgacuacgucuccaacaagggcgucgacaccgucuccgucggcaacacccucuacugcgucaacaagcaggagggccagucccucuacgucaagggcgagcccaucaucaacuucuacgacccccucgucuuccccuccgacgaguucgacgccuccaucucccaggucaacgagaagaucaaccagucccucgccuucauccgcaaguccgacgagcuccuccacaacgucaacgucggcaaguccaccaccaacaucaugaucaccaccaucaucaucgucaucaucgucauccuccuccuccucaucgccgucggccucuuccucuacugcaaggcccgcugaggacuagucccuguucccagagcccacuuuuuuuucuuuuuuugaaauaaaauagccugucuuucagaucuaaaaaaaaaaaaaaaaaaaaaaaaaaaaaaaaaaaaaaaaaaaaaaaaaaaaaaaaaaaaaaaaugcaucccccccccccccccccccccccccccccccaaaggcucuuuucagagccaccagaauu

SEQ ID NO: 15059 - RNA, 1821 nt, Artificial Sequence
  mRNA product Design a-1 comprising derived and/or modified sequence from HRSV(Memphis-37)__AIY60640.1__F-del_DSCav1_mut2 (opt3)
gggagagucccgcagucggcguccagcggcucugcuuguucgugugugugucguugcaggccuuauucaagcuuaccauggagcugcccauccucaagaccaacgccauuacaacuauacuugcugcagugacgcugugcuucgccagcucccagaauaucaccgaagaguuuuaccaaucuacauguucagcggucaguaaaggcuauuugggggcuuuaagaacuggaugguacaccagcguuauuacaaucgaacuguccaacauuaaggagaauaaaugcaacgguaccgacgccaaggugaaacuaaucaagcaggaacucgauaaguauaaaaaugcaguaacugaccugcagcuucugaugcagucuacuccugccgcuggcucggggucagcaauauguagcggaaucgccgugugcaaggucuugcaccucgagggcgaggugaacaaaauuaagaaugcucugcugaguaccaacaaagccguugugucccucucuaauggugucagcguguuaacguucaagguacuggaucuuaagaacuacaucgacaaacaauugcugccaauucuaaauaagcaguccuguucaaucccgaacauagaaacuguuauugaguuucagcagaaaaauaacaggcuccuggaaaucacccgggaguucagugugaaugcgggggucacaacucccgugagcaccuauaugcuuacaaacucugagcuguugucccucauuaacgauaugccuaucaccaaugaccaaaagaaacugaugucaaacaaugugcagaucguccgccagcagagcuacaguauuaugugcauaaucaaggaagagguuuuagcauaugugguacaacugccacucuacggagugauugauacgcccuguuggaaacuucauacuucuccucugugcacaaccaacacuaaggaaggcuccaauaucuguuugacacgaaccgaccguggcugguacugcgauaacgccgggagcgucucguuuuucccacaggcugagacguguaaggugcagucuaauagaguuuucugcgacaccaugaacucccuaacacugcccucagaagugaaucucugcaacauagauauuuucaauccuaaauaugacuguaagaucaugacaaguaaaaccgaugucagcuccucugugaucacaagccugggagccauuguaucaugcuacgguaagacuaaauguaccgcaaguaacaagaauaggggcaucauuaagacauuuuccaacgggugcgacuauguuagcaauaaaggaguggacaccgucucugugggcaacacucuuuacugugucaacaagcaagagggucagucacuguaugugaaaggggagccaauaaucaauuucuacgauccguugguuuuucccagugacgaauuugaugcuagcauuucccaggugaacgagaagaucaaucagucucucgccuuuauccggaaaucggacgaacuguuacacaacguaaaugucggaaagagcacgacaaacauuaugauaaccacuaucauuaucgugauuaucguuauacugcuacuccugaucgcggugggccuuuucuuguauugcaaggcccgcugaggacuagucccuguucccagagcccacuuuuuuuucuuuuuuugaaauaaaauagccugucuuucagaucuaaaaaaaaaaaaaaaaaaaaaaaaaaaaaaaaaaaaaaaaaaaaaaaaaaaaaaaaaaaaaaaaugcaucccccccccccccccccccccccccccccccaaaggcucuuuucagagccaccagaauu

SEQ ID NO: 15060 - RNA, 1821 nt, Artificial Sequence
  mRNA product Design a-1 comprising derived and/or modified sequence from HRSV(Memphis-37)__AIY60640.1__F-del_DSCav1_mut2 (opt4)
gggagagucccgcagucggcguccagcggcucugcuuguucgugugugugucguugcaggccuuauucaagcuuaccauggagcugcccauccugaagaccaacgccaucaccaccauccuggccgccgugacccugugcuucgccagcagccagaacaucaccgaggaguucuaccagagcaccugcagcgccgugagcaagggcuaccugggcgcccugagaaccggcugguacaccagcgugaucaccaucgagcugagcaacaucaaggagaacaagugcaacggcaccgacgccaaggugaagcugaucaagcaggagcuggacaaguacaagaacgccgugaccgaccugcagcugcugaugcagagcacccccgccgccggcagcggcagcgccaucugcagcggcaucgccgugugcaaggugcugcaccuggagggcgaggugaacaagaucaagaacgcccugcugagcaccaacaaggccguggugagccugagcaacggcgugagcgugcugaccuucaaggugcuggaccugaagaacuacaucgacaagcagcugcugcccauccugaacaagcagagcugcagcauccccaacaucgagaccgugaucgaguuccagcagaagaacaacagacugcuggagaucaccagagaguucagcgugaacgccggcgugaccacccccgugagcaccuacaugcugaccaacagcgagcugcugagccugaucaacgacaugcccaucaccaacgaccagaagaagcugaugagcaacaacgugcagaucgugagacagcagagcuacagcaucaugugcaucaucaaggaggaggugcuggccuacguggugcagcugccccuguacggcgugaucgacacccccugcuggaagcugcacaccagcccccugugcaccaccaacaccaaggagggcagcaacaucugccugaccagaaccgacagaggcugguacugcgacaacgccggcagcgugagcuucuucccccaggccgagaccugcaaggugcagagcaacagaguguucugcgacaccaugaacagccugacccugcccagcgaggugaaccugugcaacaucgacaucuucaaccccaaguacgacugcaagaucaugaccagcaagaccgacgugagcagcagcgugaucaccagccugggcgccaucgugagcugcuacggcaagaccaagugcaccgccagcaacaagaacagaggcaucaucaagaccuucagcaacggcugcgacuacgugagcaacaagggcguggacaccgugagcgugggcaacacccuguacugcgugaacaagcaggagggccagagccuguacgugaagggcgagcccaucaucaacuucuacgacccccugguguuccccagcgacgaguucgacgccagcaucagccaggugaacgagaagaucaaccagagccuggccuucaucagaaagagcgacgagcugcugcacaacgugaacgugggcaagagcaccaccaacaucaugaucaccaccaucaucaucgugaucaucgugauccugcugcugcugaucgccgugggccuguuccuguacugcaaggccagaugaggacuagucccuguucccagagcccacuuuuuuuucuuuuuuugaaauaaaauagccugucuuucagaucuaaaaaaaaaaaaaaaaaaaaaaaaaaaaaaaaaaaaaaaaaaaaaaaaaaaaaaaaaaaaaaaaugcaucccccccccccccccccccccccccccccccaaaggcucuuuucagagccaccagaauu

SEQ ID NO: 15061 - RNA, 1821 nt, Artificial Sequence
  mRNA product Design a-1 comprising derived and/or modified sequence from HRSV(Memphis-37)__AIY60640.1__F-del_DSCav1_mut2 (opt5)
gggagagucccgcagucggcguccagcggcucugcuuguucgugugugugucguugcaggccuuauucaagcuuaccauggagcugcccauccucaagaccaacgccauuacaacgauccuggcugccgugacccuuugcuucgcgagcucccagaauauuacagaagaguuuuaccaaucuaccuguagcgcugucuccaaaggcuaucugggggcccucagaacaggaugguacaccucuguuaucacaauugaacugagcaacaucaaggagaauaaaugcaacggcaccgacgccaaggugaaacuuaucaagcaggaacuggauaaguauaaaaaugcugugacggaccuccagcugcugaugcaguccaccccugccgcugggucuggaagcgccauuuguuccggcaucgcggucugcaaggugcuccaccuggagggggagguuaacaaaauuaagaaugcccuucugagcacaaacaaagcuguggucucucucuccaauggagugagcguucugaccuucaaggugcuugaucugaagaacuacaucgacaaacaacuccugccgauucugaauaagcagucuuguuccauccccaacauugaaacagucaucgaguuucagcagaaaaauaaccggcuccuggaaaucacccgcgaguucagcgugaaugccggcgugacgacaccugucucuaccuauaugcuuacaaacuccgagcugcucagccugauuaacgauaugcccaucaccaaugaccaaaagaaacuuauguccaacaauguucagauugugagacagcagucuuacagcaucaugugcauuaucaaggaagaggugcuggcuuaugucgugcaacucccucuguacggcguuaucgauacccccuguuggaaacugcauacauccccucucugcacgaccaacacaaaggaagggagcaauauuugucugacccggacagaccgcggaugguacugcgauaacgccggcucuguguccuuuuucccgcaggcggagaccuguaagguccagagcaauagaguguuuugcgacacgaugaacucucuuacacugcccagcgaaguuaaucucugcaacaucgauauuuucaauccuaaauaugacuguaagaucaugaccuccaaaaccgaugugucuagcuccgucauuacaagccugggggccaucgugucuugcuacggaaagaccaaauguacagcuuccaacaagaaucggggcaucauuaagacguuuagcaacgggugcgacuaugucucuaauaaaggaguggacaccguuuccgugggcaacacacuuuacugugucaacaagcaagagggccagagccuguaugugaaaggggagcccaucauuaauuucuacgauccucucguuuuucccuccgacgaguucgaugccucuaucagccaggugaacgaaaagauuaaucagucccuggcuuuuauccgcaaaucugacgaacugcuccacaacgucaaugugggaaagagcaccacaaacauuaugaucaccacgaucauuaucgugauuaucguuauucugcuucugcucaucgccgucggccuguuccuguauugcaaggccagaugaggacuagucccuguucccagagcccacuuuuuuuucuuuuuuugaaauaaaauagccugucuuucagaucuaaaaaaaaaaaaaaaaaaaaaaaaaaaaaaaaaaaaaaaaaaaaaaaaaaaaaaaaaaaaaaaaugcaucccccccccccccccccccccccccccccccaaaggcucuuuucagagccaccagaauu

SEQ ID NO: 15062 - RNA, 1821 nt, Artificial Sequence
  mRNA product Design a-1 comprising derived and/or modified sequence from HRSV(Memphis-37)__AIY60640.1__F-del_DSCav1_mut2 (opt6)
gggagagucccgcagucggcguccagcggcucugcuuguucgugugugugucguugcaggccuuauucaagcuuaccauggaacuaccaauacucaaaacaaacgcaauaacaacaauuuuagcugcaguaacacuuuguuucgcauccucccaaaauauaacagaagaauuuuaucaaucaaccugcucagccgucuccaaaggauaucuaggugcacuacgcacuggaugguacacaagugucaucacaauagaacuuuccaacaucaaagaaaauaaauguaauggaacugacgcaaaaguaaaacucauaaaacaagaacuagacaaauacaaaaacgcaguaacagaccuacaacuauuaaugcaaucaacaccagcagcaggauccggcagugccauaugcucuggaauagcagucugcaaaguuuuacacuuagaaggcgaaguaaacaaaaucaaaaacgcccuacuaucuacaaauaaagccgucguaucucucucaaauggaguaucaguacuaacauucaaaguauuagacuuaaaaaacuacaucgauaaacaauuauugccaauauuaaacaaacaaucuugcucaauaccaaauauagaaacagucauagaauuucaacaaaaaaauaaccgauuauuagaaauaacacgagaauuuucaguaaaugccggagucaccacaccaguaucaacauacaugcuaacaaauucagaacuauuaucauuaauaaacgacaugccuauuacaaaugaucaaaaaaaacuaauguccaacaauguacaaauaguccgacaacaaagcuacucaaucauguguauaauaaaagaagaaguacuugcauacguaguacaauuaccacuauacggaguuaucgacacaccaugcuggaaacuccacacuucaccacucugcaccacaaacacaaaagaaggcucaaacauaugccuaacaagaacagaccgaggaugguacugcgacaacgcaggaucaguaucauucuucccacaagcagaaacuugcaaaguacaaucuaacagaguuuucugugacaccaugaauagccuaacacuccccuccgaaguuaaccuauguaacauagauauauuuaaucccaaauaugauugcaaaaucaugacaucuaaaaccgacguaucaucaucuguaaucacaucacuaggugccauagucucaugcuacggcaaaacaaaaugcaccgccucaaacaaaaaccgagguauaauaaaaaccuucaguaauggaugugacuacguaucaaacaaagguguugauaccguaagcgucggcaacacccuauacugcguaaauaaacaagaaggccaaucacuauacgucaaaggcgaaccaauuauuaacuucuaugacccacucgucuuucccuccgacgaauuugacgcaagcauaucacaaguaaacgaaaaaauaaaccaaucacuagcauucauacgcaaaucagaugaacuacuacauaacguaaacguaggaaaauccacuacaaauauaaugaucacaacaauaauaaucguaauuauagucauauuauuacuacuaauagcaguaggacuuuuccuauacuguaaagcaagauaaggacuagucccuguucccagagcccacuuuuuuuucuuuuuuugaaauaaaauagccugucuuucagaucuaaaaaaaaaaaaaaaaaaaaaaaaaaaaaaaaaaaaaaaaaaaaaaaaaaaaaaaaaaaaaaaaugcaucccccccccccccccccccccccccccccccaaaggcucuuuucagagccaccagaauu

SEQ ID NO: 15063 - RNA, 1821 nt, Artificial Sequence
  mRNA product Design a-1 comprising derived and/or modified sequence from HRSV(Memphis-37)__AIY60640.1__F-del_DSCav1_mut2 (opt11)
gggagagucccgcagucggcguccagcggcucugcuuguucgugugugugucguugcaggccuuauucaagcuuaccauggaacuucccauccucaagaccaacgcuauuacgaccauccucgccgcagucacccucugcuucgcgucaucccaaaacaucaccgaagaauuuuaccaauccacaugcuccgcagucucaaaaggcuaccuaggagcccuacgcaccggaugguacacauccgucaucacaaucgaacucuccaacauaaaagaaaacaaaugcaacggcaccgaugccaaaguaaaacugauuaaacaagaacucgacaaauacaagaacgccgucacagaccuacagcuccucaugcaaucaacucccgccgccggcagcggauccgcuaucugcucaggcaucgccguaugcaaaguccuccaccuagaaggcgaaguaaacaaaaucaagaacgcacuacucucaacaaacaaagccgucgucucccucuccaacggcgucuccguccuuaccuucaaaguccucgaccuuaagaacuacauugacaaacaacuccuacccauccucaacaaacaauccugcucuauaccuaauauagaaaccguaaucgaauuucaacagaaaaacaaccgccuccucgaaauuacccgcgaguucucaguaaacgccggcguaaccacccccgucuccaccuacaugcucacaaauucagaacuccucagccucaucaacgacaugcccauaaccaacgaccaaaagaaacucaugucaaacaacguccaaaucgucaggcaacaaagcuacagcaucaugugcaucauuaaagaagaaguacucgccuacgucgugcaacuaccccucuacggcgucauagacacacccugcuggaaacuucacacaucaccgcucugcaccacaaacaccaaagaaggcaguaacauaugccucacccgaaccgaccgcggaugguacugcgacaacgccggauccgucagcuucuucccacaagccgaaaccugcaaaguacaauccaaccgagucuucugcgacaccaugaacucucuuacgcuccccucagaagucaaccuaugcaacaucgacaucuucaaccccaaauacgacugcaaaaucaugaccuccaaaacagacgucuccuccucagugauaaccucccucggcgccauugucuccugcuacggcaaaaccaaaugcaccgccuccaacaaaaaccgugggaucaucaaaaccuucucaaacggcugcgacuacguauccaauaagggugucgacacagucuccguaggcaauacccucuauugcgucaacaaacaagaaggccaaucccucuacgucaaaggcgaaccuaucaucaacuucuacgacccgcuagucuuccccucagacgaguucgacgcauccaucucacaagucaacgaaaagaucaaccagucccucgcauucauccgaaaauccgacgaacuucuccacaacguuaacgucggcaaauccaccacuaacauaaugaucaccacgaucaucauaguaauuaucgucauacuccuccuccuaaucgcugucggacucuuccucuacugcaaggcccgcuaaggacuagucccuguucccagagcccacuuuuuuuucuuuuuuugaaauaaaauagccugucuuucagaucuaaaaaaaaaaaaaaaaaaaaaaaaaaaaaaaaaaaaaaaaaaaaaaaaaaaaaaaaaaaaaaaaugcaucccccccccccccccccccccccccccccccaaaggcucuuuucagagccaccagaauu

SEQ ID NO: 15064 - RNA, 1840 nt, Artificial Sequence
  mRNA product Design a-2 comprising derived and/or modified sequence from HRSV(Memphis-37)__AIY60640.1__F-del_DSCav1_mut2 (opt1)
gggagaguccgcucagccagguugcagaagcggcuuagcguguguccuaaucuucucucugcguguagguaggccugugccgcaaacaagcuuaccauggagcugcccauccucaagaccaacgccaucaccacgauccuggccgcggugacccugugcuucgccagcucccagaacaucaccgaggaguucuaccagagcacgugcuccgccgucagcaagggcuaccucggcgcccugcgcaccgggugguacaccagcgugaucaccaucgagcuguccaacaucaaggagaacaagugcaacggcaccgacgccaaggugaagcucaucaagcaggagcuggacaaguacaagaacgcggucacggaccugcagcuccugaugcagagcaccccggccgccggcuccgggagcgcgaucugcuccggcaucgccgucugcaaggugcugcaccucgagggcgaggugaacaagaucaagaacgcccugcuguccaccaacaaggccgucgugagccucuccaacggggugagcguccugaccuucaaggugcuggaccucaagaacuacaucgacaagcagcugcugcccauccugaacaagcagagcugcuccauccccaacaucgagaccgucaucgaguuccagcagaagaacaaccgccuccuggagaucacgcgggaguucagcgugaacgcgggcgugaccacccccgucuccaccuacaugcugacgaacagcgagcuccugucccugaucaacgacaugccgaucaccaacgaccagaagaagcucaugagcaacaacgugcagaucgugcgccagcaguccuacagcaucaugugcaucaucaaggaggagguccuggccuacguggugcagcugccccucuacggggucaucgacacccccugcuggaagcugcacaccagcccccugugcacgaccaacaccaaggagggcuccaacaucugccucacccggacggaccgcgggugguacugcgacaacgccggcagcguguccuucuucccgcaggccgagaccugcaagguccagagcaaccggguguucugcgacaccaugaacucccugacccugcccagcgaggugaaccucugcaacaucgacaucuucaaccccaaguacgacugcaagaucaugacguccaagaccgacgucagcuccagcgugaucaccucccugggcgccaucgugagcugcuacgggaagaccaagugcacggcgagcaacaagaaccgcggcaucaucaagaccuucuccaacgggugcgacuacgucagcaacaagggcguggacaccguguccgucggcaacacccuguacugcgugaacaagcaggagggccagagccucuacgugaagggggagcccaucaucaacuucuacgacccgcuggucuuccccuccgacgaguucgacgccagcaucucccaggugaacgagaagaucaaccagagccuggccuucauccggaaguccgacgagcuccugcacaacgugaacgucggcaagagcaccacgaacaucaugaucaccaccaucaucaucgugaucaucgugauccugcugcuccugaucgccgucgggcuguuccucuacugcaaggcccgcugaggacuagucccuguucccagagcccacuuuuuuuucuuuuuuugaaauaaaauagccugucuuucagaucuaaaaaaaaaaaaaaaaaaaaaaaaaaaaaaaaaaaaaaaaaaaaaaaaaaaaaaaaaaaaaaaaugcaucccccccccccccccccccccccccccccccaaaggcucuuuucagagccaccagaauu

SEQ ID NO: 15065 - RNA, 1840 nt, Artificial Sequence
  mRNA product Design a-2 comprising derived and/or modified sequence from HRSV(Memphis-37)__AIY60640.1__F-del_DSCav1_mut2 (opt1)
gggagaguccgcucagccagguugcagaagcggcuuagcguguguccuaaucuucucucugcguguagguaggccugugccgcaaacaagcuuaccauggagcugcccauccucaagaccaacgccaucaccacgauccuggccgcggugacccugugcuucgccagcucccagaacaucaccgaggaguucuaccagagcacgugcuccgccgucagcaagggcuaccucggggcccugcgcaccggcugguacaccuccgugaucaccaucgagcugagcaacaucaaggagaacaagugcaacgggaccgacgccaaggugaagcucaucaagcaggagcuggacaaguacaagaacgcggucacggaccugcagcuccugaugcaguccaccccggccgccggcagcggguccgccaucugcagcggcaucgcggugugcaaggugcugcaccucgagggcgaggucaacaagaucaagaacgcccugcuguccaccaacaaggccguggugagccucuccaacggggucagcgugcugaccuucaaggugcuggaccucaagaacuacaucgacaagcagcugcugcccauccucaacaagcaguccugcagcauccccaacaucgagacggucaucgaguuccagcagaagaacaaccggcugcuggagaucacccgcgaguucuccgugaacgccggcgugaccacccccgucagcacguacaugcucaccaacuccgagcugcugagccucaucaacgacaugccgaucaccaacgaccagaagaagcugaugagcaacaacgugcagaucgugcggcagcaguccuacagcaucaugugcaucaucaaggaggagguccuggccuacguggugcagcucccccuguacggggucaucgacacccccugcuggaagcugcacacgagcccccucugcaccaccaacaccaaggagggcuccaacaucugccugacgcgcaccgaccgggggugguacugcgacaacgcgggcuccgugagcuucuucccgcaggccgagaccugcaaggugcaguccaaccgcgucuucugcgacaccaugaacagccugacgcuccccuccgaggugaaccugugcaacaucgacaucuucaaccccaaguacgacugcaagaucaugaccagcaagaccgacgucuccagcuccgugaucaccagccugggcgccaucguguccugcuacgggaagacgaagugcaccgccagcaacaagaaccggggcaucaucaagaccuucuccaacgggugcgacuacgucagcaacaagggcguggacaccguguccgucggcaacacgcucuacugcgugaacaagcaggaggggcagagccuguacgugaagggcgagcccaucaucaacuucuacgacccgcuggucuuccccagcgacgaguucgacgccuccaucagccaggugaacgagaagaucaaccagucccucgcguucauccgcaagagcgacgagcugcugcacaacgugaacgucgggaaguccaccaccaacaucaugaucaccaccaucaucaucgugaucaucgugauccuccugcugcucaucgccgucggccuguuccuguacugcaaggcccggugaggacuagucccuguucccagagcccacuuuuuuuucuuuuuuugaaauaaaauagccugucuuucagaucuaaaaaaaaaaaaaaaaaaaaaaaaaaaaaaaaaaaaaaaaaaaaaaaaaaaaaaaaaaaaaaaaugcaucccccccccccccccccccccccccccccccaaaggcucuuuucagagccaccagaauu

SEQ ID NO: 15066 - RNA, 1840 nt, Artificial Sequence
  mRNA product Design a-2 comprising derived and/or modified sequence from HRSV(Memphis-37)__AIY60640.1__F-del_DSCav1_mut2 (opt2)
gggagaguccgcucagccagguugcagaagcggcuuagcguguguccuaaucuucucucugcguguagguaggccugugccgcaaacaagcuuaccauggagcuccccauccucaagaccaacgccaucaccaccauccucgccgccgucacccucugcuucgccuccucccagaacaucaccgaggaguucuaccaguccaccugcuccgccgucuccaagggcuaccucggcgcccuccgcaccggcugguacaccuccgucaucaccaucgagcucuccaacaucaaggagaacaagugcaacggcaccgacgccaaggucaagcucaucaagcaggagcucgacaaguacaagaacgccgucaccgaccuccagcuccucaugcaguccacccccgccgccggcuccggcuccgccaucugcuccggcaucgccgucugcaagguccuccaccucgagggcgaggucaacaagaucaagaacgcccuccucuccaccaacaaggccgucgucucccucuccaacggcgucuccguccucaccuucaagguccucgaccucaagaacuacaucgacaagcagcuccuccccauccucaacaagcaguccugcuccauccccaacaucgagaccgucaucgaguuccagcagaagaacaaccgccuccucgagaucacccgcgaguucuccgucaacgccggcgucaccacccccgucuccaccuacaugcucaccaacuccgagcuccucucccucaucaacgacaugcccaucaccaacgaccagaagaagcucauguccaacaacguccagaucguccgccagcaguccuacuccaucaugugcaucaucaaggaggagguccucgccuacgucguccagcucccccucuacggcgucaucgacacccccugcuggaagcuccacaccuccccccucugcaccaccaacaccaaggagggcuccaacaucugccucacccgcaccgaccgcggcugguacugcgacaacgccggcuccgucuccuucuucccccaggccgagaccugcaagguccaguccaaccgcgucuucugcgacaccaugaacucccucacccuccccuccgaggucaaccucugcaacaucgacaucuucaaccccaaguacgacugcaagaucaugaccuccaagaccgacgucuccuccuccgucaucaccucccucggcgccaucgucuccugcuacggcaagaccaagugcaccgccuccaacaagaaccgcggcaucaucaagaccuucuccaacggcugcgacuacgucuccaacaagggcgucgacaccgucuccgucggcaacacccucuacugcgucaacaagcaggagggccagucccucuacgucaagggcgagcccaucaucaacuucuacgacccccucgucuuccccuccgacgaguucgacgccuccaucucccaggucaacgagaagaucaaccagucccucgccuucauccgcaaguccgacgagcuccuccacaacgucaacgucggcaaguccaccaccaacaucaugaucaccaccaucaucaucgucaucaucgucauccuccuccuccucaucgccgucggccucuuccucuacugcaaggcccgcugaggacuagucccuguucccagagcccacuuuuuuuucuuuuuuugaaauaaaauagccugucuuucagaucuaaaaaaaaaaaaaaaaaaaaaaaaaaaaaaaaaaaaaaaaaaaaaaaaaaaaaaaaaaaaaaaaugcaucccccccccccccccccccccccccccccccaaaggcucuuuucagagccaccagaauu

SEQ ID NO: 15067 - RNA, 1840 nt, Artificial Sequence
  mRNA product Design a-2 comprising derived and/or modified sequence from HRSV(Memphis-37)__AIY60640.1__F-del_DSCav1_mut2 (opt3)
gggagaguccgcucagccagguugcagaagcggcuuagcguguguccuaaucuucucucugcguguagguaggccugugccgcaaacaagcuuaccauggagcugcccauccucaagaccaacgccauuacaacuauacuugcugcagugacgcugugcuucgccagcucccagaauaucaccgaagaguuuuaccaaucuacauguucagcggucaguaaaggcuauuugggggcuuuaagaacuggaugguacaccagcguuauuacaaucgaacuguccaacauuaaggagaauaaaugcaacgguaccgacgccaaggugaaacuaaucaagcaggaacucgauaaguauaaaaaugcaguaacugaccugcagcuucugaugcagucuacuccugccgcuggcucggggucagcaauauguagcggaaucgccgugugcaaggucuugcaccucgagggcgaggugaacaaaauuaagaaugcucugcugaguaccaacaaagccguugugucccucucuaauggugucagcguguuaacguucaagguacuggaucuuaagaacuacaucgacaaacaauugcugccaauucuaaauaagcaguccuguucaaucccgaacauagaaacuguuauugaguuucagcagaaaaauaacaggcuccuggaaaucacccgggaguucagugugaaugcgggggucacaacucccgugagcaccuauaugcuuacaaacucugagcuguugucccucauuaacgauaugccuaucaccaaugaccaaaagaaacugaugucaaacaaugugcagaucguccgccagcagagcuacaguauuaugugcauaaucaaggaagagguuuuagcauaugugguacaacugccacucuacggagugauugauacgcccuguuggaaacuucauacuucuccucugugcacaaccaacacuaaggaaggcuccaauaucuguuugacacgaaccgaccguggcugguacugcgauaacgccgggagcgucucguuuuucccacaggcugagacguguaaggugcagucuaauagaguuuucugcgacaccaugaacucccuaacacugcccucagaagugaaucucugcaacauagauauuuucaauccuaaauaugacuguaagaucaugacaaguaaaaccgaugucagcuccucugugaucacaagccugggagccauuguaucaugcuacgguaagacuaaauguaccgcaaguaacaagaauaggggcaucauuaagacauuuuccaacgggugcgacuauguuagcaauaaaggaguggacaccgucucugugggcaacacucuuuacugugucaacaagcaagagggucagucacuguaugugaaaggggagccaauaaucaauuucuacgauccguugguuuuucccagugacgaauuugaugcuagcauuucccaggugaacgagaagaucaaucagucucucgccuuuauccggaaaucggacgaacuguuacacaacguaaaugucggaaagagcacgacaaacauuaugauaaccacuaucauuaucgugauuaucguuauacugcuacuccugaucgcggugggccuuuucuuguauugcaaggcccgcugaggacuagucccuguucccagagcccacuuuuuuuucuuuuuuugaaauaaaauagccugucuuucagaucuaaaaaaaaaaaaaaaaaaaaaaaaaaaaaaaaaaaaaaaaaaaaaaaaaaaaaaaaaaaaaaaaugcaucccccccccccccccccccccccccccccccaaaggcucuuuucagagccaccagaauu

SEQ ID NO: 15068 - RNA, 1840 nt, Artificial Sequence
  mRNA product Design a-2 comprising derived and/or modified sequence from HRSV(Memphis-37)__AIY60640.1__F-del_DSCav1_mut2 (opt4)
gggagaguccgcucagccagguugcagaagcggcuuagcguguguccuaaucuucucucugcguguagguaggccugugccgcaaacaagcuuaccauggagcugcccauccugaagaccaacgccaucaccaccauccuggccgccgugacccugugcuucgccagcagccagaacaucaccgaggaguucuaccagagcaccugcagcgccgugagcaagggcuaccugggcgcccugagaaccggcugguacaccagcgugaucaccaucgagcugagcaacaucaaggagaacaagugcaacggcaccgacgccaaggugaagcugaucaagcaggagcuggacaaguacaagaacgccgugaccgaccugcagcugcugaugcagagcacccccgccgccggcagcggcagcgccaucugcagcggcaucgccgugugcaaggugcugcaccuggagggcgaggugaacaagaucaagaacgcccugcugagcaccaacaaggccguggugagccugagcaacggcgugagcgugcugaccuucaaggugcuggaccugaagaacuacaucgacaagcagcugcugcccauccugaacaagcagagcugcagcauccccaacaucgagaccgugaucgaguuccagcagaagaacaacagacugcuggagaucaccagagaguucagcgugaacgccggcgugaccacccccgugagcaccuacaugcugaccaacagcgagcugcugagccugaucaacgacaugcccaucaccaacgaccagaagaagcugaugagcaacaacgugcagaucgugagacagcagagcuacagcaucaugugcaucaucaaggaggaggugcuggccuacguggugcagcugccccuguacggcgugaucgacacccccugcuggaagcugcacaccagcccccugugcaccaccaacaccaaggagggcagcaacaucugccugaccagaaccgacagaggcugguacugcgacaacgccggcagcgugagcuucuucccccaggccgagaccugcaaggugcagagcaacagaguguucugcgacaccaugaacagccugacccugcccagcgaggugaaccugugcaacaucgacaucuucaaccccaaguacgacugcaagaucaugaccagcaagaccgacgugagcagcagcgugaucaccagccugggcgccaucgugagcugcuacggcaagaccaagugcaccgccagcaacaagaacagaggcaucaucaagaccuucagcaacggcugcgacuacgugagcaacaagggcguggacaccgugagcgugggcaacacccuguacugcgugaacaagcaggagggccagagccuguacgugaagggcgagcccaucaucaacuucuacgacccccugguguuccccagcgacgaguucgacgccagcaucagccaggugaacgagaagaucaaccagagccuggccuucaucagaaagagcgacgagcugcugcacaacgugaacgugggcaagagcaccaccaacaucaugaucaccaccaucaucaucgugaucaucgugauccugcugcugcugaucgccgugggccuguuccuguacugcaaggccagaugaggacuagucccuguucccagagcccacuuuuuuuucuuuuuuugaaauaaaauagccugucuuucagaucuaaaaaaaaaaaaaaaaaaaaaaaaaaaaaaaaaaaaaaaaaaaaaaaaaaaaaaaaaaaaaaaaugcaucccccccccccccccccccccccccccccccaaaggcucuuuucagagccaccagaauu

SEQ ID NO: 15069 - RNA, 1840 nt, Artificial Sequence
  mRNA product Design a-2 comprising derived and/or modified sequence from HRSV(Memphis-37)__AIY60640.1__F-del_DSCav1_mut2 (opt5)
gggagaguccgcucagccagguugcagaagcggcuuagcguguguccuaaucuucucucugcguguagguaggccugugccgcaaacaagcuuaccauggagcugcccauccucaagaccaacgccauuacaacgauccuggcugccgugacccuuugcuucgcgagcucccagaauauuacagaagaguuuuaccaaucuaccuguagcgcugucuccaaaggcuaucugggggcccucagaacaggaugguacaccucuguuaucacaauugaacugagcaacaucaaggagaauaaaugcaacggcaccgacgccaaggugaaacuuaucaagcaggaacuggauaaguauaaaaaugcugugacggaccuccagcugcugaugcaguccaccccugccgcugggucuggaagcgccauuuguuccggcaucgcggucugcaaggugcuccaccuggagggggagguuaacaaaauuaagaaugcccuucugagcacaaacaaagcuguggucucucucuccaauggagugagcguucugaccuucaaggugcuugaucugaagaacuacaucgacaaacaacuccugccgauucugaauaagcagucuuguuccauccccaacauugaaacagucaucgaguuucagcagaaaaauaaccggcuccuggaaaucacccgcgaguucagcgugaaugccggcgugacgacaccugucucuaccuauaugcuuacaaacuccgagcugcucagccugauuaacgauaugcccaucaccaaugaccaaaagaaacuuauguccaacaauguucagauugugagacagcagucuuacagcaucaugugcauuaucaaggaagaggugcuggcuuaugucgugcaacucccucuguacggcguuaucgauacccccuguuggaaacugcauacauccccucucugcacgaccaacacaaaggaagggagcaauauuugucugacccggacagaccgcggaugguacugcgauaacgccggcucuguguccuuuuucccgcaggcggagaccuguaagguccagagcaauagaguguuuugcgacacgaugaacucucuuacacugcccagcgaaguuaaucucugcaacaucgauauuuucaauccuaaauaugacuguaagaucaugaccuccaaaaccgaugugucuagcuccgucauuacaagccugggggccaucgugucuugcuacggaaagaccaaauguacagcuuccaacaagaaucggggcaucauuaagacguuuagcaacgggugcgacuaugucucuaauaaaggaguggacaccguuuccgugggcaacacacuuuacugugucaacaagcaagagggccagagccuguaugugaaaggggagcccaucauuaauuucuacgauccucucguuuuucccuccgacgaguucgaugccucuaucagccaggugaacgaaaagauuaaucagucccuggcuuuuauccgcaaaucugacgaacugcuccacaacgucaaugugggaaagagcaccacaaacauuaugaucaccacgaucauuaucgugauuaucguuauucugcuucugcucaucgccgucggccuguuccuguauugcaaggccagaugaggacuagucccuguucccagagcccacuuuuuuuucuuuuuuugaaauaaaauagccugucuuucagaucuaaaaaaaaaaaaaaaaaaaaaaaaaaaaaaaaaaaaaaaaaaaaaaaaaaaaaaaaaaaaaaaaugcaucccccccccccccccccccccccccccccccaaaggcucuuuucagagccaccagaauu

SEQ ID NO: 15070 - RNA, 1840 nt, Artificial Sequence
  mRNA product Design a-2 comprising derived and/or modified sequence from HRSV(Memphis-37)__AIY60640.1__F-del_DSCav1_mut2 (opt6)
gggagaguccgcucagccagguugcagaagcggcuuagcguguguccuaaucuucucucugcguguagguaggccugugccgcaaacaagcuuaccauggaacuaccaauacucaaaacaaacgcaauaacaacaauuuuagcugcaguaacacuuuguuucgcauccucccaaaauauaacagaagaauuuuaucaaucaaccugcucagccgucuccaaaggauaucuaggugcacuacgcacuggaugguacacaagugucaucacaauagaacuuuccaacaucaaagaaaauaaauguaauggaacugacgcaaaaguaaaacucauaaaacaagaacuagacaaauacaaaaacgcaguaacagaccuacaacuauuaaugcaaucaacaccagcagcaggauccggcagugccauaugcucuggaauagcagucugcaaaguuuuacacuuagaaggcgaaguaaacaaaaucaaaaacgcccuacuaucuacaaauaaagccgucguaucucucucaaauggaguaucaguacuaacauucaaaguauuagacuuaaaaaacuacaucgauaaacaauuauugccaauauuaaacaaacaaucuugcucaauaccaaauauagaaacagucauagaauuucaacaaaaaaauaaccgauuauuagaaauaacacgagaauuuucaguaaaugccggagucaccacaccaguaucaacauacaugcuaacaaauucagaacuauuaucauuaauaaacgacaugccuauuacaaaugaucaaaaaaaacuaauguccaacaauguacaaauaguccgacaacaaagcuacucaaucauguguauaauaaaagaagaaguacuugcauacguaguacaauuaccacuauacggaguuaucgacacaccaugcuggaaacuccacacuucaccacucugcaccacaaacacaaaagaaggcucaaacauaugccuaacaagaacagaccgaggaugguacugcgacaacgcaggaucaguaucauucuucccacaagcagaaacuugcaaaguacaaucuaacagaguuuucugugacaccaugaauagccuaacacuccccuccgaaguuaaccuauguaacauagauauauuuaaucccaaauaugauugcaaaaucaugacaucuaaaaccgacguaucaucaucuguaaucacaucacuaggugccauagucucaugcuacggcaaaacaaaaugcaccgccucaaacaaaaaccgagguauaauaaaaaccuucaguaauggaugugacuacguaucaaacaaagguguugauaccguaagcgucggcaacacccuauacugcguaaauaaacaagaaggccaaucacuauacgucaaaggcgaaccaauuauuaacuucuaugacccacucgucuuucccuccgacgaauuugacgcaagcauaucacaaguaaacgaaaaaauaaaccaaucacuagcauucauacgcaaaucagaugaacuacuacauaacguaaacguaggaaaauccacuacaaauauaaugaucacaacaauaauaaucguaauuauagucauauuauuacuacuaauagcaguaggacuuuuccuauacuguaaagcaagauaaggacuagucccuguucccagagcccacuuuuuuuucuuuuuuugaaauaaaauagccugucuuucagaucuaaaaaaaaaaaaaaaaaaaaaaaaaaaaaaaaaaaaaaaaaaaaaaaaaaaaaaaaaaaaaaaaugcaucccccccccccccccccccccccccccccccaaaggcucuuuucagagccaccagaauu

SEQ ID NO: 15071 - RNA, 1840 nt, Artificial Sequence
  mRNA product Design a-2 comprising derived and/or modified sequence from HRSV(Memphis-37)__AIY60640.1__F-del_DSCav1_mut2 (opt11)
gggagaguccgcucagccagguugcagaagcggcuuagcguguguccuaaucuucucucugcguguagguaggccugugccgcaaacaagcuuaccauggaacuucccauccucaagaccaacgcuauuacgaccauccucgccgcagucacccucugcuucgcgucaucccaaaacaucaccgaagaauuuuaccaauccacaugcuccgcagucucaaaaggcuaccuaggagcccuacgcaccggaugguacacauccgucaucacaaucgaacucuccaacauaaaagaaaacaaaugcaacggcaccgaugccaaaguaaaacugauuaaacaagaacucgacaaauacaagaacgccgucacagaccuacagcuccucaugcaaucaacucccgccgccggcagcggauccgcuaucugcucaggcaucgccguaugcaaaguccuccaccuagaaggcgaaguaaacaaaaucaagaacgcacuacucucaacaaacaaagccgucgucucccucuccaacggcgucuccguccuuaccuucaaaguccucgaccuuaagaacuacauugacaaacaacuccuacccauccucaacaaacaauccugcucuauaccuaauauagaaaccguaaucgaauuucaacagaaaaacaaccgccuccucgaaauuacccgcgaguucucaguaaacgccggcguaaccacccccgucuccaccuacaugcucacaaauucagaacuccucagccucaucaacgacaugcccauaaccaacgaccaaaagaaacucaugucaaacaacguccaaaucgucaggcaacaaagcuacagcaucaugugcaucauuaaagaagaaguacucgccuacgucgugcaacuaccccucuacggcgucauagacacacccugcuggaaacuucacacaucaccgcucugcaccacaaacaccaaagaaggcaguaacauaugccucacccgaaccgaccgcggaugguacugcgacaacgccggauccgucagcuucuucccacaagccgaaaccugcaaaguacaauccaaccgagucuucugcgacaccaugaacucucuuacgcuccccucagaagucaaccuaugcaacaucgacaucuucaaccccaaauacgacugcaaaaucaugaccuccaaaacagacgucuccuccucagugauaaccucccucggcgccauugucuccugcuacggcaaaaccaaaugcaccgccuccaacaaaaaccgugggaucaucaaaaccuucucaaacggcugcgacuacguauccaauaagggugucgacacagucuccguaggcaauacccucuauugcgucaacaaacaagaaggccaaucccucuacgucaaaggcgaaccuaucaucaacuucuacgacccgcuagucuuccccucagacgaguucgacgcauccaucucacaagucaacgaaaagaucaaccagucccucgcauucauccgaaaauccgacgaacuucuccacaacguuaacgucggcaaauccaccacuaacauaaugaucaccacgaucaucauaguaauuaucgucauacuccuccuccuaaucgcugucggacucuuccucuacugcaaggcccgcuaaggacuagucccuguucccagagcccacuuuuuuuucuuuuuuugaaauaaaauagccugucuuucagaucuaaaaaaaaaaaaaaaaaaaaaaaaaaaaaaaaaaaaaaaaaaaaaaaaaaaaaaaaaaaaaaaaugcaucccccccccccccccccccccccccccccccaaaggcucuuuucagagccaccagaauu

SEQ ID NO: 15072 - RNA, 1918 nt, Artificial Sequence
  mRNA product Design a-3 comprising derived and/or modified sequence from HRSV(Memphis-37)__AIY60640.1__F-del_DSCav1_mut2 (opt1)
gggagagggcgcuuggcuugcaaggacccugagcugcggcauugaagcacacccaacccaacucgacugaagucagccucacugaaccggaucugagaaucuucucucucugggcuugccagggcucuccgaaccuagcuagcauccucuucaauuccaacuagaaagcuuaccauggagcugcccauccucaagaccaacgccaucaccacgauccuggccgcggugacccugugcuucgccagcucccagaacaucaccgaggaguucuaccagagcacgugcuccgccgucagcaagggcuaccucggcgcccugcgcaccgggugguacaccagcgugaucaccaucgagcuguccaacaucaaggagaacaagugcaacggcaccgacgccaaggugaagcucaucaagcaggagcuggacaaguacaagaacgcggucacggaccugcagcuccugaugcagagcaccccggccgccggcuccgggagcgcgaucugcuccggcaucgccgucugcaaggugcugcaccucgagggcgaggugaacaagaucaagaacgcccugcuguccaccaacaaggccgucgugagccucuccaacggggugagcguccugaccuucaaggugcuggaccucaagaacuacaucgacaagcagcugcugcccauccugaacaagcagagcugcuccauccccaacaucgagaccgucaucgaguuccagcagaagaacaaccgccuccuggagaucacgcgggaguucagcgugaacgcgggcgugaccacccccgucuccaccuacaugcugacgaacagcgagcuccugucccugaucaacgacaugccgaucaccaacgaccagaagaagcucaugagcaacaacgugcagaucgugcgccagcaguccuacagcaucaugugcaucaucaaggaggagguccuggccuacguggugcagcugccccucuacggggucaucgacacccccugcuggaagcugcacaccagcccccugugcacgaccaacaccaaggagggcuccaacaucugccucacccggacggaccgcgggugguacugcgacaacgccggcagcguguccuucuucccgcaggccgagaccugcaagguccagagcaaccggguguucugcgacaccaugaacucccugacccugcccagcgaggugaaccucugcaacaucgacaucuucaaccccaaguacgacugcaagaucaugacguccaagaccgacgucagcuccagcgugaucaccucccugggcgccaucgugagcugcuacgggaagaccaagugcacggcgagcaacaagaaccgcggcaucaucaagaccuucuccaacgggugcgacuacgucagcaacaagggcguggacaccguguccgucggcaacacccuguacugcgugaacaagcaggagggccagagccucuacgugaagggggagcccaucaucaacuucuacgacccgcuggucuuccccuccgacgaguucgacgccagcaucucccaggugaacgagaagaucaaccagagccuggccuucauccggaaguccgacgagcuccugcacaacgugaacgucggcaagagcaccacgaacaucaugaucaccaccaucaucaucgugaucaucgugauccugcugcuccugaucgccgucgggcuguuccucuacugcaaggcccgcugaggacuagucccuguucccagagcccacuuuuuuuucuuuuuuugaaauaaaauagccugucuuucagaucuaaaaaaaaaaaaaaaaaaaaaaaaaaaaaaaaaaaaaaaaaaaaaaaaaaaaaaaaaaaaaaaaugcaucccccccccccccccccccccccccccccccaaaggcucuuuucagagccaccagaauu

SEQ ID NO: 15073 - RNA, 1918 nt, Artificial Sequence
  mRNA product Design a-3 comprising derived and/or modified sequence from HRSV(Memphis-37)__AIY60640.1__F-del_DSCav1_mut2 (opt1)
gggagagggcgcuuggcuugcaaggacccugagcugcggcauugaagcacacccaacccaacucgacugaagucagccucacugaaccggaucugagaaucuucucucucugggcuugccagggcucuccgaaccuagcuagcauccucuucaauuccaacuagaaagcuuaccauggagcugcccauccucaagaccaacgccaucaccacgauccuggccgcggugacccugugcuucgccagcucccagaacaucaccgaggaguucuaccagagcacgugcuccgccgucagcaagggcuaccucggggcccugcgcaccggcugguacaccuccgugaucaccaucgagcugagcaacaucaaggagaacaagugcaacgggaccgacgccaaggugaagcucaucaagcaggagcuggacaaguacaagaacgcggucacggaccugcagcuccugaugcaguccaccccggccgccggcagcggguccgccaucugcagcggcaucgcggugugcaaggugcugcaccucgagggcgaggucaacaagaucaagaacgcccugcuguccaccaacaaggccguggugagccucuccaacggggucagcgugcugaccuucaaggugcuggaccucaagaacuacaucgacaagcagcugcugcccauccucaacaagcaguccugcagcauccccaacaucgagacggucaucgaguuccagcagaagaacaaccggcugcuggagaucacccgcgaguucuccgugaacgccggcgugaccacccccgucagcacguacaugcucaccaacuccgagcugcugagccucaucaacgacaugccgaucaccaacgaccagaagaagcugaugagcaacaacgugcagaucgugcggcagcaguccuacagcaucaugugcaucaucaaggaggagguccuggccuacguggugcagcucccccuguacggggucaucgacacccccugcuggaagcugcacacgagcccccucugcaccaccaacaccaaggagggcuccaacaucugccugacgcgcaccgaccgggggugguacugcgacaacgcgggcuccgugagcuucuucccgcaggccgagaccugcaaggugcaguccaaccgcgucuucugcgacaccaugaacagccugacgcuccccuccgaggugaaccugugcaacaucgacaucuucaaccccaaguacgacugcaagaucaugaccagcaagaccgacgucuccagcuccgugaucaccagccugggcgccaucguguccugcuacgggaagacgaagugcaccgccagcaacaagaaccggggcaucaucaagaccuucuccaacgggugcgacuacgucagcaacaagggcguggacaccguguccgucggcaacacgcucuacugcgugaacaagcaggaggggcagagccuguacgugaagggcgagcccaucaucaacuucuacgacccgcuggucuuccccagcgacgaguucgacgccuccaucagccaggugaacgagaagaucaaccagucccucgcguucauccgcaagagcgacgagcugcugcacaacgugaacgucgggaaguccaccaccaacaucaugaucaccaccaucaucaucgugaucaucgugauccuccugcugcucaucgccgucggccuguuccuguacugcaaggcccggugaggacuagucccuguucccagagcccacuuuuuuuucuuuuuuugaaauaaaauagccugucuuucagaucuaaaaaaaaaaaaaaaaaaaaaaaaaaaaaaaaaaaaaaaaaaaaaaaaaaaaaaaaaaaaaaaaugcaucccccccccccccccccccccccccccccccaaaggcucuuuucagagccaccagaauu

SEQ ID NO: 15074 - RNA, 1918 nt, Artificial Sequence
  mRNA product Design a-3 comprising derived and/or modified sequence from HRSV(Memphis-37)__AIY60640.1__F-del_DSCav1_mut2 (opt2)
gggagagggcgcuuggcuugcaaggacccugagcugcggcauugaagcacacccaacccaacucgacugaagucagccucacugaaccggaucugagaaucuucucucucugggcuugccagggcucuccgaaccuagcuagcauccucuucaauuccaacuagaaagcuuaccauggagcuccccauccucaagaccaacgccaucaccaccauccucgccgccgucacccucugcuucgccuccucccagaacaucaccgaggaguucuaccaguccaccugcuccgccgucuccaagggcuaccucggcgcccuccgcaccggcugguacaccuccgucaucaccaucgagcucuccaacaucaaggagaacaagugcaacggcaccgacgccaaggucaagcucaucaagcaggagcucgacaaguacaagaacgccgucaccgaccuccagcuccucaugcaguccacccccgccgccggcuccggcuccgccaucugcuccggcaucgccgucugcaagguccuccaccucgagggcgaggucaacaagaucaagaacgcccuccucuccaccaacaaggccgucgucucccucuccaacggcgucuccguccucaccuucaagguccucgaccucaagaacuacaucgacaagcagcuccuccccauccucaacaagcaguccugcuccauccccaacaucgagaccgucaucgaguuccagcagaagaacaaccgccuccucgagaucacccgcgaguucuccgucaacgccggcgucaccacccccgucuccaccuacaugcucaccaacuccgagcuccucucccucaucaacgacaugcccaucaccaacgaccagaagaagcucauguccaacaacguccagaucguccgccagcaguccuacuccaucaugugcaucaucaaggaggagguccucgccuacgucguccagcucccccucuacggcgucaucgacacccccugcuggaagcuccacaccuccccccucugcaccaccaacaccaaggagggcuccaacaucugccucacccgcaccgaccgcggcugguacugcgacaacgccggcuccgucuccuucuucccccaggccgagaccugcaagguccaguccaaccgcgucuucugcgacaccaugaacucccucacccuccccuccgaggucaaccucugcaacaucgacaucuucaaccccaaguacgacugcaagaucaugaccuccaagaccgacgucuccuccuccgucaucaccucccucggcgccaucgucuccugcuacggcaagaccaagugcaccgccuccaacaagaaccgcggcaucaucaagaccuucuccaacggcugcgacuacgucuccaacaagggcgucgacaccgucuccgucggcaacacccucuacugcgucaacaagcaggagggccagucccucuacgucaagggcgagcccaucaucaacuucuacgacccccucgucuuccccuccgacgaguucgacgccuccaucucccaggucaacgagaagaucaaccagucccucgccuucauccgcaaguccgacgagcuccuccacaacgucaacgucggcaaguccaccaccaacaucaugaucaccaccaucaucaucgucaucaucgucauccuccuccuccucaucgccgucggccucuuccucuacugcaaggcccgcugaggacuagucccuguucccagagcccacuuuuuuuucuuuuuuugaaauaaaauagccugucuuucagaucuaaaaaaaaaaaaaaaaaaaaaaaaaaaaaaaaaaaaaaaaaaaaaaaaaaaaaaaaaaaaaaaaugcaucccccccccccccccccccccccccccccccaaaggcucuuuucagagccaccagaauu

SEQ ID NO: 15075 - RNA, 1918 nt, Artificial Sequence
  mRNA product Design a-3 comprising derived and/or modified sequence from HRSV(Memphis-37)__AIY60640.1__F-del_DSCav1_mut2 (opt3)
gggagagggcgcuuggcuugcaaggacccugagcugcggcauugaagcacacccaacccaacucgacugaagucagccucacugaaccggaucugagaaucuucucucucugggcuugccagggcucuccgaaccuagcuagcauccucuucaauuccaacuagaaagcuuaccauggagcugcccauccucaagaccaacgccauuacaacuauacuugcugcagugacgcugugcuucgccagcucccagaauaucaccgaagaguuuuaccaaucuacauguucagcggucaguaaaggcuauuugggggcuuuaagaacuggaugguacaccagcguuauuacaaucgaacuguccaacauuaaggagaauaaaugcaacgguaccgacgccaaggugaaacuaaucaagcaggaacucgauaaguauaaaaaugcaguaacugaccugcagcuucugaugcagucuacuccugccgcuggcucggggucagcaauauguagcggaaucgccgugugcaaggucuugcaccucgagggcgaggugaacaaaauuaagaaugcucugcugaguaccaacaaagccguugugucccucucuaauggugucagcguguuaacguucaagguacuggaucuuaagaacuacaucgacaaacaauugcugccaauucuaaauaagcaguccuguucaaucccgaacauagaaacuguuauugaguuucagcagaaaaauaacaggcuccuggaaaucacccgggaguucagugugaaugcgggggucacaacucccgugagcaccuauaugcuuacaaacucugagcuguugucccucauuaacgauaugccuaucaccaaugaccaaaagaaacugaugucaaacaaugugcagaucguccgccagcagagcuacaguauuaugugcauaaucaaggaagagguuuuagcauaugugguacaacugccacucuacggagugauugauacgcccuguuggaaacuucauacuucuccucugugcacaaccaacacuaaggaaggcuccaauaucuguuugacacgaaccgaccguggcugguacugcgauaacgccgggagcgucucguuuuucccacaggcugagacguguaaggugcagucuaauagaguuuucugcgacaccaugaacucccuaacacugcccucagaagugaaucucugcaacauagauauuuucaauccuaaauaugacuguaagaucaugacaaguaaaaccgaugucagcuccucugugaucacaagccugggagccauuguaucaugcuacgguaagacuaaauguaccgcaaguaacaagaauaggggcaucauuaagacauuuuccaacgggugcgacuauguuagcaauaaaggaguggacaccgucucugugggcaacacucuuuacugugucaacaagcaagagggucagucacuguaugugaaaggggagccaauaaucaauuucuacgauccguugguuuuucccagugacgaauuugaugcuagcauuucccaggugaacgagaagaucaaucagucucucgccuuuauccggaaaucggacgaacuguuacacaacguaaaugucggaaagagcacgacaaacauuaugauaaccacuaucauuaucgugauuaucguuauacugcuacuccugaucgcggugggccuuuucuuguauugcaaggcccgcugaggacuagucccuguucccagagcccacuuuuuuuucuuuuuuugaaauaaaauagccugucuuucagaucuaaaaaaaaaaaaaaaaaaaaaaaaaaaaaaaaaaaaaaaaaaaaaaaaaaaaaaaaaaaaaaaaugcaucccccccccccccccccccccccccccccccaaaggcucuuuucagagccaccagaauu

SEQ ID NO: 15076 - RNA, 1918 nt, Artificial Sequence
  mRNA product Design a-3 comprising derived and/or modified sequence from HRSV(Memphis-37)__AIY60640.1__F-del_DSCav1_mut2 (opt4)
gggagagggcgcuuggcuugcaaggacccugagcugcggcauugaagcacacccaacccaacucgacugaagucagccucacugaaccggaucugagaaucuucucucucugggcuugccagggcucuccgaaccuagcuagcauccucuucaauuccaacuagaaagcuuaccauggagcugcccauccugaagaccaacgccaucaccaccauccuggccgccgugacccugugcuucgccagcagccagaacaucaccgaggaguucuaccagagcaccugcagcgccgugagcaagggcuaccugggcgcccugagaaccggcugguacaccagcgugaucaccaucgagcugagcaacaucaaggagaacaagugcaacggcaccgacgccaaggugaagcugaucaagcaggagcuggacaaguacaagaacgccgugaccgaccugcagcugcugaugcagagcacccccgccgccggcagcggcagcgccaucugcagcggcaucgccgugugcaaggugcugcaccuggagggcgaggugaacaagaucaagaacgcccugcugagcaccaacaaggccguggugagccugagcaacggcgugagcgugcugaccuucaaggugcuggaccugaagaacuacaucgacaagcagcugcugcccauccugaacaagcagagcugcagcauccccaacaucgagaccgugaucgaguuccagcagaagaacaacagacugcuggagaucaccagagaguucagcgugaacgccggcgugaccacccccgugagcaccuacaugcugaccaacagcgagcugcugagccugaucaacgacaugcccaucaccaacgaccagaagaagcugaugagcaacaacgugcagaucgugagacagcagagcuacagcaucaugugcaucaucaaggaggaggugcuggccuacguggugcagcugccccuguacggcgugaucgacacccccugcuggaagcugcacaccagcccccugugcaccaccaacaccaaggagggcagcaacaucugccugaccagaaccgacagaggcugguacugcgacaacgccggcagcgugagcuucuucccccaggccgagaccugcaaggugcagagcaacagaguguucugcgacaccaugaacagccugacccugcccagcgaggugaaccugugcaacaucgacaucuucaaccccaaguacgacugcaagaucaugaccagcaagaccgacgugagcagcagcgugaucaccagccugggcgccaucgugagcugcuacggcaagaccaagugcaccgccagcaacaagaacagaggcaucaucaagaccuucagcaacggcugcgacuacgugagcaacaagggcguggacaccgugagcgugggcaacacccuguacugcgugaacaagcaggagggccagagccuguacgugaagggcgagcccaucaucaacuucuacgacccccugguguuccccagcgacgaguucgacgccagcaucagccaggugaacgagaagaucaaccagagccuggccuucaucagaaagagcgacgagcugcugcacaacgugaacgugggcaagagcaccaccaacaucaugaucaccaccaucaucaucgugaucaucgugauccugcugcugcugaucgccgugggccuguuccuguacugcaaggccagaugaggacuagucccuguucccagagcccacuuuuuuuucuuuuuuugaaauaaaauagccugucuuucagaucuaaaaaaaaaaaaaaaaaaaaaaaaaaaaaaaaaaaaaaaaaaaaaaaaaaaaaaaaaaaaaaaaugcaucccccccccccccccccccccccccccccccaaaggcucuuuucagagccaccagaauu

SEQ ID NO: 15077 - RNA, 1918 nt, Artificial Sequence
  mRNA product Design a-3 comprising derived and/or modified sequence from HRSV(Memphis-37)__AIY60640.1__F-del_DSCav1_mut2 (opt5)
gggagagggcgcuuggcuugcaaggacccugagcugcggcauugaagcacacccaacccaacucgacugaagucagccucacugaaccggaucugagaaucuucucucucugggcuugccagggcucuccgaaccuagcuagcauccucuucaauuccaacuagaaagcuuaccauggagcugcccauccucaagaccaacgccauuacaacgauccuggcugccgugacccuuugcuucgcgagcucccagaauauuacagaagaguuuuaccaaucuaccuguagcgcugucuccaaaggcuaucugggggcccucagaacaggaugguacaccucuguuaucacaauugaacugagcaacaucaaggagaauaaaugcaacggcaccgacgccaaggugaaacuuaucaagcaggaacuggauaaguauaaaaaugcugugacggaccuccagcugcugaugcaguccaccccugccgcugggucuggaagcgccauuuguuccggcaucgcggucugcaaggugcuccaccuggagggggagguuaacaaaauuaagaaugcccuucugagcacaaacaaagcuguggucucucucuccaauggagugagcguucugaccuucaaggugcuugaucugaagaacuacaucgacaaacaacuccugccgauucugaauaagcagucuuguuccauccccaacauugaaacagucaucgaguuucagcagaaaaauaaccggcuccuggaaaucacccgcgaguucagcgugaaugccggcgugacgacaccugucucuaccuauaugcuuacaaacuccgagcugcucagccugauuaacgauaugcccaucaccaaugaccaaaagaaacuuauguccaacaauguucagauugugagacagcagucuuacagcaucaugugcauuaucaaggaagaggugcuggcuuaugucgugcaacucccucuguacggcguuaucgauacccccuguuggaaacugcauacauccccucucugcacgaccaacacaaaggaagggagcaauauuugucugacccggacagaccgcggaugguacugcgauaacgccggcucuguguccuuuuucccgcaggcggagaccuguaagguccagagcaauagaguguuuugcgacacgaugaacucucuuacacugcccagcgaaguuaaucucugcaacaucgauauuuucaauccuaaauaugacuguaagaucaugaccuccaaaaccgaugugucuagcuccgucauuacaagccugggggccaucgugucuugcuacggaaagaccaaauguacagcuuccaacaagaaucggggcaucauuaagacguuuagcaacgggugcgacuaugucucuaauaaaggaguggacaccguuuccgugggcaacacacuuuacugugucaacaagcaagagggccagagccuguaugugaaaggggagcccaucauuaauuucuacgauccucucguuuuucccuccgacgaguucgaugccucuaucagccaggugaacgaaaagauuaaucagucccuggcuuuuauccgcaaaucugacgaacugcuccacaacgucaaugugggaaagagcaccacaaacauuaugaucaccacgaucauuaucgugauuaucguuauucugcuucugcucaucgccgucggccuguuccuguauugcaaggccagaugaggacuagucccuguucccagagcccacuuuuuuuucuuuuuuugaaauaaaauagccugucuuucagaucuaaaaaaaaaaaaaaaaaaaaaaaaaaaaaaaaaaaaaaaaaaaaaaaaaaaaaaaaaaaaaaaaugcaucccccccccccccccccccccccccccccccaaaggcucuuuucagagccaccagaauu

SEQ ID NO: 15078 - RNA, 1918 nt, Artificial Sequence
  mRNA product Design a-3 comprising derived and/or modified sequence from HRSV(Memphis-37)__AIY60640.1__F-del_DSCav1_mut2 (opt6)
gggagagggcgcuuggcuugcaaggacccugagcugcggcauugaagcacacccaacccaacucgacugaagucagccucacugaaccggaucugagaaucuucucucucugggcuugccagggcucuccgaaccuagcuagcauccucuucaauuccaacuagaaagcuuaccauggaacuaccaauacucaaaacaaacgcaauaacaacaauuuuagcugcaguaacacuuuguuucgcauccucccaaaauauaacagaagaauuuuaucaaucaaccugcucagccgucuccaaaggauaucuaggugcacuacgcacuggaugguacacaagugucaucacaauagaacuuuccaacaucaaagaaaauaaauguaauggaacugacgcaaaaguaaaacucauaaaacaagaacuagacaaauacaaaaacgcaguaacagaccuacaacuauuaaugcaaucaacaccagcagcaggauccggcagugccauaugcucuggaauagcagucugcaaaguuuuacacuuagaaggcgaaguaaacaaaaucaaaaacgcccuacuaucuacaaauaaagccgucguaucucucucaaauggaguaucaguacuaacauucaaaguauuagacuuaaaaaacuacaucgauaaacaauuauugccaauauuaaacaaacaaucuugcucaauaccaaauauagaaacagucauagaauuucaacaaaaaaauaaccgauuauuagaaauaacacgagaauuuucaguaaaugccggagucaccacaccaguaucaacauacaugcuaacaaauucagaacuauuaucauuaauaaacgacaugccuauuacaaaugaucaaaaaaaacuaauguccaacaauguacaaauaguccgacaacaaagcuacucaaucauguguauaauaaaagaagaaguacuugcauacguaguacaauuaccacuauacggaguuaucgacacaccaugcuggaaacuccacacuucaccacucugcaccacaaacacaaaagaaggcucaaacauaugccuaacaagaacagaccgaggaugguacugcgacaacgcaggaucaguaucauucuucccacaagcagaaacuugcaaaguacaaucuaacagaguuuucugugacaccaugaauagccuaacacuccccuccgaaguuaaccuauguaacauagauauauuuaaucccaaauaugauugcaaaaucaugacaucuaaaaccgacguaucaucaucuguaaucacaucacuaggugccauagucucaugcuacggcaaaacaaaaugcaccgccucaaacaaaaaccgagguauaauaaaaaccuucaguaauggaugugacuacguaucaaacaaagguguugauaccguaagcgucggcaacacccuauacugcguaaauaaacaagaaggccaaucacuauacgucaaaggcgaaccaauuauuaacuucuaugacccacucgucuuucccuccgacgaauuugacgcaagcauaucacaaguaaacgaaaaaauaaaccaaucacuagcauucauacgcaaaucagaugaacuacuacauaacguaaacguaggaaaauccacuacaaauauaaugaucacaacaauaauaaucguaauuauagucauauuauuacuacuaauagcaguaggacuuuuccuauacuguaaagcaagauaaggacuagucccuguucccagagcccacuuuuuuuucuuuuuuugaaauaaaauagccugucuuucagaucuaaaaaaaaaaaaaaaaaaaaaaaaaaaaaaaaaaaaaaaaaaaaaaaaaaaaaaaaaaaaaaaaugcaucccccccccccccccccccccccccccccccaaaggcucuuuucagagccaccagaauu

SEQ ID NO: 15079 - RNA, 1918 nt, Artificial Sequence
  mRNA product Design a-3 comprising derived and/or modified sequence from HRSV(Memphis-37)__AIY60640.1__F-del_DSCav1_mut2 (opt11)
gggagagggcgcuuggcuugcaaggacccugagcugcggcauugaagcacacccaacccaacucgacugaagucagccucacugaaccggaucugagaaucuucucucucugggcuugccagggcucuccgaaccuagcuagcauccucuucaauuccaacuagaaagcuuaccauggaacuucccauccucaagaccaacgcuauuacgaccauccucgccgcagucacccucugcuucgcgucaucccaaaacaucaccgaagaauuuuaccaauccacaugcuccgcagucucaaaaggcuaccuaggagcccuacgcaccggaugguacacauccgucaucacaaucgaacucuccaacauaaaagaaaacaaaugcaacggcaccgaugccaaaguaaaacugauuaaacaagaacucgacaaauacaagaacgccgucacagaccuacagcuccucaugcaaucaacucccgccgccggcagcggauccgcuaucugcucaggcaucgccguaugcaaaguccuccaccuagaaggcgaaguaaacaaaaucaagaacgcacuacucucaacaaacaaagccgucgucucccucuccaacggcgucuccguccuuaccuucaaaguccucgaccuuaagaacuacauugacaaacaacuccuacccauccucaacaaacaauccugcucuauaccuaauauagaaaccguaaucgaauuucaacagaaaaacaaccgccuccucgaaauuacccgcgaguucucaguaaacgccggcguaaccacccccgucuccaccuacaugcucacaaauucagaacuccucagccucaucaacgacaugcccauaaccaacgaccaaaagaaacucaugucaaacaacguccaaaucgucaggcaacaaagcuacagcaucaugugcaucauuaaagaagaaguacucgccuacgucgugcaacuaccccucuacggcgucauagacacacccugcuggaaacuucacacaucaccgcucugcaccacaaacaccaaagaaggcaguaacauaugccucacccgaaccgaccgcggaugguacugcgacaacgccggauccgucagcuucuucccacaagccgaaaccugcaaaguacaauccaaccgagucuucugcgacaccaugaacucucuuacgcuccccucagaagucaaccuaugcaacaucgacaucuucaaccccaaauacgacugcaaaaucaugaccuccaaaacagacgucuccuccucagugauaaccucccucggcgccauugucuccugcuacggcaaaaccaaaugcaccgccuccaacaaaaaccgugggaucaucaaaaccuucucaaacggcugcgacuacguauccaauaagggugucgacacagucuccguaggcaauacccucuauugcgucaacaaacaagaaggccaaucccucuacgucaaaggcgaaccuaucaucaacuucuacgacccgcuagucuuccccucagacgaguucgacgcauccaucucacaagucaacgaaaagaucaaccagucccucgcauucauccgaaaauccgacgaacuucuccacaacguuaacgucggcaaauccaccacuaacauaaugaucaccacgaucaucauaguaauuaucgucauacuccuccuccuaaucgcugucggacucuuccucuacugcaaggcccgcuaaggacuagucccuguucccagagcccacuuuuuuuucuuuuuuugaaauaaaauagccugucuuucagaucuaaaaaaaaaaaaaaaaaaaaaaaaaaaaaaaaaaaaaaaaaaaaaaaaaaaaaaaaaaaaaaaaugcaucccccccccccccccccccccccccccccccaaaggcucuuuucagagccaccagaauu

SEQ ID NO: 15080 - RNA, 1867 nt, Artificial Sequence
  mRNA product Design a-4 comprising derived and/or modified sequence from HRSV(Memphis-37)__AIY60640.1__F-del_DSCav1_mut2 (opt1)
gggagacuccugucgggcggaaguaggaggaguagaguuuaaaaacaguacucuuuuuccgguucgggacguaguugaagcaacgacaagccggauaaccgcucuugagacaggaagcuuaccauggagcugcccauccucaagaccaacgccaucaccacgauccuggccgcggugacccugugcuucgccagcucccagaacaucaccgaggaguucuaccagagcacgugcuccgccgucagcaagggcuaccucggcgcccugcgcaccgggugguacaccagcgugaucaccaucgagcuguccaacaucaaggagaacaagugcaacggcaccgacgccaaggugaagcucaucaagcaggagcuggacaaguacaagaacgcggucacggaccugcagcuccugaugcagagcaccccggccgccggcuccgggagcgcgaucugcuccggcaucgccgucugcaaggugcugcaccucgagggcgaggugaacaagaucaagaacgcccugcuguccaccaacaaggccgucgugagccucuccaacggggugagcguccugaccuucaaggugcuggaccucaagaacuacaucgacaagcagcugcugcccauccugaacaagcagagcugcuccauccccaacaucgagaccgucaucgaguuccagcagaagaacaaccgccuccuggagaucacgcgggaguucagcgugaacgcgggcgugaccacccccgucuccaccuacaugcugacgaacagcgagcuccugucccugaucaacgacaugccgaucaccaacgaccagaagaagcucaugagcaacaacgugcagaucgugcgccagcaguccuacagcaucaugugcaucaucaaggaggagguccuggccuacguggugcagcugccccucuacggggucaucgacacccccugcuggaagcugcacaccagcccccugugcacgaccaacaccaaggagggcuccaacaucugccucacccggacggaccgcgggugguacugcgacaacgccggcagcguguccuucuucccgcaggccgagaccugcaagguccagagcaaccggguguucugcgacaccaugaacucccugacccugcccagcgaggugaaccucugcaacaucgacaucuucaaccccaaguacgacugcaagaucaugacguccaagaccgacgucagcuccagcgugaucaccucccugggcgccaucgugagcugcuacgggaagaccaagugcacggcgagcaacaagaaccgcggcaucaucaagaccuucuccaacgggugcgacuacgucagcaacaagggcguggacaccguguccgucggcaacacccuguacugcgugaacaagcaggagggccagagccucuacgugaagggggagcccaucaucaacuucuacgacccgcuggucuuccccuccgacgaguucgacgccagcaucucccaggugaacgagaagaucaaccagagccuggccuucauccggaaguccgacgagcuccugcacaacgugaacgucggcaagagcaccacgaacaucaugaucaccaccaucaucaucgugaucaucgugauccugcugcuccugaucgccgucgggcuguuccucuacugcaaggcccgcugaggacuagucccuguucccagagcccacuuuuuuuucuuuuuuugaaauaaaauagccugucuuucagaucuaaaaaaaaaaaaaaaaaaaaaaaaaaaaaaaaaaaaaaaaaaaaaaaaaaaaaaaaaaaaaaaaugcaucccccccccccccccccccccccccccccccaaaggcucuuuucagagccaccagaauu

SEQ ID NO: 15081 - RNA, 1867 nt, Artificial Sequence
  mRNA product Design a-4 comprising derived and/or modified sequence from HRSV(Memphis-37)__AIY60640.1__F-del_DSCav1_mut2 (opt1)
gggagacuccugucgggcggaaguaggaggaguagaguuuaaaaacaguacucuuuuuccgguucgggacguaguugaagcaacgacaagccggauaaccgcucuugagacaggaagcuuaccauggagcugcccauccucaagaccaacgccaucaccacgauccuggccgcggugacccugugcuucgccagcucccagaacaucaccgaggaguucuaccagagcacgugcuccgccgucagcaagggcuaccucggggcccugcgcaccggcugguacaccuccgugaucaccaucgagcugagcaacaucaaggagaacaagugcaacgggaccgacgccaaggugaagcucaucaagcaggagcuggacaaguacaagaacgcggucacggaccugcagcuccugaugcaguccaccccggccgccggcagcggguccgccaucugcagcggcaucgcggugugcaaggugcugcaccucgagggcgaggucaacaagaucaagaacgcccugcuguccaccaacaaggccguggugagccucuccaacggggucagcgugcugaccuucaaggugcuggaccucaagaacuacaucgacaagcagcugcugcccauccucaacaagcaguccugcagcauccccaacaucgagacggucaucgaguuccagcagaagaacaaccggcugcuggagaucacccgcgaguucuccgugaacgccggcgugaccacccccgucagcacguacaugcucaccaacuccgagcugcugagccucaucaacgacaugccgaucaccaacgaccagaagaagcugaugagcaacaacgugcagaucgugcggcagcaguccuacagcaucaugugcaucaucaaggaggagguccuggccuacguggugcagcucccccuguacggggucaucgacacccccugcuggaagcugcacacgagcccccucugcaccaccaacaccaaggagggcuccaacaucugccugacgcgcaccgaccgggggugguacugcgacaacgcgggcuccgugagcuucuucccgcaggccgagaccugcaaggugcaguccaaccgcgucuucugcgacaccaugaacagccugacgcuccccuccgaggugaaccugugcaacaucgacaucuucaaccccaaguacgacugcaagaucaugaccagcaagaccgacgucuccagcuccgugaucaccagccugggcgccaucguguccugcuacgggaagacgaagugcaccgccagcaacaagaaccggggcaucaucaagaccuucuccaacgggugcgacuacgucagcaacaagggcguggacaccguguccgucggcaacacgcucuacugcgugaacaagcaggaggggcagagccuguacgugaagggcgagcccaucaucaacuucuacgacccgcuggucuuccccagcgacgaguucgacgccuccaucagccaggugaacgagaagaucaaccagucccucgcguucauccgcaagagcgacgagcugcugcacaacgugaacgucgggaaguccaccaccaacaucaugaucaccaccaucaucaucgugaucaucgugauccuccugcugcucaucgccgucggccuguuccuguacugcaaggcccggugaggacuagucccuguucccagagcccacuuuuuuuucuuuuuuugaaauaaaauagccugucuuucagaucuaaaaaaaaaaaaaaaaaaaaaaaaaaaaaaaaaaaaaaaaaaaaaaaaaaaaaaaaaaaaaaaaugcaucccccccccccccccccccccccccccccccaaaggcucuuuucagagccaccagaauu

SEQ ID NO: 15082 - RNA, 1867 nt, Artificial Sequence
  mRNA product Design a-4 comprising derived and/or modified sequence from HRSV(Memphis-37)__AIY60640.1__F-del_DSCav1_mut2 (opt2)
gggagacuccugucgggcggaaguaggaggaguagaguuuaaaaacaguacucuuuuuccgguucgggacguaguugaagcaacgacaagccggauaaccgcucuugagacaggaagcuuaccauggagcuccccauccucaagaccaacgccaucaccaccauccucgccgccgucacccucugcuucgccuccucccagaacaucaccgaggaguucuaccaguccaccugcuccgccgucuccaagggcuaccucggcgcccuccgcaccggcugguacaccuccgucaucaccaucgagcucuccaacaucaaggagaacaagugcaacggcaccgacgccaaggucaagcucaucaagcaggagcucgacaaguacaagaacgccgucaccgaccuccagcuccucaugcaguccacccccgccgccggcuccggcuccgccaucugcuccggcaucgccgucugcaagguccuccaccucgagggcgaggucaacaagaucaagaacgcccuccucuccaccaacaaggccgucgucucccucuccaacggcgucuccguccucaccuucaagguccucgaccucaagaacuacaucgacaagcagcuccuccccauccucaacaagcaguccugcuccauccccaacaucgagaccgucaucgaguuccagcagaagaacaaccgccuccucgagaucacccgcgaguucuccgucaacgccggcgucaccacccccgucuccaccuacaugcucaccaacuccgagcuccucucccucaucaacgacaugcccaucaccaacgaccagaagaagcucauguccaacaacguccagaucguccgccagcaguccuacuccaucaugugcaucaucaaggaggagguccucgccuacgucguccagcucccccucuacggcgucaucgacacccccugcuggaagcuccacaccuccccccucugcaccaccaacaccaaggagggcuccaacaucugccucacccgcaccgaccgcggcugguacugcgacaacgccggcuccgucuccuucuucccccaggccgagaccugcaagguccaguccaaccgcgucuucugcgacaccaugaacucccucacccuccccuccgaggucaaccucugcaacaucgacaucuucaaccccaaguacgacugcaagaucaugaccuccaagaccgacgucuccuccuccgucaucaccucccucggcgccaucgucuccugcuacggcaagaccaagugcaccgccuccaacaagaaccgcggcaucaucaagaccuucuccaacggcugcgacuacgucuccaacaagggcgucgacaccgucuccgucggcaacacccucuacugcgucaacaagcaggagggccagucccucuacgucaagggcgagcccaucaucaacuucuacgacccccucgucuuccccuccgacgaguucgacgccuccaucucccaggucaacgagaagaucaaccagucccucgccuucauccgcaaguccgacgagcuccuccacaacgucaacgucggcaaguccaccaccaacaucaugaucaccaccaucaucaucgucaucaucgucauccuccuccuccucaucgccgucggccucuuccucuacugcaaggcccgcugaggacuagucccuguucccagagcccacuuuuuuuucuuuuuuugaaauaaaauagccugucuuucagaucuaaaaaaaaaaaaaaaaaaaaaaaaaaaaaaaaaaaaaaaaaaaaaaaaaaaaaaaaaaaaaaaaugcaucccccccccccccccccccccccccccccccaaaggcucuuuucagagccaccagaauu

SEQ ID NO: 15083 - RNA, 1867 nt, Artificial Sequence
  mRNA product Design a-4 comprising derived and/or modified sequence from HRSV(Memphis-37)__AIY60640.1__F-del_DSCav1_mut2 (opt3)
gggagacuccugucgggcggaaguaggaggaguagaguuuaaaaacaguacucuuuuuccgguucgggacguaguugaagcaacgacaagccggauaaccgcucuugagacaggaagcuuaccauggagcugcccauccucaagaccaacgccauuacaacuauacuugcugcagugacgcugugcuucgccagcucccagaauaucaccgaagaguuuuaccaaucuacauguucagcggucaguaaaggcuauuugggggcuuuaagaacuggaugguacaccagcguuauuacaaucgaacuguccaacauuaaggagaauaaaugcaacgguaccgacgccaaggugaaacuaaucaagcaggaacucgauaaguauaaaaaugcaguaacugaccugcagcuucugaugcagucuacuccugccgcuggcucggggucagcaauauguagcggaaucgccgugugcaaggucuugcaccucgagggcgaggugaacaaaauuaagaaugcucugcugaguaccaacaaagccguugugucccucucuaauggugucagcguguuaacguucaagguacuggaucuuaagaacuacaucgacaaacaauugcugccaauucuaaauaagcaguccuguucaaucccgaacauagaaacuguuauugaguuucagcagaaaaauaacaggcuccuggaaaucacccgggaguucagugugaaugcgggggucacaacucccgugagcaccuauaugcuuacaaacucugagcuguugucccucauuaacgauaugccuaucaccaaugaccaaaagaaacugaugucaaacaaugugcagaucguccgccagcagagcuacaguauuaugugcauaaucaaggaagagguuuuagcauaugugguacaacugccacucuacggagugauugauacgcccuguuggaaacuucauacuucuccucugugcacaaccaacacuaaggaaggcuccaauaucuguuugacacgaaccgaccguggcugguacugcgauaacgccgggagcgucucguuuuucccacaggcugagacguguaaggugcagucuaauagaguuuucugcgacaccaugaacucccuaacacugcccucagaagugaaucucugcaacauagauauuuucaauccuaaauaugacuguaagaucaugacaaguaaaaccgaugucagcuccucugugaucacaagccugggagccauuguaucaugcuacgguaagacuaaauguaccgcaaguaacaagaauaggggcaucauuaagacauuuuccaacgggugcgacuauguuagcaauaaaggaguggacaccgucucugugggcaacacucuuuacugugucaacaagcaagagggucagucacuguaugugaaaggggagccaauaaucaauuucuacgauccguugguuuuucccagugacgaauuugaugcuagcauuucccaggugaacgagaagaucaaucagucucucgccuuuauccggaaaucggacgaacuguuacacaacguaaaugucggaaagagcacgacaaacauuaugauaaccacuaucauuaucgugauuaucguuauacugcuacuccugaucgcggugggccuuuucuuguauugcaaggcccgcugaggacuagucccuguucccagagcccacuuuuuuuucuuuuuuugaaauaaaauagccugucuuucagaucuaaaaaaaaaaaaaaaaaaaaaaaaaaaaaaaaaaaaaaaaaaaaaaaaaaaaaaaaaaaaaaaaugcaucccccccccccccccccccccccccccccccaaaggcucuuuucagagccaccagaauu

SEQ ID NO: 15084 - RNA, 1867 nt, Artificial Sequence
  mRNA product Design a-4 comprising derived and/or modified sequence from HRSV(Memphis-37)__AIY60640.1__F-del_DSCav1_mut2 (opt4)
gggagacuccugucgggcggaaguaggaggaguagaguuuaaaaacaguacucuuuuuccgguucgggacguaguugaagcaacgacaagccggauaaccgcucuugagacaggaagcuuaccauggagcugcccauccugaagaccaacgccaucaccaccauccuggccgccgugacccugugcuucgccagcagccagaacaucaccgaggaguucuaccagagcaccugcagcgccgugagcaagggcuaccugggcgcccugagaaccggcugguacaccagcgugaucaccaucgagcugagcaacaucaaggagaacaagugcaacggcaccgacgccaaggugaagcugaucaagcaggagcuggacaaguacaagaacgccgugaccgaccugcagcugcugaugcagagcacccccgccgccggcagcggcagcgccaucugcagcggcaucgccgugugcaaggugcugcaccuggagggcgaggugaacaagaucaagaacgcccugcugagcaccaacaaggccguggugagccugagcaacggcgugagcgugcugaccuucaaggugcuggaccugaagaacuacaucgacaagcagcugcugcccauccugaacaagcagagcugcagcauccccaacaucgagaccgugaucgaguuccagcagaagaacaacagacugcuggagaucaccagagaguucagcgugaacgccggcgugaccacccccgugagcaccuacaugcugaccaacagcgagcugcugagccugaucaacgacaugcccaucaccaacgaccagaagaagcugaugagcaacaacgugcagaucgugagacagcagagcuacagcaucaugugcaucaucaaggaggaggugcuggccuacguggugcagcugccccuguacggcgugaucgacacccccugcuggaagcugcacaccagcccccugugcaccaccaacaccaaggagggcagcaacaucugccugaccagaaccgacagaggcugguacugcgacaacgccggcagcgugagcuucuucccccaggccgagaccugcaaggugcagagcaacagaguguucugcgacaccaugaacagccugacccugcccagcgaggugaaccugugcaacaucgacaucuucaaccccaaguacgacugcaagaucaugaccagcaagaccgacgugagcagcagcgugaucaccagccugggcgccaucgugagcugcuacggcaagaccaagugcaccgccagcaacaagaacagaggcaucaucaagaccuucagcaacggcugcgacuacgugagcaacaagggcguggacaccgugagcgugggcaacacccuguacugcgugaacaagcaggagggccagagccuguacgugaagggcgagcccaucaucaacuucuacgacccccugguguuccccagcgacgaguucgacgccagcaucagccaggugaacgagaagaucaaccagagccuggccuucaucagaaagagcgacgagcugcugcacaacgugaacgugggcaagagcaccaccaacaucaugaucaccaccaucaucaucgugaucaucgugauccugcugcugcugaucgccgugggccuguuccuguacugcaaggccagaugaggacuagucccuguucccagagcccacuuuuuuuucuuuuuuugaaauaaaauagccugucuuucagaucuaaaaaaaaaaaaaaaaaaaaaaaaaaaaaaaaaaaaaaaaaaaaaaaaaaaaaaaaaaaaaaaaugcaucccccccccccccccccccccccccccccccaaaggcucuuuucagagccaccagaauu

SEQ ID NO: 15085 - RNA, 1867 nt, Artificial Sequence
  mRNA product Design a-4 comprising derived and/or modified sequence from HRSV(Memphis-37)__AIY60640.1__F-del_DSCav1_mut2 (opt5)
gggagacuccugucgggcggaaguaggaggaguagaguuuaaaaacaguacucuuuuuccgguucgggacguaguugaagcaacgacaagccggauaaccgcucuugagacaggaagcuuaccauggagcugcccauccucaagaccaacgccauuacaacgauccuggcugccgugacccuuugcuucgcgagcucccagaauauuacagaagaguuuuaccaaucuaccuguagcgcugucuccaaaggcuaucugggggcccucagaacaggaugguacaccucuguuaucacaauugaacugagcaacaucaaggagaauaaaugcaacggcaccgacgccaaggugaaacuuaucaagcaggaacuggauaaguauaaaaaugcugugacggaccuccagcugcugaugcaguccaccccugccgcugggucuggaagcgccauuuguuccggcaucgcggucugcaaggugcuccaccuggagggggagguuaacaaaauuaagaaugcccuucugagcacaaacaaagcuguggucucucucuccaauggagugagcguucugaccuucaaggugcuugaucugaagaacuacaucgacaaacaacuccugccgauucugaauaagcagucuuguuccauccccaacauugaaacagucaucgaguuucagcagaaaaauaaccggcuccuggaaaucacccgcgaguucagcgugaaugccggcgugacgacaccugucucuaccuauaugcuuacaaacuccgagcugcucagccugauuaacgauaugcccaucaccaaugaccaaaagaaacuuauguccaacaauguucagauugugagacagcagucuuacagcaucaugugcauuaucaaggaagaggugcuggcuuaugucgugcaacucccucuguacggcguuaucgauacccccuguuggaaacugcauacauccccucucugcacgaccaacacaaaggaagggagcaauauuugucugacccggacagaccgcggaugguacugcgauaacgccggcucuguguccuuuuucccgcaggcggagaccuguaagguccagagcaauagaguguuuugcgacacgaugaacucucuuacacugcccagcgaaguuaaucucugcaacaucgauauuuucaauccuaaauaugacuguaagaucaugaccuccaaaaccgaugugucuagcuccgucauuacaagccugggggccaucgugucuugcuacggaaagaccaaauguacagcuuccaacaagaaucggggcaucauuaagacguuuagcaacgggugcgacuaugucucuaauaaaggaguggacaccguuuccgugggcaacacacuuuacugugucaacaagcaagagggccagagccuguaugugaaaggggagcccaucauuaauuucuacgauccucucguuuuucccuccgacgaguucgaugccucuaucagccaggugaacgaaaagauuaaucagucccuggcuuuuauccgcaaaucugacgaacugcuccacaacgucaaugugggaaagagcaccacaaacauuaugaucaccacgaucauuaucgugauuaucguuauucugcuucugcucaucgccgucggccuguuccuguauugcaaggccagaugaggacuagucccuguucccagagcccacuuuuuuuucuuuuuuugaaauaaaauagccugucuuucagaucuaaaaaaaaaaaaaaaaaaaaaaaaaaaaaaaaaaaaaaaaaaaaaaaaaaaaaaaaaaaaaaaaugcaucccccccccccccccccccccccccccccccaaaggcucuuuucagagccaccagaauu

SEQ ID NO: 15086 - RNA, 1867 nt, Artificial Sequence
  mRNA product Design a-4 comprising derived and/or modified sequence from HRSV(Memphis-37)__AIY60640.1__F-del_DSCav1_mut2 (opt6)
gggagacuccugucgggcggaaguaggaggaguagaguuuaaaaacaguacucuuuuuccgguucgggacguaguugaagcaacgacaagccggauaaccgcucuugagacaggaagcuuaccauggaacuaccaauacucaaaacaaacgcaauaacaacaauuuuagcugcaguaacacuuuguuucgcauccucccaaaauauaacagaagaauuuuaucaaucaaccugcucagccgucuccaaaggauaucuaggugcacuacgcacuggaugguacacaagugucaucacaauagaacuuuccaacaucaaagaaaauaaauguaauggaacugacgcaaaaguaaaacucauaaaacaagaacuagacaaauacaaaaacgcaguaacagaccuacaacuauuaaugcaaucaacaccagcagcaggauccggcagugccauaugcucuggaauagcagucugcaaaguuuuacacuuagaaggcgaaguaaacaaaaucaaaaacgcccuacuaucuacaaauaaagccgucguaucucucucaaauggaguaucaguacuaacauucaaaguauuagacuuaaaaaacuacaucgauaaacaauuauugccaauauuaaacaaacaaucuugcucaauaccaaauauagaaacagucauagaauuucaacaaaaaaauaaccgauuauuagaaauaacacgagaauuuucaguaaaugccggagucaccacaccaguaucaacauacaugcuaacaaauucagaacuauuaucauuaauaaacgacaugccuauuacaaaugaucaaaaaaaacuaauguccaacaauguacaaauaguccgacaacaaagcuacucaaucauguguauaauaaaagaagaaguacuugcauacguaguacaauuaccacuauacggaguuaucgacacaccaugcuggaaacuccacacuucaccacucugcaccacaaacacaaaagaaggcucaaacauaugccuaacaagaacagaccgaggaugguacugcgacaacgcaggaucaguaucauucuucccacaagcagaaacuugcaaaguacaaucuaacagaguuuucugugacaccaugaauagccuaacacuccccuccgaaguuaaccuauguaacauagauauauuuaaucccaaauaugauugcaaaaucaugacaucuaaaaccgacguaucaucaucuguaaucacaucacuaggugccauagucucaugcuacggcaaaacaaaaugcaccgccucaaacaaaaaccgagguauaauaaaaaccuucaguaauggaugugacuacguaucaaacaaagguguugauaccguaagcgucggcaacacccuauacugcguaaauaaacaagaaggccaaucacuauacgucaaaggcgaaccaauuauuaacuucuaugacccacucgucuuucccuccgacgaauuugacgcaagcauaucacaaguaaacgaaaaaauaaaccaaucacuagcauucauacgcaaaucagaugaacuacuacauaacguaaacguaggaaaauccacuacaaauauaaugaucacaacaauaauaaucguaauuauagucauauuauuacuacuaauagcaguaggacuuuuccuauacuguaaagcaagauaaggacuagucccuguucccagagcccacuuuuuuuucuuuuuuugaaauaaaauagccugucuuucagaucuaaaaaaaaaaaaaaaaaaaaaaaaaaaaaaaaaaaaaaaaaaaaaaaaaaaaaaaaaaaaaaaaugcaucccccccccccccccccccccccccccccccaaaggcucuuuucagagccaccagaauu

SEQ ID NO: 15087 - RNA, 1867 nt, Artificial Sequence
  mRNA product Design a-4 comprising derived and/or modified sequence from HRSV(Memphis-37)__AIY60640.1__F-del_DSCav1_mut2 (opt11)
gggagacuccugucgggcggaaguaggaggaguagaguuuaaaaacaguacucuuuuuccgguucgggacguaguugaagcaacgacaagccggauaaccgcucuugagacaggaagcuuaccauggaacuucccauccucaagaccaacgcuauuacgaccauccucgccgcagucacccucugcuucgcgucaucccaaaacaucaccgaagaauuuuaccaauccacaugcuccgcagucucaaaaggcuaccuaggagcccuacgcaccggaugguacacauccgucaucacaaucgaacucuccaacauaaaagaaaacaaaugcaacggcaccgaugccaaaguaaaacugauuaaacaagaacucgacaaauacaagaacgccgucacagaccuacagcuccucaugcaaucaacucccgccgccggcagcggauccgcuaucugcucaggcaucgccguaugcaaaguccuccaccuagaaggcgaaguaaacaaaaucaagaacgcacuacucucaacaaacaaagccgucgucucccucuccaacggcgucuccguccuuaccuucaaaguccucgaccuuaagaacuacauugacaaacaacuccuacccauccucaacaaacaauccugcucuauaccuaauauagaaaccguaaucgaauuucaacagaaaaacaaccgccuccucgaaauuacccgcgaguucucaguaaacgccggcguaaccacccccgucuccaccuacaugcucacaaauucagaacuccucagccucaucaacgacaugcccauaaccaacgaccaaaagaaacucaugucaaacaacguccaaaucgucaggcaacaaagcuacagcaucaugugcaucauuaaagaagaaguacucgccuacgucgugcaacuaccccucuacggcgucauagacacacccugcuggaaacuucacacaucaccgcucugcaccacaaacaccaaagaaggcaguaacauaugccucacccgaaccgaccgcggaugguacugcgacaacgccggauccgucagcuucuucccacaagccgaaaccugcaaaguacaauccaaccgagucuucugcgacaccaugaacucucuuacgcuccccucagaagucaaccuaugcaacaucgacaucuucaaccccaaauacgacugcaaaaucaugaccuccaaaacagacgucuccuccucagugauaaccucccucggcgccauugucuccugcuacggcaaaaccaaaugcaccgccuccaacaaaaaccgugggaucaucaaaaccuucucaaacggcugcgacuacguauccaauaagggugucgacacagucuccguaggcaauacccucuauugcgucaacaaacaagaaggccaaucccucuacgucaaaggcgaaccuaucaucaacuucuacgacccgcuagucuuccccucagacgaguucgacgcauccaucucacaagucaacgaaaagaucaaccagucccucgcauucauccgaaaauccgacgaacuucuccacaacguuaacgucggcaaauccaccacuaacauaaugaucaccacgaucaucauaguaauuaucgucauacuccuccuccuaaucgcugucggacucuuccucuacugcaaggcccgcuaaggacuagucccuguucccagagcccacuuuuuuuucuuuuuuugaaauaaaauagccugucuuucagaucuaaaaaaaaaaaaaaaaaaaaaaaaaaaaaaaaaaaaaaaaaaaaaaaaaaaaaaaaaaaaaaaaugcaucccccccccccccccccccccccccccccccaaaggcucuuuucagagccaccagaauu

SEQ ID NO: 15088 - RNA, 1813 nt, Artificial Sequence
  mRNA product Design a-5 comprising derived and/or modified sequence from HRSV(Memphis-37)__AIY60640.1__F-del_DSCav1_mut2 (opt1)
gggagacuuucccauucuguagcagaauuugguguugccuguggucuuggucccgcggagaagcuuaccauggagcugcccauccucaagaccaacgccaucaccacgauccuggccgcggugacccugugcuucgccagcucccagaacaucaccgaggaguucuaccagagcacgugcuccgccgucagcaagggcuaccucggcgcccugcgcaccgggugguacaccagcgugaucaccaucgagcuguccaacaucaaggagaacaagugcaacggcaccgacgccaaggugaagcucaucaagcaggagcuggacaaguacaagaacgcggucacggaccugcagcuccugaugcagagcaccccggccgccggcuccgggagcgcgaucugcuccggcaucgccgucugcaaggugcugcaccucgagggcgaggugaacaagaucaagaacgcccugcuguccaccaacaaggccgucgugagccucuccaacggggugagcguccugaccuucaaggugcuggaccucaagaacuacaucgacaagcagcugcugcccauccugaacaagcagagcugcuccauccccaacaucgagaccgucaucgaguuccagcagaagaacaaccgccuccuggagaucacgcgggaguucagcgugaacgcgggcgugaccacccccgucuccaccuacaugcugacgaacagcgagcuccugucccugaucaacgacaugccgaucaccaacgaccagaagaagcucaugagcaacaacgugcagaucgugcgccagcaguccuacagcaucaugugcaucaucaaggaggagguccuggccuacguggugcagcugccccucuacggggucaucgacacccccugcuggaagcugcacaccagcccccugugcacgaccaacaccaaggagggcuccaacaucugccucacccggacggaccgcgggugguacugcgacaacgccggcagcguguccuucuucccgcaggccgagaccugcaagguccagagcaaccggguguucugcgacaccaugaacucccugacccugcccagcgaggugaaccucugcaacaucgacaucuucaaccccaaguacgacugcaagaucaugacguccaagaccgacgucagcuccagcgugaucaccucccugggcgccaucgugagcugcuacgggaagaccaagugcacggcgagcaacaagaaccgcggcaucaucaagaccuucuccaacgggugcgacuacgucagcaacaagggcguggacaccguguccgucggcaacacccuguacugcgugaacaagcaggagggccagagccucuacgugaagggggagcccaucaucaacuucuacgacccgcuggucuuccccuccgacgaguucgacgccagcaucucccaggugaacgagaagaucaaccagagccuggccuucauccggaaguccgacgagcuccugcacaacgugaacgucggcaagagcaccacgaacaucaugaucaccaccaucaucaucgugaucaucgugauccugcugcuccugaucgccgucgggcuguuccucuacugcaaggcccgcugaggacuagucccuguucccagagcccacuuuuuuuucuuuuuuugaaauaaaauagccugucuuucagaucuaaaaaaaaaaaaaaaaaaaaaaaaaaaaaaaaaaaaaaaaaaaaaaaaaaaaaaaaaaaaaaaaugcaucccccccccccccccccccccccccccccccaaaggcucuuuucagagccaccagaauu

SEQ ID NO: 15089 - RNA, 1813 nt, Artificial Sequence
  mRNA product Design a-5 comprising derived and/or modified sequence from HRSV(Memphis-37)__AIY60640.1__F-del_DSCav1_mut2 (opt1)
gggagacuuucccauucuguagcagaauuugguguugccuguggucuuggucccgcggagaagcuuaccauggagcugcccauccucaagaccaacgccaucaccacgauccuggccgcggugacccugugcuucgccagcucccagaacaucaccgaggaguucuaccagagcacgugcuccgccgucagcaagggcuaccucggggcccugcgcaccggcugguacaccuccgugaucaccaucgagcugagcaacaucaaggagaacaagugcaacgggaccgacgccaaggugaagcucaucaagcaggagcuggacaaguacaagaacgcggucacggaccugcagcuccugaugcaguccaccccggccgccggcagcggguccgccaucugcagcggcaucgcggugugcaaggugcugcaccucgagggcgaggucaacaagaucaagaacgcccugcuguccaccaacaaggccguggugagccucuccaacggggucagcgugcugaccuucaaggugcuggaccucaagaacuacaucgacaagcagcugcugcccauccucaacaagcaguccugcagcauccccaacaucgagacggucaucgaguuccagcagaagaacaaccggcugcuggagaucacccgcgaguucuccgugaacgccggcgugaccacccccgucagcacguacaugcucaccaacuccgagcugcugagccucaucaacgacaugccgaucaccaacgaccagaagaagcugaugagcaacaacgugcagaucgugcggcagcaguccuacagcaucaugugcaucaucaaggaggagguccuggccuacguggugcagcucccccuguacggggucaucgacacccccugcuggaagcugcacacgagcccccucugcaccaccaacaccaaggagggcuccaacaucugccugacgcgcaccgaccgggggugguacugcgacaacgcgggcuccgugagcuucuucccgcaggccgagaccugcaaggugcaguccaaccgcgucuucugcgacaccaugaacagccugacgcuccccuccgaggugaaccugugcaacaucgacaucuucaaccccaaguacgacugcaagaucaugaccagcaagaccgacgucuccagcuccgugaucaccagccugggcgccaucguguccugcuacgggaagacgaagugcaccgccagcaacaagaaccggggcaucaucaagaccuucuccaacgggugcgacuacgucagcaacaagggcguggacaccguguccgucggcaacacgcucuacugcgugaacaagcaggaggggcagagccuguacgugaagggcgagcccaucaucaacuucuacgacccgcuggucuuccccagcgacgaguucgacgccuccaucagccaggugaacgagaagaucaaccagucccucgcguucauccgcaagagcgacgagcugcugcacaacgugaacgucgggaaguccaccaccaacaucaugaucaccaccaucaucaucgugaucaucgugauccuccugcugcucaucgccgucggccuguuccuguacugcaaggcccggugaggacuagucccuguucccagagcccacuuuuuuuucuuuuuuugaaauaaaauagccugucuuucagaucuaaaaaaaaaaaaaaaaaaaaaaaaaaaaaaaaaaaaaaaaaaaaaaaaaaaaaaaaaaaaaaaaugcaucccccccccccccccccccccccccccccccaaaggcucuuuucagagccaccagaauu

SEQ ID NO: 15090 - RNA, 1813 nt, Artificial Sequence
  mRNA product Design a-5 comprising derived and/or modified sequence from HRSV(Memphis-37)__AIY60640.1__F-del_DSCav1_mut2 (opt2)
gggagacuuucccauucuguagcagaauuugguguugccuguggucuuggucccgcggagaagcuuaccauggagcuccccauccucaagaccaacgccaucaccaccauccucgccgccgucacccucugcuucgccuccucccagaacaucaccgaggaguucuaccaguccaccugcuccgccgucuccaagggcuaccucggcgcccuccgcaccggcugguacaccuccgucaucaccaucgagcucuccaacaucaaggagaacaagugcaacggcaccgacgccaaggucaagcucaucaagcaggagcucgacaaguacaagaacgccgucaccgaccuccagcuccucaugcaguccacccccgccgccggcuccggcuccgccaucugcuccggcaucgccgucugcaagguccuccaccucgagggcgaggucaacaagaucaagaacgcccuccucuccaccaacaaggccgucgucucccucuccaacggcgucuccguccucaccuucaagguccucgaccucaagaacuacaucgacaagcagcuccuccccauccucaacaagcaguccugcuccauccccaacaucgagaccgucaucgaguuccagcagaagaacaaccgccuccucgagaucacccgcgaguucuccgucaacgccggcgucaccacccccgucuccaccuacaugcucaccaacuccgagcuccucucccucaucaacgacaugcccaucaccaacgaccagaagaagcucauguccaacaacguccagaucguccgccagcaguccuacuccaucaugugcaucaucaaggaggagguccucgccuacgucguccagcucccccucuacggcgucaucgacacccccugcuggaagcuccacaccuccccccucugcaccaccaacaccaaggagggcuccaacaucugccucacccgcaccgaccgcggcugguacugcgacaacgccggcuccgucuccuucuucccccaggccgagaccugcaagguccaguccaaccgcgucuucugcgacaccaugaacucccucacccuccccuccgaggucaaccucugcaacaucgacaucuucaaccccaaguacgacugcaagaucaugaccuccaagaccgacgucuccuccuccgucaucaccucccucggcgccaucgucuccugcuacggcaagaccaagugcaccgccuccaacaagaaccgcggcaucaucaagaccuucuccaacggcugcgacuacgucuccaacaagggcgucgacaccgucuccgucggcaacacccucuacugcgucaacaagcaggagggccagucccucuacgucaagggcgagcccaucaucaacuucuacgacccccucgucuuccccuccgacgaguucgacgccuccaucucccaggucaacgagaagaucaaccagucccucgccuucauccgcaaguccgacgagcuccuccacaacgucaacgucggcaaguccaccaccaacaucaugaucaccaccaucaucaucgucaucaucgucauccuccuccuccucaucgccgucggccucuuccucuacugcaaggcccgcugaggacuagucccuguucccagagcccacuuuuuuuucuuuuuuugaaauaaaauagccugucuuucagaucuaaaaaaaaaaaaaaaaaaaaaaaaaaaaaaaaaaaaaaaaaaaaaaaaaaaaaaaaaaaaaaaaugcaucccccccccccccccccccccccccccccccaaaggcucuuuucagagccaccagaauu

SEQ ID NO: 15091 - RNA, 1813 nt, Artificial Sequence
  mRNA product Design a-5 comprising derived and/or modified sequence from HRSV(Memphis-37)__AIY60640.1__F-del_DSCav1_mut2 (opt3)
gggagacuuucccauucuguagcagaauuugguguugccuguggucuuggucccgcggagaagcuuaccauggagcugcccauccucaagaccaacgccauuacaacuauacuugcugcagugacgcugugcuucgccagcucccagaauaucaccgaagaguuuuaccaaucuacauguucagcggucaguaaaggcuauuugggggcuuuaagaacuggaugguacaccagcguuauuacaaucgaacuguccaacauuaaggagaauaaaugcaacgguaccgacgccaaggugaaacuaaucaagcaggaacucgauaaguauaaaaaugcaguaacugaccugcagcuucugaugcagucuacuccugccgcuggcucggggucagcaauauguagcggaaucgccgugugcaaggucuugcaccucgagggcgaggugaacaaaauuaagaaugcucugcugaguaccaacaaagccguugugucccucucuaauggugucagcguguuaacguucaagguacuggaucuuaagaacuacaucgacaaacaauugcugccaauucuaaauaagcaguccuguucaaucccgaacauagaaacuguuauugaguuucagcagaaaaauaacaggcuccuggaaaucacccgggaguucagugugaaugcgggggucacaacucccgugagcaccuauaugcuuacaaacucugagcuguugucccucauuaacgauaugccuaucaccaaugaccaaaagaaacugaugucaaacaaugugcagaucguccgccagcagagcuacaguauuaugugcauaaucaaggaagagguuuuagcauaugugguacaacugccacucuacggagugauugauacgcccuguuggaaacuucauacuucuccucugugcacaaccaacacuaaggaaggcuccaauaucuguuugacacgaaccgaccguggcugguacugcgauaacgccgggagcgucucguuuuucccacaggcugagacguguaaggugcagucuaauagaguuuucugcgacaccaugaacucccuaacacugcccucagaagugaaucucugcaacauagauauuuucaauccuaaauaugacuguaagaucaugacaaguaaaaccgaugucagcuccucugugaucacaagccugggagccauuguaucaugcuacgguaagacuaaauguaccgcaaguaacaagaauaggggcaucauuaagacauuuuccaacgggugcgacuauguuagcaauaaaggaguggacaccgucucugugggcaacacucuuuacugugucaacaagcaagagggucagucacuguaugugaaaggggagccaauaaucaauuucuacgauccguugguuuuucccagugacgaauuugaugcuagcauuucccaggugaacgagaagaucaaucagucucucgccuuuauccggaaaucggacgaacuguuacacaacguaaaugucggaaagagcacgacaaacauuaugauaaccacuaucauuaucgugauuaucguuauacugcuacuccugaucgcggugggccuuuucuuguauugcaaggcccgcugaggacuagucccuguucccagagcccacuuuuuuuucuuuuuuugaaauaaaauagccugucuuucagaucuaaaaaaaaaaaaaaaaaaaaaaaaaaaaaaaaaaaaaaaaaaaaaaaaaaaaaaaaaaaaaaaaugcaucccccccccccccccccccccccccccccccaaaggcucuuuucagagccaccagaauu

SEQ ID NO: 15092 - RNA, 1813 nt, Artificial Sequence
  mRNA product Design a-5 comprising derived and/or modified sequence from HRSV(Memphis-37)__AIY60640.1__F-del_DSCav1_mut2 (opt4)
gggagacuuucccauucuguagcagaauuugguguugccuguggucuuggucccgcggagaagcuuaccauggagcugcccauccugaagaccaacgccaucaccaccauccuggccgccgugacccugugcuucgccagcagccagaacaucaccgaggaguucuaccagagcaccugcagcgccgugagcaagggcuaccugggcgcccugagaaccggcugguacaccagcgugaucaccaucgagcugagcaacaucaaggagaacaagugcaacggcaccgacgccaaggugaagcugaucaagcaggagcuggacaaguacaagaacgccgugaccgaccugcagcugcugaugcagagcacccccgccgccggcagcggcagcgccaucugcagcggcaucgccgugugcaaggugcugcaccuggagggcgaggugaacaagaucaagaacgcccugcugagcaccaacaaggccguggugagccugagcaacggcgugagcgugcugaccuucaaggugcuggaccugaagaacuacaucgacaagcagcugcugcccauccugaacaagcagagcugcagcauccccaacaucgagaccgugaucgaguuccagcagaagaacaacagacugcuggagaucaccagagaguucagcgugaacgccggcgugaccacccccgugagcaccuacaugcugaccaacagcgagcugcugagccugaucaacgacaugcccaucaccaacgaccagaagaagcugaugagcaacaacgugcagaucgugagacagcagagcuacagcaucaugugcaucaucaaggaggaggugcuggccuacguggugcagcugccccuguacggcgugaucgacacccccugcuggaagcugcacaccagcccccugugcaccaccaacaccaaggagggcagcaacaucugccugaccagaaccgacagaggcugguacugcgacaacgccggcagcgugagcuucuucccccaggccgagaccugcaaggugcagagcaacagaguguucugcgacaccaugaacagccugacccugcccagcgaggugaaccugugcaacaucgacaucuucaaccccaaguacgacugcaagaucaugaccagcaagaccgacgugagcagcagcgugaucaccagccugggcgccaucgugagcugcuacggcaagaccaagugcaccgccagcaacaagaacagaggcaucaucaagaccuucagcaacggcugcgacuacgugagcaacaagggcguggacaccgugagcgugggcaacacccuguacugcgugaacaagcaggagggccagagccuguacgugaagggcgagcccaucaucaacuucuacgacccccugguguuccccagcgacgaguucgacgccagcaucagccaggugaacgagaagaucaaccagagccuggccuucaucagaaagagcgacgagcugcugcacaacgugaacgugggcaagagcaccaccaacaucaugaucaccaccaucaucaucgugaucaucgugauccugcugcugcugaucgccgugggccuguuccuguacugcaaggccagaugaggacuagucccuguucccagagcccacuuuuuuuucuuuuuuugaaauaaaauagccugucuuucagaucuaaaaaaaaaaaaaaaaaaaaaaaaaaaaaaaaaaaaaaaaaaaaaaaaaaaaaaaaaaaaaaaaugcaucccccccccccccccccccccccccccccccaaaggcucuuuucagagccaccagaauu

SEQ ID NO: 15093 - RNA, 1813 nt, Artificial Sequence
  mRNA product Design a-5 comprising derived and/or modified sequence from HRSV(Memphis-37)__AIY60640.1__F-del_DSCav1_mut2 (opt5)
gggagacuuucccauucuguagcagaauuugguguugccuguggucuuggucccgcggagaagcuuaccauggagcugcccauccucaagaccaacgccauuacaacgauccuggcugccgugacccuuugcuucgcgagcucccagaauauuacagaagaguuuuaccaaucuaccuguagcgcugucuccaaaggcuaucugggggcccucagaacaggaugguacaccucuguuaucacaauugaacugagcaacaucaaggagaauaaaugcaacggcaccgacgccaaggugaaacuuaucaagcaggaacuggauaaguauaaaaaugcugugacggaccuccagcugcugaugcaguccaccccugccgcugggucuggaagcgccauuuguuccggcaucgcggucugcaaggugcuccaccuggagggggagguuaacaaaauuaagaaugcccuucugagcacaaacaaagcuguggucucucucuccaauggagugagcguucugaccuucaaggugcuugaucugaagaacuacaucgacaaacaacuccugccgauucugaauaagcagucuuguuccauccccaacauugaaacagucaucgaguuucagcagaaaaauaaccggcuccuggaaaucacccgcgaguucagcgugaaugccggcgugacgacaccugucucuaccuauaugcuuacaaacuccgagcugcucagccugauuaacgauaugcccaucaccaaugaccaaaagaaacuuauguccaacaauguucagauugugagacagcagucuuacagcaucaugugcauuaucaaggaagaggugcuggcuuaugucgugcaacucccucuguacggcguuaucgauacccccuguuggaaacugcauacauccccucucugcacgaccaacacaaaggaagggagcaauauuugucugacccggacagaccgcggaugguacugcgauaacgccggcucuguguccuuuuucccgcaggcggagaccuguaagguccagagcaauagaguguuuugcgacacgaugaacucucuuacacugcccagcgaaguuaaucucugcaacaucgauauuuucaauccuaaauaugacuguaagaucaugaccuccaaaaccgaugugucuagcuccgucauuacaagccugggggccaucgugucuugcuacggaaagaccaaauguacagcuuccaacaagaaucggggcaucauuaagacguuuagcaacgggugcgacuaugucucuaauaaaggaguggacaccguuuccgugggcaacacacuuuacugugucaacaagcaagagggccagagccuguaugugaaaggggagcccaucauuaauuucuacgauccucucguuuuucccuccgacgaguucgaugccucuaucagccaggugaacgaaaagauuaaucagucccuggcuuuuauccgcaaaucugacgaacugcuccacaacgucaaugugggaaagagcaccacaaacauuaugaucaccacgaucauuaucgugauuaucguuauucugcuucugcucaucgccgucggccuguuccuguauugcaaggccagaugaggacuagucccuguucccagagcccacuuuuuuuucuuuuuuugaaauaaaauagccugucuuucagaucuaaaaaaaaaaaaaaaaaaaaaaaaaaaaaaaaaaaaaaaaaaaaaaaaaaaaaaaaaaaaaaaaugcaucccccccccccccccccccccccccccccccaaaggcucuuuucagagccaccagaauu

SEQ ID NO: 15094 - RNA, 1813 nt, Artificial Sequence
  mRNA product Design a-5 comprising derived and/or modified sequence from HRSV(Memphis-37)__AIY60640.1__F-del_DSCav1_mut2 (opt6)
gggagacuuucccauucuguagcagaauuugguguugccuguggucuuggucccgcggagaagcuuaccauggaacuaccaauacucaaaacaaacgcaauaacaacaauuuuagcugcaguaacacuuuguuucgcauccucccaaaauauaacagaagaauuuuaucaaucaaccugcucagccgucuccaaaggauaucuaggugcacuacgcacuggaugguacacaagugucaucacaauagaacuuuccaacaucaaagaaaauaaauguaauggaacugacgcaaaaguaaaacucauaaaacaagaacuagacaaauacaaaaacgcaguaacagaccuacaacuauuaaugcaaucaacaccagcagcaggauccggcagugccauaugcucuggaauagcagucugcaaaguuuuacacuuagaaggcgaaguaaacaaaaucaaaaacgcccuacuaucuacaaauaaagccgucguaucucucucaaauggaguaucaguacuaacauucaaaguauuagacuuaaaaaacuacaucgauaaacaauuauugccaauauuaaacaaacaaucuugcucaauaccaaauauagaaacagucauagaauuucaacaaaaaaauaaccgauuauuagaaauaacacgagaauuuucaguaaaugccggagucaccacaccaguaucaacauacaugcuaacaaauucagaacuauuaucauuaauaaacgacaugccuauuacaaaugaucaaaaaaaacuaauguccaacaauguacaaauaguccgacaacaaagcuacucaaucauguguauaauaaaagaagaaguacuugcauacguaguacaauuaccacuauacggaguuaucgacacaccaugcuggaaacuccacacuucaccacucugcaccacaaacacaaaagaaggcucaaacauaugccuaacaagaacagaccgaggaugguacugcgacaacgcaggaucaguaucauucuucccacaagcagaaacuugcaaaguacaaucuaacagaguuuucugugacaccaugaauagccuaacacuccccuccgaaguuaaccuauguaacauagauauauuuaaucccaaauaugauugcaaaaucaugacaucuaaaaccgacguaucaucaucuguaaucacaucacuaggugccauagucucaugcuacggcaaaacaaaaugcaccgccucaaacaaaaaccgagguauaauaaaaaccuucaguaauggaugugacuacguaucaaacaaagguguugauaccguaagcgucggcaacacccuauacugcguaaauaaacaagaaggccaaucacuauacgucaaaggcgaaccaauuauuaacuucuaugacccacucgucuuucccuccgacgaauuugacgcaagcauaucacaaguaaacgaaaaaauaaaccaaucacuagcauucauacgcaaaucagaugaacuacuacauaacguaaacguaggaaaauccacuacaaauauaaugaucacaacaauaauaaucguaauuauagucauauuauuacuacuaauagcaguaggacuuuuccuauacuguaaagcaagauaaggacuagucccuguucccagagcccacuuuuuuuucuuuuuuugaaauaaaauagccugucuuucagaucuaaaaaaaaaaaaaaaaaaaaaaaaaaaaaaaaaaaaaaaaaaaaaaaaaaaaaaaaaaaaaaaaugcaucccccccccccccccccccccccccccccccaaaggcucuuuucagagccaccagaauu

SEQ ID NO: 15095 - RNA, 1813 nt, Artificial Sequence
  mRNA product Design a-5 comprising derived and/or modified sequence from HRSV(Memphis-37)__AIY60640.1__F-del_DSCav1_mut2 (opt11)
gggagacuuucccauucuguagcagaauuugguguugccuguggucuuggucccgcggagaagcuuaccauggaacuucccauccucaagaccaacgcuauuacgaccauccucgccgcagucacccucugcuucgcgucaucccaaaacaucaccgaagaauuuuaccaauccacaugcuccgcagucucaaaaggcuaccuaggagcccuacgcaccggaugguacacauccgucaucacaaucgaacucuccaacauaaaagaaaacaaaugcaacggcaccgaugccaaaguaaaacugauuaaacaagaacucgacaaauacaagaacgccgucacagaccuacagcuccucaugcaaucaacucccgccgccggcagcggauccgcuaucugcucaggcaucgccguaugcaaaguccuccaccuagaaggcgaaguaaacaaaaucaagaacgcacuacucucaacaaacaaagccgucgucucccucuccaacggcgucuccguccuuaccuucaaaguccucgaccuuaagaacuacauugacaaacaacuccuacccauccucaacaaacaauccugcucuauaccuaauauagaaaccguaaucgaauuucaacagaaaaacaaccgccuccucgaaauuacccgcgaguucucaguaaacgccggcguaaccacccccgucuccaccuacaugcucacaaauucagaacuccucagccucaucaacgacaugcccauaaccaacgaccaaaagaaacucaugucaaacaacguccaaaucgucaggcaacaaagcuacagcaucaugugcaucauuaaagaagaaguacucgccuacgucgugcaacuaccccucuacggcgucauagacacacccugcuggaaacuucacacaucaccgcucugcaccacaaacaccaaagaaggcaguaacauaugccucacccgaaccgaccgcggaugguacugcgacaacgccggauccgucagcuucuucccacaagccgaaaccugcaaaguacaauccaaccgagucuucugcgacaccaugaacucucuuacgcuccccucagaagucaaccuaugcaacaucgacaucuucaaccccaaauacgacugcaaaaucaugaccuccaaaacagacgucuccuccucagugauaaccucccucggcgccauugucuccugcuacggcaaaaccaaaugcaccgccuccaacaaaaaccgugggaucaucaaaaccuucucaaacggcugcgacuacguauccaauaagggugucgacacagucuccguaggcaauacccucuauugcgucaacaaacaagaaggccaaucccucuacgucaaaggcgaaccuaucaucaacuucuacgacccgcuagucuuccccucagacgaguucgacgcauccaucucacaagucaacgaaaagaucaaccagucccucgcauucauccgaaaauccgacgaacuucuccacaacguuaacgucggcaaauccaccacuaacauaaugaucaccacgaucaucauaguaauuaucgucauacuccuccuccuaaucgcugucggacucuuccucuacugcaaggcccgcuaaggacuagucccuguucccagagcccacuuuuuuuucuuuuuuugaaauaaaauagccugucuuucagaucuaaaaaaaaaaaaaaaaaaaaaaaaaaaaaaaaaaaaaaaaaaaaaaaaaaaaaaaaaaaaaaaaugcaucccccccccccccccccccccccccccccccaaaggcucuuuucagagccaccagaauu

SEQ ID NO: 15096 - RNA, 1994 nt, Artificial Sequence
  mRNA product Design b-1 comprising derived and/or modified sequence from HRSV(Memphis-37)__AIY60640.1__F-del_DSCav1_mut2 (opt1)
gggagacggagacggccugcaggaccugcucucucagcccucagccgaggccuacgccgagccgagugcgcagccgacgaccgggaggagccgcagccuucaacucugagguacugugauccgcgcugcccgccgggccgccccaguccgcugcugcggcaccuccuucccucgcgcccucuucgcucgccagcgccuucccugugagccugcgucaccgcggccgccaagcuuaccauggagcugcccauccucaagaccaacgccaucaccacgauccuggccgcggugacccugugcuucgccagcucccagaacaucaccgaggaguucuaccagagcacgugcuccgccgucagcaagggcuaccucggcgcccugcgcaccgggugguacaccagcgugaucaccaucgagcuguccaacaucaaggagaacaagugcaacggcaccgacgccaaggugaagcucaucaagcaggagcuggacaaguacaagaacgcggucacggaccugcagcuccugaugcagagcaccccggccgccggcuccgggagcgcgaucugcuccggcaucgccgucugcaaggugcugcaccucgagggcgaggugaacaagaucaagaacgcccugcuguccaccaacaaggccgucgugagccucuccaacggggugagcguccugaccuucaaggugcuggaccucaagaacuacaucgacaagcagcugcugcccauccugaacaagcagagcugcuccauccccaacaucgagaccgucaucgaguuccagcagaagaacaaccgccuccuggagaucacgcgggaguucagcgugaacgcgggcgugaccacccccgucuccaccuacaugcugacgaacagcgagcuccugucccugaucaacgacaugccgaucaccaacgaccagaagaagcucaugagcaacaacgugcagaucgugcgccagcaguccuacagcaucaugugcaucaucaaggaggagguccuggccuacguggugcagcugccccucuacggggucaucgacacccccugcuggaagcugcacaccagcccccugugcacgaccaacaccaaggagggcuccaacaucugccucacccggacggaccgcgggugguacugcgacaacgccggcagcguguccuucuucccgcaggccgagaccugcaagguccagagcaaccggguguucugcgacaccaugaacucccugacccugcccagcgaggugaaccucugcaacaucgacaucuucaaccccaaguacgacugcaagaucaugacguccaagaccgacgucagcuccagcgugaucaccucccugggcgccaucgugagcugcuacgggaagaccaagugcacggcgagcaacaagaaccgcggcaucaucaagaccuucuccaacgggugcgacuacgucagcaacaagggcguggacaccguguccgucggcaacacccuguacugcgugaacaagcaggagggccagagccucuacgugaagggggagcccaucaucaacuucuacgacccgcuggucuuccccuccgacgaguucgacgccagcaucucccaggugaacgagaagaucaaccagagccuggccuucauccggaaguccgacgagcuccugcacaacgugaacgucggcaagagcaccacgaacaucaugaucaccaccaucaucaucgugaucaucgugauccugcugcuccugaucgccgucgggcuguuccucuacugcaaggcccgcugaggacuaguguccaccugucccuccugggcugcuggauugucucguuuuccugccaaauaaacaggaucagcgcuuuacagaucuaaaaaaaaaaaaaaaaaaaaaaaaaaaaaaaaaaaaaaaaaaaaaaaaaaaaaaaaaaaaaaaaugcaucccccccccccccccccccccccccccccccaaaggcucuuuucagagccaccagaauu

SEQ ID NO: 15097 - RNA, 1994 nt, Artificial Sequence
  mRNA product Design b-1 comprising derived and/or modified sequence from HRSV(Memphis-37)__AIY60640.1__F-del_DSCav1_mut2 (opt1)
gggagacggagacggccugcaggaccugcucucucagcccucagccgaggccuacgccgagccgagugcgcagccgacgaccgggaggagccgcagccuucaacucugagguacugugauccgcgcugcccgccgggccgccccaguccgcugcugcggcaccuccuucccucgcgcccucuucgcucgccagcgccuucccugugagccugcgucaccgcggccgccaagcuuaccauggagcugcccauccucaagaccaacgccaucaccacgauccuggccgcggugacccugugcuucgccagcucccagaacaucaccgaggaguucuaccagagcacgugcuccgccgucagcaagggcuaccucggggcccugcgcaccggcugguacaccuccgugaucaccaucgagcugagcaacaucaaggagaacaagugcaacgggaccgacgccaaggugaagcucaucaagcaggagcuggacaaguacaagaacgcggucacggaccugcagcuccugaugcaguccaccccggccgccggcagcggguccgccaucugcagcggcaucgcggugugcaaggugcugcaccucgagggcgaggucaacaagaucaagaacgcccugcuguccaccaacaaggccguggugagccucuccaacggggucagcgugcugaccuucaaggugcuggaccucaagaacuacaucgacaagcagcugcugcccauccucaacaagcaguccugcagcauccccaacaucgagacggucaucgaguuccagcagaagaacaaccggcugcuggagaucacccgcgaguucuccgugaacgccggcgugaccacccccgucagcacguacaugcucaccaacuccgagcugcugagccucaucaacgacaugccgaucaccaacgaccagaagaagcugaugagcaacaacgugcagaucgugcggcagcaguccuacagcaucaugugcaucaucaaggaggagguccuggccuacguggugcagcucccccuguacggggucaucgacacccccugcuggaagcugcacacgagcccccucugcaccaccaacaccaaggagggcuccaacaucugccugacgcgcaccgaccgggggugguacugcgacaacgcgggcuccgugagcuucuucccgcaggccgagaccugcaaggugcaguccaaccgcgucuucugcgacaccaugaacagccugacgcuccccuccgaggugaaccugugcaacaucgacaucuucaaccccaaguacgacugcaagaucaugaccagcaagaccgacgucuccagcuccgugaucaccagccugggcgccaucguguccugcuacgggaagacgaagugcaccgccagcaacaagaaccggggcaucaucaagaccuucuccaacgggugcgacuacgucagcaacaagggcguggacaccguguccgucggcaacacgcucuacugcgugaacaagcaggaggggcagagccuguacgugaagggcgagcccaucaucaacuucuacgacccgcuggucuuccccagcgacgaguucgacgccuccaucagccaggugaacgagaagaucaaccagucccucgcguucauccgcaagagcgacgagcugcugcacaacgugaacgucgggaaguccaccaccaacaucaugaucaccaccaucaucaucgugaucaucgugauccuccugcugcucaucgccgucggccuguuccuguacugcaaggcccggugaggacuaguguccaccugucccuccugggcugcuggauugucucguuuuccugccaaauaaacaggaucagcgcuuuacagaucuaaaaaaaaaaaaaaaaaaaaaaaaaaaaaaaaaaaaaaaaaaaaaaaaaaaaaaaaaaaaaaaaugcaucccccccccccccccccccccccccccccccaaaggcucuuuucagagccaccagaauu

SEQ ID NO: 15098 - RNA, 1994 nt, Artificial Sequence
  mRNA product Design b-1 comprising derived and/or modified sequence from HRSV(Memphis-37)__AIY60640.1__F-del_DSCav1_mut2 (opt2)
gggagacggagacggccugcaggaccugcucucucagcccucagccgaggccuacgccgagccgagugcgcagccgacgaccgggaggagccgcagccuucaacucugagguacugugauccgcgcugcccgccgggccgccccaguccgcugcugcggcaccuccuucccucgcgcccucuucgcucgccagcgccuucccugugagccugcgucaccgcggccgccaagcuuaccauggagcuccccauccucaagaccaacgccaucaccaccauccucgccgccgucacccucugcuucgccuccucccagaacaucaccgaggaguucuaccaguccaccugcuccgccgucuccaagggcuaccucggcgcccuccgcaccggcugguacaccuccgucaucaccaucgagcucuccaacaucaaggagaacaagugcaacggcaccgacgccaaggucaagcucaucaagcaggagcucgacaaguacaagaacgccgucaccgaccuccagcuccucaugcaguccacccccgccgccggcuccggcuccgccaucugcuccggcaucgccgucugcaagguccuccaccucgagggcgaggucaacaagaucaagaacgcccuccucuccaccaacaaggccgucgucucccucuccaacggcgucuccguccucaccuucaagguccucgaccucaagaacuacaucgacaagcagcuccuccccauccucaacaagcaguccugcuccauccccaacaucgagaccgucaucgaguuccagcagaagaacaaccgccuccucgagaucacccgcgaguucuccgucaacgccggcgucaccacccccgucuccaccuacaugcucaccaacuccgagcuccucucccucaucaacgacaugcccaucaccaacgaccagaagaagcucauguccaacaacguccagaucguccgccagcaguccuacuccaucaugugcaucaucaaggaggagguccucgccuacgucguccagcucccccucuacggcgucaucgacacccccugcuggaagcuccacaccuccccccucugcaccaccaacaccaaggagggcuccaacaucugccucacccgcaccgaccgcggcugguacugcgacaacgccggcuccgucuccuucuucccccaggccgagaccugcaagguccaguccaaccgcgucuucugcgacaccaugaacucccucacccuccccuccgaggucaaccucugcaacaucgacaucuucaaccccaaguacgacugcaagaucaugaccuccaagaccgacgucuccuccuccgucaucaccucccucggcgccaucgucuccugcuacggcaagaccaagugcaccgccuccaacaagaaccgcggcaucaucaagaccuucuccaacggcugcgacuacgucuccaacaagggcgucgacaccgucuccgucggcaacacccucuacugcgucaacaagcaggagggccagucccucuacgucaagggcgagcccaucaucaacuucuacgacccccucgucuuccccuccgacgaguucgacgccuccaucucccaggucaacgagaagaucaaccagucccucgccuucauccgcaaguccgacgagcuccuccacaacgucaacgucggcaaguccaccaccaacaucaugaucaccaccaucaucaucgucaucaucgucauccuccuccuccucaucgccgucggccucuuccucuacugcaaggcccgcugaggacuaguguccaccugucccuccugggcugcuggauugucucguuuuccugccaaauaaacaggaucagcgcuuuacagaucuaaaaaaaaaaaaaaaaaaaaaaaaaaaaaaaaaaaaaaaaaaaaaaaaaaaaaaaaaaaaaaaaugcaucccccccccccccccccccccccccccccccaaaggcucuuuucagagccaccagaauu

SEQ ID NO: 15099 - RNA, 1994 nt, Artificial Sequence
  mRNA product Design b-1 comprising derived and/or modified sequence from HRSV(Memphis-37)__AIY60640.1__F-del_DSCav1_mut2 (opt3)
gggagacggagacggccugcaggaccugcucucucagcccucagccgaggccuacgccgagccgagugcgcagccgacgaccgggaggagccgcagccuucaacucugagguacugugauccgcgcugcccgccgggccgccccaguccgcugcugcggcaccuccuucccucgcgcccucuucgcucgccagcgccuucccugugagccugcgucaccgcggccgccaagcuuaccauggagcugcccauccucaagaccaacgccauuacaacuauacuugcugcagugacgcugugcuucgccagcucccagaauaucaccgaagaguuuuaccaaucuacauguucagcggucaguaaaggcuauuugggggcuuuaagaacuggaugguacaccagcguuauuacaaucgaacuguccaacauuaaggagaauaaaugcaacgguaccgacgccaaggugaaacuaaucaagcaggaacucgauaaguauaaaaaugcaguaacugaccugcagcuucugaugcagucuacuccugccgcuggcucggggucagcaauauguagcggaaucgccgugugcaaggucuugcaccucgagggcgaggugaacaaaauuaagaaugcucugcugaguaccaacaaagccguugugucccucucuaauggugucagcguguuaacguucaagguacuggaucuuaagaacuacaucgacaaacaauugcugccaauucuaaauaagcaguccuguucaaucccgaacauagaaacuguuauugaguuucagcagaaaaauaacaggcuccuggaaaucacccgggaguucagugugaaugcgggggucacaacucccgugagcaccuauaugcuuacaaacucugagcuguugucccucauuaacgauaugccuaucaccaaugaccaaaagaaacugaugucaaacaaugugcagaucguccgccagcagagcuacaguauuaugugcauaaucaaggaagagguuuuagcauaugugguacaacugccacucuacggagugauugauacgcccuguuggaaacuucauacuucuccucugugcacaaccaacacuaaggaaggcuccaauaucuguuugacacgaaccgaccguggcugguacugcgauaacgccgggagcgucucguuuuucccacaggcugagacguguaaggugcagucuaauagaguuuucugcgacaccaugaacucccuaacacugcccucagaagugaaucucugcaacauagauauuuucaauccuaaauaugacuguaagaucaugacaaguaaaaccgaugucagcuccucugugaucacaagccugggagccauuguaucaugcuacgguaagacuaaauguaccgcaaguaacaagaauaggggcaucauuaagacauuuuccaacgggugcgacuauguuagcaauaaaggaguggacaccgucucugugggcaacacucuuuacugugucaacaagcaagagggucagucacuguaugugaaaggggagccaauaaucaauuucuacgauccguugguuuuucccagugacgaauuugaugcuagcauuucccaggugaacgagaagaucaaucagucucucgccuuuauccggaaaucggacgaacuguuacacaacguaaaugucggaaagagcacgacaaacauuaugauaaccacuaucauuaucgugauuaucguuauacugcuacuccugaucgcggugggccuuuucuuguauugcaaggcccgcugaggacuaguguccaccugucccuccugggcugcuggauugucucguuuuccugccaaauaaacaggaucagcgcuuuacagaucuaaaaaaaaaaaaaaaaaaaaaaaaaaaaaaaaaaaaaaaaaaaaaaaaaaaaaaaaaaaaaaaaugcaucccccccccccccccccccccccccccccccaaaggcucuuuucagagccaccagaauu

SEQ ID NO: 15100 - RNA, 1994 nt, Artificial Sequence
  mRNA product Design b-1 comprising derived and/or modified sequence from HRSV(Memphis-37)__AIY60640.1__F-del_DSCav1_mut2 (opt4)
gggagacggagacggccugcaggaccugcucucucagcccucagccgaggccuacgccgagccgagugcgcagccgacgaccgggaggagccgcagccuucaacucugagguacugugauccgcgcugcccgccgggccgccccaguccgcugcugcggcaccuccuucccucgcgcccucuucgcucgccagcgccuucccugugagccugcgucaccgcggccgccaagcuuaccauggagcugcccauccugaagaccaacgccaucaccaccauccuggccgccgugacccugugcuucgccagcagccagaacaucaccgaggaguucuaccagagcaccugcagcgccgugagcaagggcuaccugggcgcccugagaaccggcugguacaccagcgugaucaccaucgagcugagcaacaucaaggagaacaagugcaacggcaccgacgccaaggugaagcugaucaagcaggagcuggacaaguacaagaacgccgugaccgaccugcagcugcugaugcagagcacccccgccgccggcagcggcagcgccaucugcagcggcaucgccgugugcaaggugcugcaccuggagggcgaggugaacaagaucaagaacgcccugcugagcaccaacaaggccguggugagccugagcaacggcgugagcgugcugaccuucaaggugcuggaccugaagaacuacaucgacaagcagcugcugcccauccugaacaagcagagcugcagcauccccaacaucgagaccgugaucgaguuccagcagaagaacaacagacugcuggagaucaccagagaguucagcgugaacgccggcgugaccacccccgugagcaccuacaugcugaccaacagcgagcugcugagccugaucaacgacaugcccaucaccaacgaccagaagaagcugaugagcaacaacgugcagaucgugagacagcagagcuacagcaucaugugcaucaucaaggaggaggugcuggccuacguggugcagcugccccuguacggcgugaucgacacccccugcuggaagcugcacaccagcccccugugcaccaccaacaccaaggagggcagcaacaucugccugaccagaaccgacagaggcugguacugcgacaacgccggcagcgugagcuucuucccccaggccgagaccugcaaggugcagagcaacagaguguucugcgacaccaugaacagccugacccugcccagcgaggugaaccugugcaacaucgacaucuucaaccccaaguacgacugcaagaucaugaccagcaagaccgacgugagcagcagcgugaucaccagccugggcgccaucgugagcugcuacggcaagaccaagugcaccgccagcaacaagaacagaggcaucaucaagaccuucagcaacggcugcgacuacgugagcaacaagggcguggacaccgugagcgugggcaacacccuguacugcgugaacaagcaggagggccagagccuguacgugaagggcgagcccaucaucaacuucuacgacccccugguguuccccagcgacgaguucgacgccagcaucagccaggugaacgagaagaucaaccagagccuggccuucaucagaaagagcgacgagcugcugcacaacgugaacgugggcaagagcaccaccaacaucaugaucaccaccaucaucaucgugaucaucgugauccugcugcugcugaucgccgugggccuguuccuguacugcaaggccagaugaggacuaguguccaccugucccuccugggcugcuggauugucucguuuuccugccaaauaaacaggaucagcgcuuuacagaucuaaaaaaaaaaaaaaaaaaaaaaaaaaaaaaaaaaaaaaaaaaaaaaaaaaaaaaaaaaaaaaaaugcaucccccccccccccccccccccccccccccccaaaggcucuuuucagagccaccagaauu

SEQ ID NO: 15101 - RNA, 1994 nt, Artificial Sequence
  mRNA product Design b-1 comprising derived and/or modified sequence from HRSV(Memphis-37)__AIY60640.1__F-del_DSCav1_mut2 (opt5)
gggagacggagacggccugcaggaccugcucucucagcccucagccgaggccuacgccgagccgagugcgcagccgacgaccgggaggagccgcagccuucaacucugagguacugugauccgcgcugcccgccgggccgccccaguccgcugcugcggcaccuccuucccucgcgcccucuucgcucgccagcgccuucccugugagccugcgucaccgcggccgccaagcuuaccauggagcugcccauccucaagaccaacgccauuacaacgauccuggcugccgugacccuuugcuucgcgagcucccagaauauuacagaagaguuuuaccaaucuaccuguagcgcugucuccaaaggcuaucugggggcccucagaacaggaugguacaccucuguuaucacaauugaacugagcaacaucaaggagaauaaaugcaacggcaccgacgccaaggugaaacuuaucaagcaggaacuggauaaguauaaaaaugcugugacggaccuccagcugcugaugcaguccaccccugccgcugggucuggaagcgccauuuguuccggcaucgcggucugcaaggugcuccaccuggagggggagguuaacaaaauuaagaaugcccuucugagcacaaacaaagcuguggucucucucuccaauggagugagcguucugaccuucaaggugcuugaucugaagaacuacaucgacaaacaacuccugccgauucugaauaagcagucuuguuccauccccaacauugaaacagucaucgaguuucagcagaaaaauaaccggcuccuggaaaucacccgcgaguucagcgugaaugccggcgugacgacaccugucucuaccuauaugcuuacaaacuccgagcugcucagccugauuaacgauaugcccaucaccaaugaccaaaagaaacuuauguccaacaauguucagauugugagacagcagucuuacagcaucaugugcauuaucaaggaagaggugcuggcuuaugucgugcaacucccucuguacggcguuaucgauacccccuguuggaaacugcauacauccccucucugcacgaccaacacaaaggaagggagcaauauuugucugacccggacagaccgcggaugguacugcgauaacgccggcucuguguccuuuuucccgcaggcggagaccuguaagguccagagcaauagaguguuuugcgacacgaugaacucucuuacacugcccagcgaaguuaaucucugcaacaucgauauuuucaauccuaaauaugacuguaagaucaugaccuccaaaaccgaugugucuagcuccgucauuacaagccugggggccaucgugucuugcuacggaaagaccaaauguacagcuuccaacaagaaucggggcaucauuaagacguuuagcaacgggugcgacuaugucucuaauaaaggaguggacaccguuuccgugggcaacacacuuuacugugucaacaagcaagagggccagagccuguaugugaaaggggagcccaucauuaauuucuacgauccucucguuuuucccuccgacgaguucgaugccucuaucagccaggugaacgaaaagauuaaucagucccuggcuuuuauccgcaaaucugacgaacugcuccacaacgucaaugugggaaagagcaccacaaacauuaugaucaccacgaucauuaucgugauuaucguuauucugcuucugcucaucgccgucggccuguuccuguauugcaaggccagaugaggacuaguguccaccugucccuccugggcugcuggauugucucguuuuccugccaaauaaacaggaucagcgcuuuacagaucuaaaaaaaaaaaaaaaaaaaaaaaaaaaaaaaaaaaaaaaaaaaaaaaaaaaaaaaaaaaaaaaaugcaucccccccccccccccccccccccccccccccaaaggcucuuuucagagccaccagaauu

SEQ ID NO: 15102 - RNA, 1994 nt, Artificial Sequence
  mRNA product Design b-1 comprising derived and/or modified sequence from HRSV(Memphis-37)__AIY60640.1__F-del_DSCav1_mut2 (opt6)
gggagacggagacggccugcaggaccugcucucucagcccucagccgaggccuacgccgagccgagugcgcagccgacgaccgggaggagccgcagccuucaacucugagguacugugauccgcgcugcccgccgggccgccccaguccgcugcugcggcaccuccuucccucgcgcccucuucgcucgccagcgccuucccugugagccugcgucaccgcggccgccaagcuuaccauggaacuaccaauacucaaaacaaacgcaauaacaacaauuuuagcugcaguaacacuuuguuucgcauccucccaaaauauaacagaagaauuuuaucaaucaaccugcucagccgucuccaaaggauaucuaggugcacuacgcacuggaugguacacaagugucaucacaauagaacuuuccaacaucaaagaaaauaaauguaauggaacugacgcaaaaguaaaacucauaaaacaagaacuagacaaauacaaaaacgcaguaacagaccuacaacuauuaaugcaaucaacaccagcagcaggauccggcagugccauaugcucuggaauagcagucugcaaaguuuuacacuuagaaggcgaaguaaacaaaaucaaaaacgcccuacuaucuacaaauaaagccgucguaucucucucaaauggaguaucaguacuaacauucaaaguauuagacuuaaaaaacuacaucgauaaacaauuauugccaauauuaaacaaacaaucuugcucaauaccaaauauagaaacagucauagaauuucaacaaaaaaauaaccgauuauuagaaauaacacgagaauuuucaguaaaugccggagucaccacaccaguaucaacauacaugcuaacaaauucagaacuauuaucauuaauaaacgacaugccuauuacaaaugaucaaaaaaaacuaauguccaacaauguacaaauaguccgacaacaaagcuacucaaucauguguauaauaaaagaagaaguacuugcauacguaguacaauuaccacuauacggaguuaucgacacaccaugcuggaaacuccacacuucaccacucugcaccacaaacacaaaagaaggcucaaacauaugccuaacaagaacagaccgaggaugguacugcgacaacgcaggaucaguaucauucuucccacaagcagaaacuugcaaaguacaaucuaacagaguuuucugugacaccaugaauagccuaacacuccccuccgaaguuaaccuauguaacauagauauauuuaaucccaaauaugauugcaaaaucaugacaucuaaaaccgacguaucaucaucuguaaucacaucacuaggugccauagucucaugcuacggcaaaacaaaaugcaccgccucaaacaaaaaccgagguauaauaaaaaccuucaguaauggaugugacuacguaucaaacaaagguguugauaccguaagcgucggcaacacccuauacugcguaaauaaacaagaaggccaaucacuauacgucaaaggcgaaccaauuauuaacuucuaugacccacucgucuuucccuccgacgaauuugacgcaagcauaucacaaguaaacgaaaaaauaaaccaaucacuagcauucauacgcaaaucagaugaacuacuacauaacguaaacguaggaaaauccacuacaaauauaaugaucacaacaauaauaaucguaauuauagucauauuauuacuacuaauagcaguaggacuuuuccuauacuguaaagcaagauaaggacuaguguccaccugucccuccugggcugcuggauugucucguuuuccugccaaauaaacaggaucagcgcuuuacagaucuaaaaaaaaaaaaaaaaaaaaaaaaaaaaaaaaaaaaaaaaaaaaaaaaaaaaaaaaaaaaaaaaugcaucccccccccccccccccccccccccccccccaaaggcucuuuucagagccaccagaauu

SEQ ID NO: 15103 - RNA, 1994 nt, Artificial Sequence
  mRNA product Design b-1 comprising derived and/or modified sequence from HRSV(Memphis-37)__AIY60640.1__F-del_DSCav1_mut2 (opt11)
gggagacggagacggccugcaggaccugcucucucagcccucagccgaggccuacgccgagccgagugcgcagccgacgaccgggaggagccgcagccuucaacucugagguacugugauccgcgcugcccgccgggccgccccaguccgcugcugcggcaccuccuucccucgcgcccucuucgcucgccagcgccuucccugugagccugcgucaccgcggccgccaagcuuaccauggaacuucccauccucaagaccaacgcuauuacgaccauccucgccgcagucacccucugcuucgcgucaucccaaaacaucaccgaagaauuuuaccaauccacaugcuccgcagucucaaaaggcuaccuaggagcccuacgcaccggaugguacacauccgucaucacaaucgaacucuccaacauaaaagaaaacaaaugcaacggcaccgaugccaaaguaaaacugauuaaacaagaacucgacaaauacaagaacgccgucacagaccuacagcuccucaugcaaucaacucccgccgccggcagcggauccgcuaucugcucaggcaucgccguaugcaaaguccuccaccuagaaggcgaaguaaacaaaaucaagaacgcacuacucucaacaaacaaagccgucgucucccucuccaacggcgucuccguccuuaccuucaaaguccucgaccuuaagaacuacauugacaaacaacuccuacccauccucaacaaacaauccugcucuauaccuaauauagaaaccguaaucgaauuucaacagaaaaacaaccgccuccucgaaauuacccgcgaguucucaguaaacgccggcguaaccacccccgucuccaccuacaugcucacaaauucagaacuccucagccucaucaacgacaugcccauaaccaacgaccaaaagaaacucaugucaaacaacguccaaaucgucaggcaacaaagcuacagcaucaugugcaucauuaaagaagaaguacucgccuacgucgugcaacuaccccucuacggcgucauagacacacccugcuggaaacuucacacaucaccgcucugcaccacaaacaccaaagaaggcaguaacauaugccucacccgaaccgaccgcggaugguacugcgacaacgccggauccgucagcuucuucccacaagccgaaaccugcaaaguacaauccaaccgagucuucugcgacaccaugaacucucuuacgcuccccucagaagucaaccuaugcaacaucgacaucuucaaccccaaauacgacugcaaaaucaugaccuccaaaacagacgucuccuccucagugauaaccucccucggcgccauugucuccugcuacggcaaaaccaaaugcaccgccuccaacaaaaaccgugggaucaucaaaaccuucucaaacggcugcgacuacguauccaauaagggugucgacacagucuccguaggcaauacccucuauugcgucaacaaacaagaaggccaaucccucuacgucaaaggcgaaccuaucaucaacuucuacgacccgcuagucuuccccucagacgaguucgacgcauccaucucacaagucaacgaaaagaucaaccagucccucgcauucauccgaaaauccgacgaacuucuccacaacguuaacgucggcaaauccaccacuaacauaaugaucaccacgaucaucauaguaauuaucgucauacuccuccuccuaaucgcugucggacucuuccucuacugcaaggcccgcuaaggacuaguguccaccugucccuccugggcugcuggauugucucguuuuccugccaaauaaacaggaucagcgcuuuacagaucuaaaaaaaaaaaaaaaaaaaaaaaaaaaaaaaaaaaaaaaaaaaaaaaaaaaaaaaaaaaaaaaaugcaucccccccccccccccccccccccccccccccaaaggcucuuuucagagccaccagaauu

SEQ ID NO: 15104 - RNA, 1814 nt, Artificial Sequence
  mRNA product Design b-2 comprising derived and/or modified sequence from HRSV(Memphis-37)__AIY60640.1__F-del_DSCav1_mut2 (opt1)
gggagagccucugcuggaguccggggaguggcguuggcugcuagagcgaagcuuaccauggagcugcccauccucaagaccaacgccaucaccacgauccuggccgcggugacccugugcuucgccagcucccagaacaucaccgaggaguucuaccagagcacgugcuccgccgucagcaagggcuaccucggcgcccugcgcaccgggugguacaccagcgugaucaccaucgagcuguccaacaucaaggagaacaagugcaacggcaccgacgccaaggugaagcucaucaagcaggagcuggacaaguacaagaacgcggucacggaccugcagcuccugaugcagagcaccccggccgccggcuccgggagcgcgaucugcuccggcaucgccgucugcaaggugcugcaccucgagggcgaggugaacaagaucaagaacgcccugcuguccaccaacaaggccgucgugagccucuccaacggggugagcguccugaccuucaaggugcuggaccucaagaacuacaucgacaagcagcugcugcccauccugaacaagcagagcugcuccauccccaacaucgagaccgucaucgaguuccagcagaagaacaaccgccuccuggagaucacgcgggaguucagcgugaacgcgggcgugaccacccccgucuccaccuacaugcugacgaacagcgagcuccugucccugaucaacgacaugccgaucaccaacgaccagaagaagcucaugagcaacaacgugcagaucgugcgccagcaguccuacagcaucaugugcaucaucaaggaggagguccuggccuacguggugcagcugccccucuacggggucaucgacacccccugcuggaagcugcacaccagcccccugugcacgaccaacaccaaggagggcuccaacaucugccucacccggacggaccgcgggugguacugcgacaacgccggcagcguguccuucuucccgcaggccgagaccugcaagguccagagcaaccggguguucugcgacaccaugaacucccugacccugcccagcgaggugaaccucugcaacaucgacaucuucaaccccaaguacgacugcaagaucaugacguccaagaccgacgucagcuccagcgugaucaccucccugggcgccaucgugagcugcuacgggaagaccaagugcacggcgagcaacaagaaccgcggcaucaucaagaccuucuccaacgggugcgacuacgucagcaacaagggcguggacaccguguccgucggcaacacccuguacugcgugaacaagcaggagggccagagccucuacgugaagggggagcccaucaucaacuucuacgacccgcuggucuuccccuccgacgaguucgacgccagcaucucccaggugaacgagaagaucaaccagagccuggccuucauccggaaguccgacgagcuccugcacaacgugaacgucggcaagagcaccacgaacaucaugaucaccaccaucaucaucgugaucaucgugauccugcugcuccugaucgccgucgggcuguuccucuacugcaaggcccgcugaggacuaguguccaccugucccuccugggcugcuggauugucucguuuuccugccaaauaaacaggaucagcgcuuuacagaucuaaaaaaaaaaaaaaaaaaaaaaaaaaaaaaaaaaaaaaaaaaaaaaaaaaaaaaaaaaaaaaaaugcaucccccccccccccccccccccccccccccccaaaggcucuuuucagagccaccagaauu

SEQ ID NO: 15105 - RNA, 1814 nt, Artificial Sequence
  mRNA product Design b-2 comprising derived and/or modified sequence from HRSV(Memphis-37)__AIY60640.1__F-del_DSCav1_mut2 (opt1)
gggagagccucugcuggaguccggggaguggcguuggcugcuagagcgaagcuuaccauggagcugcccauccucaagaccaacgccaucaccacgauccuggccgcggugacccugugcuucgccagcucccagaacaucaccgaggaguucuaccagagcacgugcuccgccgucagcaagggcuaccucggggcccugcgcaccggcugguacaccuccgugaucaccaucgagcugagcaacaucaaggagaacaagugcaacgggaccgacgccaaggugaagcucaucaagcaggagcuggacaaguacaagaacgcggucacggaccugcagcuccugaugcaguccaccccggccgccggcagcggguccgccaucugcagcggcaucgcggugugcaaggugcugcaccucgagggcgaggucaacaagaucaagaacgcccugcuguccaccaacaaggccguggugagccucuccaacggggucagcgugcugaccuucaaggugcuggaccucaagaacuacaucgacaagcagcugcugcccauccucaacaagcaguccugcagcauccccaacaucgagacggucaucgaguuccagcagaagaacaaccggcugcuggagaucacccgcgaguucuccgugaacgccggcgugaccacccccgucagcacguacaugcucaccaacuccgagcugcugagccucaucaacgacaugccgaucaccaacgaccagaagaagcugaugagcaacaacgugcagaucgugcggcagcaguccuacagcaucaugugcaucaucaaggaggagguccuggccuacguggugcagcucccccuguacggggucaucgacacccccugcuggaagcugcacacgagcccccucugcaccaccaacaccaaggagggcuccaacaucugccugacgcgcaccgaccgggggugguacugcgacaacgcgggcuccgugagcuucuucccgcaggccgagaccugcaaggugcaguccaaccgcgucuucugcgacaccaugaacagccugacgcuccccuccgaggugaaccugugcaacaucgacaucuucaaccccaaguacgacugcaagaucaugaccagcaagaccgacgucuccagcuccgugaucaccagccugggcgccaucguguccugcuacgggaagacgaagugcaccgccagcaacaagaaccggggcaucaucaagaccuucuccaacgggugcgacuacgucagcaacaagggcguggacaccguguccgucggcaacacgcucuacugcgugaacaagcaggaggggcagagccuguacgugaagggcgagcccaucaucaacuucuacgacccgcuggucuuccccagcgacgaguucgacgccuccaucagccaggugaacgagaagaucaaccagucccucgcguucauccgcaagagcgacgagcugcugcacaacgugaacgucgggaaguccaccaccaacaucaugaucaccaccaucaucaucgugaucaucgugauccuccugcugcucaucgccgucggccuguuccuguacugcaaggcccggugaggacuaguguccaccugucccuccugggcugcuggauugucucguuuuccugccaaauaaacaggaucagcgcuuuacagaucuaaaaaaaaaaaaaaaaaaaaaaaaaaaaaaaaaaaaaaaaaaaaaaaaaaaaaaaaaaaaaaaaugcaucccccccccccccccccccccccccccccccaaaggcucuuuucagagccaccagaauu

SEQ ID NO: 15106 - RNA, 1814 nt, Artificial Sequence
  mRNA product Design b-2 comprising derived and/or modified sequence from HRSV(Memphis-37)__AIY60640.1__F-del_DSCav1_mut2 (opt2)
gggagagccucugcuggaguccggggaguggcguuggcugcuagagcgaagcuuaccauggagcuccccauccucaagaccaacgccaucaccaccauccucgccgccgucacccucugcuucgccuccucccagaacaucaccgaggaguucuaccaguccaccugcuccgccgucuccaagggcuaccucggcgcccuccgcaccggcugguacaccuccgucaucaccaucgagcucuccaacaucaaggagaacaagugcaacggcaccgacgccaaggucaagcucaucaagcaggagcucgacaaguacaagaacgccgucaccgaccuccagcuccucaugcaguccacccccgccgccggcuccggcuccgccaucugcuccggcaucgccgucugcaagguccuccaccucgagggcgaggucaacaagaucaagaacgcccuccucuccaccaacaaggccgucgucucccucuccaacggcgucuccguccucaccuucaagguccucgaccucaagaacuacaucgacaagcagcuccuccccauccucaacaagcaguccugcuccauccccaacaucgagaccgucaucgaguuccagcagaagaacaaccgccuccucgagaucacccgcgaguucuccgucaacgccggcgucaccacccccgucuccaccuacaugcucaccaacuccgagcuccucucccucaucaacgacaugcccaucaccaacgaccagaagaagcucauguccaacaacguccagaucguccgccagcaguccuacuccaucaugugcaucaucaaggaggagguccucgccuacgucguccagcucccccucuacggcgucaucgacacccccugcuggaagcuccacaccuccccccucugcaccaccaacaccaaggagggcuccaacaucugccucacccgcaccgaccgcggcugguacugcgacaacgccggcuccgucuccuucuucccccaggccgagaccugcaagguccaguccaaccgcgucuucugcgacaccaugaacucccucacccuccccuccgaggucaaccucugcaacaucgacaucuucaaccccaaguacgacugcaagaucaugaccuccaagaccgacgucuccuccuccgucaucaccucccucggcgccaucgucuccugcuacggcaagaccaagugcaccgccuccaacaagaaccgcggcaucaucaagaccuucuccaacggcugcgacuacgucuccaacaagggcgucgacaccgucuccgucggcaacacccucuacugcgucaacaagcaggagggccagucccucuacgucaagggcgagcccaucaucaacuucuacgacccccucgucuuccccuccgacgaguucgacgccuccaucucccaggucaacgagaagaucaaccagucccucgccuucauccgcaaguccgacgagcuccuccacaacgucaacgucggcaaguccaccaccaacaucaugaucaccaccaucaucaucgucaucaucgucauccuccuccuccucaucgccgucggccucuuccucuacugcaaggcccgcugaggacuaguguccaccugucccuccugggcugcuggauugucucguuuuccugccaaauaaacaggaucagcgcuuuacagaucuaaaaaaaaaaaaaaaaaaaaaaaaaaaaaaaaaaaaaaaaaaaaaaaaaaaaaaaaaaaaaaaaugcaucccccccccccccccccccccccccccccccaaaggcucuuuucagagccaccagaauu

SEQ ID NO: 15107 - RNA, 1814 nt, Artificial Sequence
  mRNA product Design b-2 comprising derived and/or modified sequence from HRSV(Memphis-37)__AIY60640.1__F-del_DSCav1_mut2 (opt3)
gggagagccucugcuggaguccggggaguggcguuggcugcuagagcgaagcuuaccauggagcugcccauccucaagaccaacgccauuacaacuauacuugcugcagugacgcugugcuucgccagcucccagaauaucaccgaagaguuuuaccaaucuacauguucagcggucaguaaaggcuauuugggggcuuuaagaacuggaugguacaccagcguuauuacaaucgaacuguccaacauuaaggagaauaaaugcaacgguaccgacgccaaggugaaacuaaucaagcaggaacucgauaaguauaaaaaugcaguaacugaccugcagcuucugaugcagucuacuccugccgcuggcucggggucagcaauauguagcggaaucgccgugugcaaggucuugcaccucgagggcgaggugaacaaaauuaagaaugcucugcugaguaccaacaaagccguugugucccucucuaauggugucagcguguuaacguucaagguacuggaucuuaagaacuacaucgacaaacaauugcugccaauucuaaauaagcaguccuguucaaucccgaacauagaaacuguuauugaguuucagcagaaaaauaacaggcuccuggaaaucacccgggaguucagugugaaugcgggggucacaacucccgugagcaccuauaugcuuacaaacucugagcuguugucccucauuaacgauaugccuaucaccaaugaccaaaagaaacugaugucaaacaaugugcagaucguccgccagcagagcuacaguauuaugugcauaaucaaggaagagguuuuagcauaugugguacaacugccacucuacggagugauugauacgcccuguuggaaacuucauacuucuccucugugcacaaccaacacuaaggaaggcuccaauaucuguuugacacgaaccgaccguggcugguacugcgauaacgccgggagcgucucguuuuucccacaggcugagacguguaaggugcagucuaauagaguuuucugcgacaccaugaacucccuaacacugcccucagaagugaaucucugcaacauagauauuuucaauccuaaauaugacuguaagaucaugacaaguaaaaccgaugucagcuccucugugaucacaagccugggagccauuguaucaugcuacgguaagacuaaauguaccgcaaguaacaagaauaggggcaucauuaagacauuuuccaacgggugcgacuauguuagcaauaaaggaguggacaccgucucugugggcaacacucuuuacugugucaacaagcaagagggucagucacuguaugugaaaggggagccaauaaucaauuucuacgauccguugguuuuucccagugacgaauuugaugcuagcauuucccaggugaacgagaagaucaaucagucucucgccuuuauccggaaaucggacgaacuguuacacaacguaaaugucggaaagagcacgacaaacauuaugauaaccacuaucauuaucgugauuaucguuauacugcuacuccugaucgcggugggccuuuucuuguauugcaaggcccgcugaggacuaguguccaccugucccuccugggcugcuggauugucucguuuuccugccaaauaaacaggaucagcgcuuuacagaucuaaaaaaaaaaaaaaaaaaaaaaaaaaaaaaaaaaaaaaaaaaaaaaaaaaaaaaaaaaaaaaaaugcaucccccccccccccccccccccccccccccccaaaggcucuuuucagagccaccagaauu

SEQ ID NO: 15108 - RNA, 1814 nt, Artificial Sequence
  mRNA product Design b-2 comprising derived and/or modified sequence from HRSV(Memphis-37)__AIY60640.1__F-del_DSCav1_mut2 (opt4)
gggagagccucugcuggaguccggggaguggcguuggcugcuagagcgaagcuuaccauggagcugcccauccugaagaccaacgccaucaccaccauccuggccgccgugacccugugcuucgccagcagccagaacaucaccgaggaguucuaccagagcaccugcagcgccgugagcaagggcuaccugggcgcccugagaaccggcugguacaccagcgugaucaccaucgagcugagcaacaucaaggagaacaagugcaacggcaccgacgccaaggugaagcugaucaagcaggagcuggacaaguacaagaacgccgugaccgaccugcagcugcugaugcagagcacccccgccgccggcagcggcagcgccaucugcagcggcaucgccgugugcaaggugcugcaccuggagggcgaggugaacaagaucaagaacgcccugcugagcaccaacaaggccguggugagccugagcaacggcgugagcgugcugaccuucaaggugcuggaccugaagaacuacaucgacaagcagcugcugcccauccugaacaagcagagcugcagcauccccaacaucgagaccgugaucgaguuccagcagaagaacaacagacugcuggagaucaccagagaguucagcgugaacgccggcgugaccacccccgugagcaccuacaugcugaccaacagcgagcugcugagccugaucaacgacaugcccaucaccaacgaccagaagaagcugaugagcaacaacgugcagaucgugagacagcagagcuacagcaucaugugcaucaucaaggaggaggugcuggccuacguggugcagcugccccuguacggcgugaucgacacccccugcuggaagcugcacaccagcccccugugcaccaccaacaccaaggagggcagcaacaucugccugaccagaaccgacagaggcugguacugcgacaacgccggcagcgugagcuucuucccccaggccgagaccugcaaggugcagagcaacagaguguucugcgacaccaugaacagccugacccugcccagcgaggugaaccugugcaacaucgacaucuucaaccccaaguacgacugcaagaucaugaccagcaagaccgacgugagcagcagcgugaucaccagccugggcgccaucgugagcugcuacggcaagaccaagugcaccgccagcaacaagaacagaggcaucaucaagaccuucagcaacggcugcgacuacgugagcaacaagggcguggacaccgugagcgugggcaacacccuguacugcgugaacaagcaggagggccagagccuguacgugaagggcgagcccaucaucaacuucuacgacccccugguguuccccagcgacgaguucgacgccagcaucagccaggugaacgagaagaucaaccagagccuggccuucaucagaaagagcgacgagcugcugcacaacgugaacgugggcaagagcaccaccaacaucaugaucaccaccaucaucaucgugaucaucgugauccugcugcugcugaucgccgugggccuguuccuguacugcaaggccagaugaggacuaguguccaccugucccuccugggcugcuggauugucucguuuuccugccaaauaaacaggaucagcgcuuuacagaucuaaaaaaaaaaaaaaaaaaaaaaaaaaaaaaaaaaaaaaaaaaaaaaaaaaaaaaaaaaaaaaaaugcaucccccccccccccccccccccccccccccccaaaggcucuuuucagagccaccagaauu

SEQ ID NO: 15109 - RNA, 1814 nt, Artificial Sequence
  mRNA product Design b-2 comprising derived and/or modified sequence from HRSV(Memphis-37)__AIY60640.1__F-del_DSCav1_mut2 (opt5)
gggagagccucugcuggaguccggggaguggcguuggcugcuagagcgaagcuuaccauggagcugcccauccucaagaccaacgccauuacaacgauccuggcugccgugacccuuugcuucgcgagcucccagaauauuacagaagaguuuuaccaaucuaccuguagcgcugucuccaaaggcuaucugggggcccucagaacaggaugguacaccucuguuaucacaauugaacugagcaacaucaaggagaauaaaugcaacggcaccgacgccaaggugaaacuuaucaagcaggaacuggauaaguauaaaaaugcugugacggaccuccagcugcugaugcaguccaccccugccgcugggucuggaagcgccauuuguuccggcaucgcggucugcaaggugcuccaccuggagggggagguuaacaaaauuaagaaugcccuucugagcacaaacaaagcuguggucucucucuccaauggagugagcguucugaccuucaaggugcuugaucugaagaacuacaucgacaaacaacuccugccgauucugaauaagcagucuuguuccauccccaacauugaaacagucaucgaguuucagcagaaaaauaaccggcuccuggaaaucacccgcgaguucagcgugaaugccggcgugacgacaccugucucuaccuauaugcuuacaaacuccgagcugcucagccugauuaacgauaugcccaucaccaaugaccaaaagaaacuuauguccaacaauguucagauugugagacagcagucuuacagcaucaugugcauuaucaaggaagaggugcuggcuuaugucgugcaacucccucuguacggcguuaucgauacccccuguuggaaacugcauacauccccucucugcacgaccaacacaaaggaagggagcaauauuugucugacccggacagaccgcggaugguacugcgauaacgccggcucuguguccuuuuucccgcaggcggagaccuguaagguccagagcaauagaguguuuugcgacacgaugaacucucuuacacugcccagcgaaguuaaucucugcaacaucgauauuuucaauccuaaauaugacuguaagaucaugaccuccaaaaccgaugugucuagcuccgucauuacaagccugggggccaucgugucuugcuacggaaagaccaaauguacagcuuccaacaagaaucggggcaucauuaagacguuuagcaacgggugcgacuaugucucuaauaaaggaguggacaccguuuccgugggcaacacacuuuacugugucaacaagcaagagggccagagccuguaugugaaaggggagcccaucauuaauuucuacgauccucucguuuuucccuccgacgaguucgaugccucuaucagccaggugaacgaaaagauuaaucagucccuggcuuuuauccgcaaaucugacgaacugcuccacaacgucaaugugggaaagagcaccacaaacauuaugaucaccacgaucauuaucgugauuaucguuauucugcuucugcucaucgccgucggccuguuccuguauugcaaggccagaugaggacuaguguccaccugucccuccugggcugcuggauugucucguuuuccugccaaauaaacaggaucagcgcuuuacagaucuaaaaaaaaaaaaaaaaaaaaaaaaaaaaaaaaaaaaaaaaaaaaaaaaaaaaaaaaaaaaaaaaugcaucccccccccccccccccccccccccccccccaaaggcucuuuucagagccaccagaauu

SEQ ID NO: 15110 - RNA, 1814 nt, Artificial Sequence
  mRNA product Design b-2 comprising derived and/or modified sequence from HRSV(Memphis-37)__AIY60640.1__F-del_DSCav1_mut2 (opt6)
gggagagccucugcuggaguccggggaguggcguuggcugcuagagcgaagcuuaccauggaacuaccaauacucaaaacaaacgcaauaacaacaauuuuagcugcaguaacacuuuguuucgcauccucccaaaauauaacagaagaauuuuaucaaucaaccugcucagccgucuccaaaggauaucuaggugcacuacgcacuggaugguacacaagugucaucacaauagaacuuuccaacaucaaagaaaauaaauguaauggaacugacgcaaaaguaaaacucauaaaacaagaacuagacaaauacaaaaacgcaguaacagaccuacaacuauuaaugcaaucaacaccagcagcaggauccggcagugccauaugcucuggaauagcagucugcaaaguuuuacacuuagaaggcgaaguaaacaaaaucaaaaacgcccuacuaucuacaaauaaagccgucguaucucucucaaauggaguaucaguacuaacauucaaaguauuagacuuaaaaaacuacaucgauaaacaauuauugccaauauuaaacaaacaaucuugcucaauaccaaauauagaaacagucauagaauuucaacaaaaaaauaaccgauuauuagaaauaacacgagaauuuucaguaaaugccggagucaccacaccaguaucaacauacaugcuaacaaauucagaacuauuaucauuaauaaacgacaugccuauuacaaaugaucaaaaaaaacuaauguccaacaauguacaaauaguccgacaacaaagcuacucaaucauguguauaauaaaagaagaaguacuugcauacguaguacaauuaccacuauacggaguuaucgacacaccaugcuggaaacuccacacuucaccacucugcaccacaaacacaaaagaaggcucaaacauaugccuaacaagaacagaccgaggaugguacugcgacaacgcaggaucaguaucauucuucccacaagcagaaacuugcaaaguacaaucuaacagaguuuucugugacaccaugaauagccuaacacuccccuccgaaguuaaccuauguaacauagauauauuuaaucccaaauaugauugcaaaaucaugacaucuaaaaccgacguaucaucaucuguaaucacaucacuaggugccauagucucaugcuacggcaaaacaaaaugcaccgccucaaacaaaaaccgagguauaauaaaaaccuucaguaauggaugugacuacguaucaaacaaagguguugauaccguaagcgucggcaacacccuauacugcguaaauaaacaagaaggccaaucacuauacgucaaaggcgaaccaauuauuaacuucuaugacccacucgucuuucccuccgacgaauuugacgcaagcauaucacaaguaaacgaaaaaauaaaccaaucacuagcauucauacgcaaaucagaugaacuacuacauaacguaaacguaggaaaauccacuacaaauauaaugaucacaacaauaauaaucguaauuauagucauauuauuacuacuaauagcaguaggacuuuuccuauacuguaaagcaagauaaggacuaguguccaccugucccuccugggcugcuggauugucucguuuuccugccaaauaaacaggaucagcgcuuuacagaucuaaaaaaaaaaaaaaaaaaaaaaaaaaaaaaaaaaaaaaaaaaaaaaaaaaaaaaaaaaaaaaaaugcaucccccccccccccccccccccccccccccccaaaggcucuuuucagagccaccagaauu

SEQ ID NO: 15111 - RNA, 1814 nt, Artificial Sequence
  mRNA product Design b-2 comprising derived and/or modified sequence from HRSV(Memphis-37)__AIY60640.1__F-del_DSCav1_mut2 (opt11)
gggagagccucugcuggaguccggggaguggcguuggcugcuagagcgaagcuuaccauggaacuucccauccucaagaccaacgcuauuacgaccauccucgccgcagucacccucugcuucgcgucaucccaaaacaucaccgaagaauuuuaccaauccacaugcuccgcagucucaaaaggcuaccuaggagcccuacgcaccggaugguacacauccgucaucacaaucgaacucuccaacauaaaagaaaacaaaugcaacggcaccgaugccaaaguaaaacugauuaaacaagaacucgacaaauacaagaacgccgucacagaccuacagcuccucaugcaaucaacucccgccgccggcagcggauccgcuaucugcucaggcaucgccguaugcaaaguccuccaccuagaaggcgaaguaaacaaaaucaagaacgcacuacucucaacaaacaaagccgucgucucccucuccaacggcgucuccguccuuaccuucaaaguccucgaccuuaagaacuacauugacaaacaacuccuacccauccucaacaaacaauccugcucuauaccuaauauagaaaccguaaucgaauuucaacagaaaaacaaccgccuccucgaaauuacccgcgaguucucaguaaacgccggcguaaccacccccgucuccaccuacaugcucacaaauucagaacuccucagccucaucaacgacaugcccauaaccaacgaccaaaagaaacucaugucaaacaacguccaaaucgucaggcaacaaagcuacagcaucaugugcaucauuaaagaagaaguacucgccuacgucgugcaacuaccccucuacggcgucauagacacacccugcuggaaacuucacacaucaccgcucugcaccacaaacaccaaagaaggcaguaacauaugccucacccgaaccgaccgcggaugguacugcgacaacgccggauccgucagcuucuucccacaagccgaaaccugcaaaguacaauccaaccgagucuucugcgacaccaugaacucucuuacgcuccccucagaagucaaccuaugcaacaucgacaucuucaaccccaaauacgacugcaaaaucaugaccuccaaaacagacgucuccuccucagugauaaccucccucggcgccauugucuccugcuacggcaaaaccaaaugcaccgccuccaacaaaaaccgugggaucaucaaaaccuucucaaacggcugcgacuacguauccaauaagggugucgacacagucuccguaggcaauacccucuauugcgucaacaaacaagaaggccaaucccucuacgucaaaggcgaaccuaucaucaacuucuacgacccgcuagucuuccccucagacgaguucgacgcauccaucucacaagucaacgaaaagaucaaccagucccucgcauucauccgaaaauccgacgaacuucuccacaacguuaacgucggcaaauccaccacuaacauaaugaucaccacgaucaucauaguaauuaucgucauacuccuccuccuaaucgcugucggacucuuccucuacugcaaggcccgcuaaggacuaguguccaccugucccuccugggcugcuggauugucucguuuuccugccaaauaaacaggaucagcgcuuuacagaucuaaaaaaaaaaaaaaaaaaaaaaaaaaaaaaaaaaaaaaaaaaaaaaaaaaaaaaaaaaaaaaaaugcaucccccccccccccccccccccccccccccccaaaggcucuuuucagagccaccagaauu

SEQ ID NO: 15112 - RNA, 1834 nt, Artificial Sequence
  mRNA product Design b-3 comprising derived and/or modified sequence from HRSV(Memphis-37)__AIY60640.1__F-del_DSCav1_mut2 (opt1)
gggagagucccgcagucggcguccagcggcucugcuuguucgugugugugucguugcaggccuuauucaagcuuaccauggagcugcccauccucaagaccaacgccaucaccacgauccuggccgcggugacccugugcuucgccagcucccagaacaucaccgaggaguucuaccagagcacgugcuccgccgucagcaagggcuaccucggcgcccugcgcaccgggugguacaccagcgugaucaccaucgagcuguccaacaucaaggagaacaagugcaacggcaccgacgccaaggugaagcucaucaagcaggagcuggacaaguacaagaacgcggucacggaccugcagcuccugaugcagagcaccccggccgccggcuccgggagcgcgaucugcuccggcaucgccgucugcaaggugcugcaccucgagggcgaggugaacaagaucaagaacgcccugcuguccaccaacaaggccgucgugagccucuccaacggggugagcguccugaccuucaaggugcuggaccucaagaacuacaucgacaagcagcugcugcccauccugaacaagcagagcugcuccauccccaacaucgagaccgucaucgaguuccagcagaagaacaaccgccuccuggagaucacgcgggaguucagcgugaacgcgggcgugaccacccccgucuccaccuacaugcugacgaacagcgagcuccugucccugaucaacgacaugccgaucaccaacgaccagaagaagcucaugagcaacaacgugcagaucgugcgccagcaguccuacagcaucaugugcaucaucaaggaggagguccuggccuacguggugcagcugccccucuacggggucaucgacacccccugcuggaagcugcacaccagcccccugugcacgaccaacaccaaggagggcuccaacaucugccucacccggacggaccgcgggugguacugcgacaacgccggcagcguguccuucuucccgcaggccgagaccugcaagguccagagcaaccggguguucugcgacaccaugaacucccugacccugcccagcgaggugaaccucugcaacaucgacaucuucaaccccaaguacgacugcaagaucaugacguccaagaccgacgucagcuccagcgugaucaccucccugggcgccaucgugagcugcuacgggaagaccaagugcacggcgagcaacaagaaccgcggcaucaucaagaccuucuccaacgggugcgacuacgucagcaacaagggcguggacaccguguccgucggcaacacccuguacugcgugaacaagcaggagggccagagccucuacgugaagggggagcccaucaucaacuucuacgacccgcuggucuuccccuccgacgaguucgacgccagcaucucccaggugaacgagaagaucaaccagagccuggccuucauccggaaguccgacgagcuccugcacaacgugaacgucggcaagagcaccacgaacaucaugaucaccaccaucaucaucgugaucaucgugauccugcugcuccugaucgccgucgggcuguuccucuacugcaaggcccgcugaggacuaguguccaccugucccuccugggcugcuggauugucucguuuuccugccaaauaaacaggaucagcgcuuuacagaucuaaaaaaaaaaaaaaaaaaaaaaaaaaaaaaaaaaaaaaaaaaaaaaaaaaaaaaaaaaaaaaaaugcaucccccccccccccccccccccccccccccccaaaggcucuuuucagagccaccagaauu

SEQ ID NO: 15113 - RNA, 1834 nt, Artificial Sequence
  mRNA product Design b-3 comprising derived and/or modified sequence from HRSV(Memphis-37)__AIY60640.1__F-del_DSCav1_mut2 (opt1)
gggagagucccgcagucggcguccagcggcucugcuuguucgugugugugucguugcaggccuuauucaagcuuaccauggagcugcccauccucaagaccaacgccaucaccacgauccuggccgcggugacccugugcuucgccagcucccagaacaucaccgaggaguucuaccagagcacgugcuccgccgucagcaagggcuaccucggggcccugcgcaccggcugguacaccuccgugaucaccaucgagcugagcaacaucaaggagaacaagugcaacgggaccgacgccaaggugaagcucaucaagcaggagcuggacaaguacaagaacgcggucacggaccugcagcuccugaugcaguccaccccggccgccggcagcggguccgccaucugcagcggcaucgcggugugcaaggugcugcaccucgagggcgaggucaacaagaucaagaacgcccugcuguccaccaacaaggccguggugagccucuccaacggggucagcgugcugaccuucaaggugcuggaccucaagaacuacaucgacaagcagcugcugcccauccucaacaagcaguccugcagcauccccaacaucgagacggucaucgaguuccagcagaagaacaaccggcugcuggagaucacccgcgaguucuccgugaacgccggcgugaccacccccgucagcacguacaugcucaccaacuccgagcugcugagccucaucaacgacaugccgaucaccaacgaccagaagaagcugaugagcaacaacgugcagaucgugcggcagcaguccuacagcaucaugugcaucaucaaggaggagguccuggccuacguggugcagcucccccuguacggggucaucgacacccccugcuggaagcugcacacgagcccccucugcaccaccaacaccaaggagggcuccaacaucugccugacgcgcaccgaccgggggugguacugcgacaacgcgggcuccgugagcuucuucccgcaggccgagaccugcaaggugcaguccaaccgcgucuucugcgacaccaugaacagccugacgcuccccuccgaggugaaccugugcaacaucgacaucuucaaccccaaguacgacugcaagaucaugaccagcaagaccgacgucuccagcuccgugaucaccagccugggcgccaucguguccugcuacgggaagacgaagugcaccgccagcaacaagaaccggggcaucaucaagaccuucuccaacgggugcgacuacgucagcaacaagggcguggacaccguguccgucggcaacacgcucuacugcgugaacaagcaggaggggcagagccuguacgugaagggcgagcccaucaucaacuucuacgacccgcuggucuuccccagcgacgaguucgacgccuccaucagccaggugaacgagaagaucaaccagucccucgcguucauccgcaagagcgacgagcugcugcacaacgugaacgucgggaaguccaccaccaacaucaugaucaccaccaucaucaucgugaucaucgugauccuccugcugcucaucgccgucggccuguuccuguacugcaaggcccggugaggacuaguguccaccugucccuccugggcugcuggauugucucguuuuccugccaaauaaacaggaucagcgcuuuacagaucuaaaaaaaaaaaaaaaaaaaaaaaaaaaaaaaaaaaaaaaaaaaaaaaaaaaaaaaaaaaaaaaaugcaucccccccccccccccccccccccccccccccaaaggcucuuuucagagccaccagaauu

SEQ ID NO: 15114 - RNA, 1834 nt, Artificial Sequence
  mRNA product Design b-3 comprising derived and/or modified sequence from HRSV(Memphis-37)__AIY60640.1__F-del_DSCav1_mut2 (opt2)
gggagagucccgcagucggcguccagcggcucugcuuguucgugugugugucguugcaggccuuauucaagcuuaccauggagcuccccauccucaagaccaacgccaucaccaccauccucgccgccgucacccucugcuucgccuccucccagaacaucaccgaggaguucuaccaguccaccugcuccgccgucuccaagggcuaccucggcgcccuccgcaccggcugguacaccuccgucaucaccaucgagcucuccaacaucaaggagaacaagugcaacggcaccgacgccaaggucaagcucaucaagcaggagcucgacaaguacaagaacgccgucaccgaccuccagcuccucaugcaguccacccccgccgccggcuccggcuccgccaucugcuccggcaucgccgucugcaagguccuccaccucgagggcgaggucaacaagaucaagaacgcccuccucuccaccaacaaggccgucgucucccucuccaacggcgucuccguccucaccuucaagguccucgaccucaagaacuacaucgacaagcagcuccuccccauccucaacaagcaguccugcuccauccccaacaucgagaccgucaucgaguuccagcagaagaacaaccgccuccucgagaucacccgcgaguucuccgucaacgccggcgucaccacccccgucuccaccuacaugcucaccaacuccgagcuccucucccucaucaacgacaugcccaucaccaacgaccagaagaagcucauguccaacaacguccagaucguccgccagcaguccuacuccaucaugugcaucaucaaggaggagguccucgccuacgucguccagcucccccucuacggcgucaucgacacccccugcuggaagcuccacaccuccccccucugcaccaccaacaccaaggagggcuccaacaucugccucacccgcaccgaccgcggcugguacugcgacaacgccggcuccgucuccuucuucccccaggccgagaccugcaagguccaguccaaccgcgucuucugcgacaccaugaacucccucacccuccccuccgaggucaaccucugcaacaucgacaucuucaaccccaaguacgacugcaagaucaugaccuccaagaccgacgucuccuccuccgucaucaccucccucggcgccaucgucuccugcuacggcaagaccaagugcaccgccuccaacaagaaccgcggcaucaucaagaccuucuccaacggcugcgacuacgucuccaacaagggcgucgacaccgucuccgucggcaacacccucuacugcgucaacaagcaggagggccagucccucuacgucaagggcgagcccaucaucaacuucuacgacccccucgucuuccccuccgacgaguucgacgccuccaucucccaggucaacgagaagaucaaccagucccucgccuucauccgcaaguccgacgagcuccuccacaacgucaacgucggcaaguccaccaccaacaucaugaucaccaccaucaucaucgucaucaucgucauccuccuccuccucaucgccgucggccucuuccucuacugcaaggcccgcugaggacuaguguccaccugucccuccugggcugcuggauugucucguuuuccugccaaauaaacaggaucagcgcuuuacagaucuaaaaaaaaaaaaaaaaaaaaaaaaaaaaaaaaaaaaaaaaaaaaaaaaaaaaaaaaaaaaaaaaugcaucccccccccccccccccccccccccccccccaaaggcucuuuucagagccaccagaauu

SEQ ID NO: 15115 - RNA, 1834 nt, Artificial Sequence
  mRNA product Design b-3 comprising derived and/or modified sequence from HRSV(Memphis-37)__AIY60640.1__F-del_DSCav1_mut2 (opt3)
gggagagucccgcagucggcguccagcggcucugcuuguucgugugugugucguugcaggccuuauucaagcuuaccauggagcugcccauccucaagaccaacgccauuacaacuauacuugcugcagugacgcugugcuucgccagcucccagaauaucaccgaagaguuuuaccaaucuacauguucagcggucaguaaaggcuauuugggggcuuuaagaacuggaugguacaccagcguuauuacaaucgaacuguccaacauuaaggagaauaaaugcaacgguaccgacgccaaggugaaacuaaucaagcaggaacucgauaaguauaaaaaugcaguaacugaccugcagcuucugaugcagucuacuccugccgcuggcucggggucagcaauauguagcggaaucgccgugugcaaggucuugcaccucgagggcgaggugaacaaaauuaagaaugcucugcugaguaccaacaaagccguugugucccucucuaauggugucagcguguuaacguucaagguacuggaucuuaagaacuacaucgacaaacaauugcugccaauucuaaauaagcaguccuguucaaucccgaacauagaaacuguuauugaguuucagcagaaaaauaacaggcuccuggaaaucacccgggaguucagugugaaugcgggggucacaacucccgugagcaccuauaugcuuacaaacucugagcuguugucccucauuaacgauaugccuaucaccaaugaccaaaagaaacugaugucaaacaaugugcagaucguccgccagcagagcuacaguauuaugugcauaaucaaggaagagguuuuagcauaugugguacaacugccacucuacggagugauugauacgcccuguuggaaacuucauacuucuccucugugcacaaccaacacuaaggaaggcuccaauaucuguuugacacgaaccgaccguggcugguacugcgauaacgccgggagcgucucguuuuucccacaggcugagacguguaaggugcagucuaauagaguuuucugcgacaccaugaacucccuaacacugcccucagaagugaaucucugcaacauagauauuuucaauccuaaauaugacuguaagaucaugacaaguaaaaccgaugucagcuccucugugaucacaagccugggagccauuguaucaugcuacgguaagacuaaauguaccgcaaguaacaagaauaggggcaucauuaagacauuuuccaacgggugcgacuauguuagcaauaaaggaguggacaccgucucugugggcaacacucuuuacugugucaacaagcaagagggucagucacuguaugugaaaggggagccaauaaucaauuucuacgauccguugguuuuucccagugacgaauuugaugcuagcauuucccaggugaacgagaagaucaaucagucucucgccuuuauccggaaaucggacgaacuguuacacaacguaaaugucggaaagagcacgacaaacauuaugauaaccacuaucauuaucgugauuaucguuauacugcuacuccugaucgcggugggccuuuucuuguauugcaaggcccgcugaggacuaguguccaccugucccuccugggcugcuggauugucucguuuuccugccaaauaaacaggaucagcgcuuuacagaucuaaaaaaaaaaaaaaaaaaaaaaaaaaaaaaaaaaaaaaaaaaaaaaaaaaaaaaaaaaaaaaaaugcaucccccccccccccccccccccccccccccccaaaggcucuuuucagagccaccagaauu

SEQ ID NO: 15116 - RNA, 1834 nt, Artificial Sequence
  mRNA product Design b-3 comprising derived and/or modified sequence from HRSV(Memphis-37)__AIY60640.1__F-del_DSCav1_mut2 (opt4)
gggagagucccgcagucggcguccagcggcucugcuuguucgugugugugucguugcaggccuuauucaagcuuaccauggagcugcccauccugaagaccaacgccaucaccaccauccuggccgccgugacccugugcuucgccagcagccagaacaucaccgaggaguucuaccagagcaccugcagcgccgugagcaagggcuaccugggcgcccugagaaccggcugguacaccagcgugaucaccaucgagcugagcaacaucaaggagaacaagugcaacggcaccgacgccaaggugaagcugaucaagcaggagcuggacaaguacaagaacgccgugaccgaccugcagcugcugaugcagagcacccccgccgccggcagcggcagcgccaucugcagcggcaucgccgugugcaaggugcugcaccuggagggcgaggugaacaagaucaagaacgcccugcugagcaccaacaaggccguggugagccugagcaacggcgugagcgugcugaccuucaaggugcuggaccugaagaacuacaucgacaagcagcugcugcccauccugaacaagcagagcugcagcauccccaacaucgagaccgugaucgaguuccagcagaagaacaacagacugcuggagaucaccagagaguucagcgugaacgccggcgugaccacccccgugagcaccuacaugcugaccaacagcgagcugcugagccugaucaacgacaugcccaucaccaacgaccagaagaagcugaugagcaacaacgugcagaucgugagacagcagagcuacagcaucaugugcaucaucaaggaggaggugcuggccuacguggugcagcugccccuguacggcgugaucgacacccccugcuggaagcugcacaccagcccccugugcaccaccaacaccaaggagggcagcaacaucugccugaccagaaccgacagaggcugguacugcgacaacgccggcagcgugagcuucuucccccaggccgagaccugcaaggugcagagcaacagaguguucugcgacaccaugaacagccugacccugcccagcgaggugaaccugugcaacaucgacaucuucaaccccaaguacgacugcaagaucaugaccagcaagaccgacgugagcagcagcgugaucaccagccugggcgccaucgugagcugcuacggcaagaccaagugcaccgccagcaacaagaacagaggcaucaucaagaccuucagcaacggcugcgacuacgugagcaacaagggcguggacaccgugagcgugggcaacacccuguacugcgugaacaagcaggagggccagagccuguacgugaagggcgagcccaucaucaacuucuacgacccccugguguuccccagcgacgaguucgacgccagcaucagccaggugaacgagaagaucaaccagagccuggccuucaucagaaagagcgacgagcugcugcacaacgugaacgugggcaagagcaccaccaacaucaugaucaccaccaucaucaucgugaucaucgugauccugcugcugcugaucgccgugggccuguuccuguacugcaaggccagaugaggacuaguguccaccugucccuccugggcugcuggauugucucguuuuccugccaaauaaacaggaucagcgcuuuacagaucuaaaaaaaaaaaaaaaaaaaaaaaaaaaaaaaaaaaaaaaaaaaaaaaaaaaaaaaaaaaaaaaaugcaucccccccccccccccccccccccccccccccaaaggcucuuuucagagccaccagaauu

SEQ ID NO: 15117 - RNA, 1834 nt, Artificial Sequence
  mRNA product Design b-3 comprising derived and/or modified sequence from HRSV(Memphis-37)__AIY60640.1__F-del_DSCav1_mut2 (opt5)
gggagagucccgcagucggcguccagcggcucugcuuguucgugugugugucguugcaggccuuauucaagcuuaccauggagcugcccauccucaagaccaacgccauuacaacgauccuggcugccgugacccuuugcuucgcgagcucccagaauauuacagaagaguuuuaccaaucuaccuguagcgcugucuccaaaggcuaucugggggcccucagaacaggaugguacaccucuguuaucacaauugaacugagcaacaucaaggagaauaaaugcaacggcaccgacgccaaggugaaacuuaucaagcaggaacuggauaaguauaaaaaugcugugacggaccuccagcugcugaugcaguccaccccugccgcugggucuggaagcgccauuuguuccggcaucgcggucugcaaggugcuccaccuggagggggagguuaacaaaauuaagaaugcccuucugagcacaaacaaagcuguggucucucucuccaauggagugagcguucugaccuucaaggugcuugaucugaagaacuacaucgacaaacaacuccugccgauucugaauaagcagucuuguuccauccccaacauugaaacagucaucgaguuucagcagaaaaauaaccggcuccuggaaaucacccgcgaguucagcgugaaugccggcgugacgacaccugucucuaccuauaugcuuacaaacuccgagcugcucagccugauuaacgauaugcccaucaccaaugaccaaaagaaacuuauguccaacaauguucagauugugagacagcagucuuacagcaucaugugcauuaucaaggaagaggugcuggcuuaugucgugcaacucccucuguacggcguuaucgauacccccuguuggaaacugcauacauccccucucugcacgaccaacacaaaggaagggagcaauauuugucugacccggacagaccgcggaugguacugcgauaacgccggcucuguguccuuuuucccgcaggcggagaccuguaagguccagagcaauagaguguuuugcgacacgaugaacucucuuacacugcccagcgaaguuaaucucugcaacaucgauauuuucaauccuaaauaugacuguaagaucaugaccuccaaaaccgaugugucuagcuccgucauuacaagccugggggccaucgugucuugcuacggaaagaccaaauguacagcuuccaacaagaaucggggcaucauuaagacguuuagcaacgggugcgacuaugucucuaauaaaggaguggacaccguuuccgugggcaacacacuuuacugugucaacaagcaagagggccagagccuguaugugaaaggggagcccaucauuaauuucuacgauccucucguuuuucccuccgacgaguucgaugccucuaucagccaggugaacgaaaagauuaaucagucccuggcuuuuauccgcaaaucugacgaacugcuccacaacgucaaugugggaaagagcaccacaaacauuaugaucaccacgaucauuaucgugauuaucguuauucugcuucugcucaucgccgucggccuguuccuguauugcaaggccagaugaggacuaguguccaccugucccuccugggcugcuggauugucucguuuuccugccaaauaaacaggaucagcgcuuuacagaucuaaaaaaaaaaaaaaaaaaaaaaaaaaaaaaaaaaaaaaaaaaaaaaaaaaaaaaaaaaaaaaaaugcaucccccccccccccccccccccccccccccccaaaggcucuuuucagagccaccagaauu

SEQ ID NO: 15118 - RNA, 1834 nt, Artificial Sequence
  mRNA product Design b-3 comprising derived and/or modified sequence from HRSV(Memphis-37)__AIY60640.1__F-del_DSCav1_mut2 (opt6)
gggagagucccgcagucggcguccagcggcucugcuuguucgugugugugucguugcaggccuuauucaagcuuaccauggaacuaccaauacucaaaacaaacgcaauaacaacaauuuuagcugcaguaacacuuuguuucgcauccucccaaaauauaacagaagaauuuuaucaaucaaccugcucagccgucuccaaaggauaucuaggugcacuacgcacuggaugguacacaagugucaucacaauagaacuuuccaacaucaaagaaaauaaauguaauggaacugacgcaaaaguaaaacucauaaaacaagaacuagacaaauacaaaaacgcaguaacagaccuacaacuauuaaugcaaucaacaccagcagcaggauccggcagugccauaugcucuggaauagcagucugcaaaguuuuacacuuagaaggcgaaguaaacaaaaucaaaaacgcccuacuaucuacaaauaaagccgucguaucucucucaaauggaguaucaguacuaacauucaaaguauuagacuuaaaaaacuacaucgauaaacaauuauugccaauauuaaacaaacaaucuugcucaauaccaaauauagaaacagucauagaauuucaacaaaaaaauaaccgauuauuagaaauaacacgagaauuuucaguaaaugccggagucaccacaccaguaucaacauacaugcuaacaaauucagaacuauuaucauuaauaaacgacaugccuauuacaaaugaucaaaaaaaacuaauguccaacaauguacaaauaguccgacaacaaagcuacucaaucauguguauaauaaaagaagaaguacuugcauacguaguacaauuaccacuauacggaguuaucgacacaccaugcuggaaacuccacacuucaccacucugcaccacaaacacaaaagaaggcucaaacauaugccuaacaagaacagaccgaggaugguacugcgacaacgcaggaucaguaucauucuucccacaagcagaaacuugcaaaguacaaucuaacagaguuuucugugacaccaugaauagccuaacacuccccuccgaaguuaaccuauguaacauagauauauuuaaucccaaauaugauugcaaaaucaugacaucuaaaaccgacguaucaucaucuguaaucacaucacuaggugccauagucucaugcuacggcaaaacaaaaugcaccgccucaaacaaaaaccgagguauaauaaaaaccuucaguaauggaugugacuacguaucaaacaaagguguugauaccguaagcgucggcaacacccuauacugcguaaauaaacaagaaggccaaucacuauacgucaaaggcgaaccaauuauuaacuucuaugacccacucgucuuucccuccgacgaauuugacgcaagcauaucacaaguaaacgaaaaaauaaaccaaucacuagcauucauacgcaaaucagaugaacuacuacauaacguaaacguaggaaaauccacuacaaauauaaugaucacaacaauaauaaucguaauuauagucauauuauuacuacuaauagcaguaggacuuuuccuauacuguaaagcaagauaaggacuaguguccaccugucccuccugggcugcuggauugucucguuuuccugccaaauaaacaggaucagcgcuuuacagaucuaaaaaaaaaaaaaaaaaaaaaaaaaaaaaaaaaaaaaaaaaaaaaaaaaaaaaaaaaaaaaaaaugcaucccccccccccccccccccccccccccccccaaaggcucuuuucagagccaccagaauu

SEQ ID NO: 15119 - RNA, 1834 nt, Artificial Sequence
  mRNA product Design b-3 comprising derived and/or modified sequence from HRSV(Memphis-37)__AIY60640.1__F-del_DSCav1_mut2 (opt11)
gggagagucccgcagucggcguccagcggcucugcuuguucgugugugugucguugcaggccuuauucaagcuuaccauggaacuucccauccucaagaccaacgcuauuacgaccauccucgccgcagucacccucugcuucgcgucaucccaaaacaucaccgaagaauuuuaccaauccacaugcuccgcagucucaaaaggcuaccuaggagcccuacgcaccggaugguacacauccgucaucacaaucgaacucuccaacauaaaagaaaacaaaugcaacggcaccgaugccaaaguaaaacugauuaaacaagaacucgacaaauacaagaacgccgucacagaccuacagcuccucaugcaaucaacucccgccgccggcagcggauccgcuaucugcucaggcaucgccguaugcaaaguccuccaccuagaaggcgaaguaaacaaaaucaagaacgcacuacucucaacaaacaaagccgucgucucccucuccaacggcgucuccguccuuaccuucaaaguccucgaccuuaagaacuacauugacaaacaacuccuacccauccucaacaaacaauccugcucuauaccuaauauagaaaccguaaucgaauuucaacagaaaaacaaccgccuccucgaaauuacccgcgaguucucaguaaacgccggcguaaccacccccgucuccaccuacaugcucacaaauucagaacuccucagccucaucaacgacaugcccauaaccaacgaccaaaagaaacucaugucaaacaacguccaaaucgucaggcaacaaagcuacagcaucaugugcaucauuaaagaagaaguacucgccuacgucgugcaacuaccccucuacggcgucauagacacacccugcuggaaacuucacacaucaccgcucugcaccacaaacaccaaagaaggcaguaacauaugccucacccgaaccgaccgcggaugguacugcgacaacgccggauccgucagcuucuucccacaagccgaaaccugcaaaguacaauccaaccgagucuucugcgacaccaugaacucucuuacgcuccccucagaagucaaccuaugcaacaucgacaucuucaaccccaaauacgacugcaaaaucaugaccuccaaaacagacgucuccuccucagugauaaccucccucggcgccauugucuccugcuacggcaaaaccaaaugcaccgccuccaacaaaaaccgugggaucaucaaaaccuucucaaacggcugcgacuacguauccaauaagggugucgacacagucuccguaggcaauacccucuauugcgucaacaaacaagaaggccaaucccucuacgucaaaggcgaaccuaucaucaacuucuacgacccgcuagucuuccccucagacgaguucgacgcauccaucucacaagucaacgaaaagaucaaccagucccucgcauucauccgaaaauccgacgaacuucuccacaacguuaacgucggcaaauccaccacuaacauaaugaucaccacgaucaucauaguaauuaucgucauacuccuccuccuaaucgcugucggacucuuccucuacugcaaggcccgcuaaggacuaguguccaccugucccuccugggcugcuggauugucucguuuuccugccaaauaaacaggaucagcgcuuuacagaucuaaaaaaaaaaaaaaaaaaaaaaaaaaaaaaaaaaaaaaaaaaaaaaaaaaaaaaaaaaaaaaaaugcaucccccccccccccccccccccccccccccccaaaggcucuuuucagagccaccagaauu

SEQ ID NO: 15120 - RNA, 1885 nt, Artificial Sequence
  mRNA product Design b-4 comprising derived and/or modified sequence from HRSV(Memphis-37)__AIY60640.1__F-del_DSCav1_mut2 (opt1)
gggagagucccgcagucggcguccagcggcucugcuuguucgugugugugucguugcaggccuuauucaagcuuaccauggagcugcccauccucaagaccaacgccaucaccacgauccuggccgcggugacccugugcuucgccagcucccagaacaucaccgaggaguucuaccagagcacgugcuccgccgucagcaagggcuaccucggcgcccugcgcaccgggugguacaccagcgugaucaccaucgagcuguccaacaucaaggagaacaagugcaacggcaccgacgccaaggugaagcucaucaagcaggagcuggacaaguacaagaacgcggucacggaccugcagcuccugaugcagagcaccccggccgccggcuccgggagcgcgaucugcuccggcaucgccgucugcaaggugcugcaccucgagggcgaggugaacaagaucaagaacgcccugcuguccaccaacaaggccgucgugagccucuccaacggggugagcguccugaccuucaaggugcuggaccucaagaacuacaucgacaagcagcugcugcccauccugaacaagcagagcugcuccauccccaacaucgagaccgucaucgaguuccagcagaagaacaaccgccuccuggagaucacgcgggaguucagcgugaacgcgggcgugaccacccccgucuccaccuacaugcugacgaacagcgagcuccugucccugaucaacgacaugccgaucaccaacgaccagaagaagcucaugagcaacaacgugcagaucgugcgccagcaguccuacagcaucaugugcaucaucaaggaggagguccuggccuacguggugcagcugccccucuacggggucaucgacacccccugcuggaagcugcacaccagcccccugugcacgaccaacaccaaggagggcuccaacaucugccucacccggacggaccgcgggugguacugcgacaacgccggcagcguguccuucuucccgcaggccgagaccugcaagguccagagcaaccggguguucugcgacaccaugaacucccugacccugcccagcgaggugaaccucugcaacaucgacaucuucaaccccaaguacgacugcaagaucaugacguccaagaccgacgucagcuccagcgugaucaccucccugggcgccaucgugagcugcuacgggaagaccaagugcacggcgagcaacaagaaccgcggcaucaucaagaccuucuccaacgggugcgacuacgucagcaacaagggcguggacaccguguccgucggcaacacccuguacugcgugaacaagcaggagggccagagccucuacgugaagggggagcccaucaucaacuucuacgacccgcuggucuuccccuccgacgaguucgacgccagcaucucccaggugaacgagaagaucaaccagagccuggccuucauccggaaguccgacgagcuccugcacaacgugaacgucggcaagagcaccacgaacaucaugaucaccaccaucaucaucgugaucaucgugauccugcugcuccugaucgccgucgggcuguuccucuacugcaaggcccgcugaggacuaguaauaaggaaacuguaugaaugucugugggcaggaagugaagagauccuucuguaaagguuuuuggaauuaugucugcugaauaauaaacuuuuuugaaauaauaaaucugguagaaaaaugagaucuaaaaaaaaaaaaaaaaaaaaaaaaaaaaaaaaaaaaaaaaaaaaaaaaaaaaaaaaaaaaaaaaugcaucccccccccccccccccccccccccccccccaaaggcucuuuucagagccaccagaauu

SEQ ID NO: 15121 - RNA, 1885 nt, Artificial Sequence
  mRNA product Design b-4 comprising derived and/or modified sequence from HRSV(Memphis-37)__AIY60640.1__F-del_DSCav1_mut2 (opt1)
gggagagucccgcagucggcguccagcggcucugcuuguucgugugugugucguugcaggccuuauucaagcuuaccauggagcugcccauccucaagaccaacgccaucaccacgauccuggccgcggugacccugugcuucgccagcucccagaacaucaccgaggaguucuaccagagcacgugcuccgccgucagcaagggcuaccucggggcccugcgcaccggcugguacaccuccgugaucaccaucgagcugagcaacaucaaggagaacaagugcaacgggaccgacgccaaggugaagcucaucaagcaggagcuggacaaguacaagaacgcggucacggaccugcagcuccugaugcaguccaccccggccgccggcagcggguccgccaucugcagcggcaucgcggugugcaaggugcugcaccucgagggcgaggucaacaagaucaagaacgcccugcuguccaccaacaaggccguggugagccucuccaacggggucagcgugcugaccuucaaggugcuggaccucaagaacuacaucgacaagcagcugcugcccauccucaacaagcaguccugcagcauccccaacaucgagacggucaucgaguuccagcagaagaacaaccggcugcuggagaucacccgcgaguucuccgugaacgccggcgugaccacccccgucagcacguacaugcucaccaacuccgagcugcugagccucaucaacgacaugccgaucaccaacgaccagaagaagcugaugagcaacaacgugcagaucgugcggcagcaguccuacagcaucaugugcaucaucaaggaggagguccuggccuacguggugcagcucccccuguacggggucaucgacacccccugcuggaagcugcacacgagcccccucugcaccaccaacaccaaggagggcuccaacaucugccugacgcgcaccgaccgggggugguacugcgacaacgcgggcuccgugagcuucuucccgcaggccgagaccugcaaggugcaguccaaccgcgucuucugcgacaccaugaacagccugacgcuccccuccgaggugaaccugugcaacaucgacaucuucaaccccaaguacgacugcaagaucaugaccagcaagaccgacgucuccagcuccgugaucaccagccugggcgccaucguguccugcuacgggaagacgaagugcaccgccagcaacaagaaccggggcaucaucaagaccuucuccaacgggugcgacuacgucagcaacaagggcguggacaccguguccgucggcaacacgcucuacugcgugaacaagcaggaggggcagagccuguacgugaagggcgagcccaucaucaacuucuacgacccgcuggucuuccccagcgacgaguucgacgccuccaucagccaggugaacgagaagaucaaccagucccucgcguucauccgcaagagcgacgagcugcugcacaacgugaacgucgggaaguccaccaccaacaucaugaucaccaccaucaucaucgugaucaucgugauccuccugcugcucaucgccgucggccuguuccuguacugcaaggcccggugaggacuaguaauaaggaaacuguaugaaugucugugggcaggaagugaagagauccuucuguaaagguuuuuggaauuaugucugcugaauaauaaacuuuuuugaaauaauaaaucugguagaaaaaugagaucuaaaaaaaaaaaaaaaaaaaaaaaaaaaaaaaaaaaaaaaaaaaaaaaaaaaaaaaaaaaaaaaaugcaucccccccccccccccccccccccccccccccaaaggcucuuuucagagccaccagaauu

SEQ ID NO: 15122 - RNA, 1885 nt, Artificial Sequence
  mRNA product Design b-4 comprising derived and/or modified sequence from HRSV(Memphis-37)__AIY60640.1__F-del_DSCav1_mut2 (opt2)
gggagagucccgcagucggcguccagcggcucugcuuguucgugugugugucguugcaggccuuauucaagcuuaccauggagcuccccauccucaagaccaacgccaucaccaccauccucgccgccgucacccucugcuucgccuccucccagaacaucaccgaggaguucuaccaguccaccugcuccgccgucuccaagggcuaccucggcgcccuccgcaccggcugguacaccuccgucaucaccaucgagcucuccaacaucaaggagaacaagugcaacggcaccgacgccaaggucaagcucaucaagcaggagcucgacaaguacaagaacgccgucaccgaccuccagcuccucaugcaguccacccccgccgccggcuccggcuccgccaucugcuccggcaucgccgucugcaagguccuccaccucgagggcgaggucaacaagaucaagaacgcccuccucuccaccaacaaggccgucgucucccucuccaacggcgucuccguccucaccuucaagguccucgaccucaagaacuacaucgacaagcagcuccuccccauccucaacaagcaguccugcuccauccccaacaucgagaccgucaucgaguuccagcagaagaacaaccgccuccucgagaucacccgcgaguucuccgucaacgccggcgucaccacccccgucuccaccuacaugcucaccaacuccgagcuccucucccucaucaacgacaugcccaucaccaacgaccagaagaagcucauguccaacaacguccagaucguccgccagcaguccuacuccaucaugugcaucaucaaggaggagguccucgccuacgucguccagcucccccucuacggcgucaucgacacccccugcuggaagcuccacaccuccccccucugcaccaccaacaccaaggagggcuccaacaucugccucacccgcaccgaccgcggcugguacugcgacaacgccggcuccgucuccuucuucccccaggccgagaccugcaagguccaguccaaccgcgucuucugcgacaccaugaacucccucacccuccccuccgaggucaaccucugcaacaucgacaucuucaaccccaaguacgacugcaagaucaugaccuccaagaccgacgucuccuccuccgucaucaccucccucggcgccaucgucuccugcuacggcaagaccaagugcaccgccuccaacaagaaccgcggcaucaucaagaccuucuccaacggcugcgacuacgucuccaacaagggcgucgacaccgucuccgucggcaacacccucuacugcgucaacaagcaggagggccagucccucuacgucaagggcgagcccaucaucaacuucuacgacccccucgucuuccccuccgacgaguucgacgccuccaucucccaggucaacgagaagaucaaccagucccucgccuucauccgcaaguccgacgagcuccuccacaacgucaacgucggcaaguccaccaccaacaucaugaucaccaccaucaucaucgucaucaucgucauccuccuccuccucaucgccgucggccucuuccucuacugcaaggcccgcugaggacuaguaauaaggaaacuguaugaaugucugugggcaggaagugaagagauccuucuguaaagguuuuuggaauuaugucugcugaauaauaaacuuuuuugaaauaauaaaucugguagaaaaaugagaucuaaaaaaaaaaaaaaaaaaaaaaaaaaaaaaaaaaaaaaaaaaaaaaaaaaaaaaaaaaaaaaaaugcaucccccccccccccccccccccccccccccccaaaggcucuuuucagagccaccagaauu

SEQ ID NO: 15123 - RNA, 1885 nt, Artificial Sequence
  mRNA product Design b-4 comprising derived and/or modified sequence from HRSV(Memphis-37)__AIY60640.1__F-del_DSCav1_mut2 (opt3)
gggagagucccgcagucggcguccagcggcucugcuuguucgugugugugucguugcaggccuuauucaagcuuaccauggagcugcccauccucaagaccaacgccauuacaacuauacuugcugcagugacgcugugcuucgccagcucccagaauaucaccgaagaguuuuaccaaucuacauguucagcggucaguaaaggcuauuugggggcuuuaagaacuggaugguacaccagcguuauuacaaucgaacuguccaacauuaaggagaauaaaugcaacgguaccgacgccaaggugaaacuaaucaagcaggaacucgauaaguauaaaaaugcaguaacugaccugcagcuucugaugcagucuacuccugccgcuggcucggggucagcaauauguagcggaaucgccgugugcaaggucuugcaccucgagggcgaggugaacaaaauuaagaaugcucugcugaguaccaacaaagccguugugucccucucuaauggugucagcguguuaacguucaagguacuggaucuuaagaacuacaucgacaaacaauugcugccaauucuaaauaagcaguccuguucaaucccgaacauagaaacuguuauugaguuucagcagaaaaauaacaggcuccuggaaaucacccgggaguucagugugaaugcgggggucacaacucccgugagcaccuauaugcuuacaaacucugagcuguugucccucauuaacgauaugccuaucaccaaugaccaaaagaaacugaugucaaacaaugugcagaucguccgccagcagagcuacaguauuaugugcauaaucaaggaagagguuuuagcauaugugguacaacugccacucuacggagugauugauacgcccuguuggaaacuucauacuucuccucugugcacaaccaacacuaaggaaggcuccaauaucuguuugacacgaaccgaccguggcugguacugcgauaacgccgggagcgucucguuuuucccacaggcugagacguguaaggugcagucuaauagaguuuucugcgacaccaugaacucccuaacacugcccucagaagugaaucucugcaacauagauauuuucaauccuaaauaugacuguaagaucaugacaaguaaaaccgaugucagcuccucugugaucacaagccugggagccauuguaucaugcuacgguaagacuaaauguaccgcaaguaacaagaauaggggcaucauuaagacauuuuccaacgggugcgacuauguuagcaauaaaggaguggacaccgucucugugggcaacacucuuuacugugucaacaagcaagagggucagucacuguaugugaaaggggagccaauaaucaauuucuacgauccguugguuuuucccagugacgaauuugaugcuagcauuucccaggugaacgagaagaucaaucagucucucgccuuuauccggaaaucggacgaacuguuacacaacguaaaugucggaaagagcacgacaaacauuaugauaaccacuaucauuaucgugauuaucguuauacugcuacuccugaucgcggugggccuuuucuuguauugcaaggcccgcugaggacuaguaauaaggaaacuguaugaaugucugugggcaggaagugaagagauccuucuguaaagguuuuuggaauuaugucugcugaauaauaaacuuuuuugaaauaauaaaucugguagaaaaaugagaucuaaaaaaaaaaaaaaaaaaaaaaaaaaaaaaaaaaaaaaaaaaaaaaaaaaaaaaaaaaaaaaaaugcaucccccccccccccccccccccccccccccccaaaggcucuuuucagagccaccagaauu

SEQ ID NO: 15124 - RNA, 1885 nt, Artificial Sequence
  mRNA product Design b-4 comprising derived and/or modified sequence from HRSV(Memphis-37)__AIY60640.1__F-del_DSCav1_mut2 (opt4)
gggagagucccgcagucggcguccagcggcucugcuuguucgugugugugucguugcaggccuuauucaagcuuaccauggagcugcccauccugaagaccaacgccaucaccaccauccuggccgccgugacccugugcuucgccagcagccagaacaucaccgaggaguucuaccagagcaccugcagcgccgugagcaagggcuaccugggcgcccugagaaccggcugguacaccagcgugaucaccaucgagcugagcaacaucaaggagaacaagugcaacggcaccgacgccaaggugaagcugaucaagcaggagcuggacaaguacaagaacgccgugaccgaccugcagcugcugaugcagagcacccccgccgccggcagcggcagcgccaucugcagcggcaucgccgugugcaaggugcugcaccuggagggcgaggugaacaagaucaagaacgcccugcugagcaccaacaaggccguggugagccugagcaacggcgugagcgugcugaccuucaaggugcuggaccugaagaacuacaucgacaagcagcugcugcccauccugaacaagcagagcugcagcauccccaacaucgagaccgugaucgaguuccagcagaagaacaacagacugcuggagaucaccagagaguucagcgugaacgccggcgugaccacccccgugagcaccuacaugcugaccaacagcgagcugcugagccugaucaacgacaugcccaucaccaacgaccagaagaagcugaugagcaacaacgugcagaucgugagacagcagagcuacagcaucaugugcaucaucaaggaggaggugcuggccuacguggugcagcugccccuguacggcgugaucgacacccccugcuggaagcugcacaccagcccccugugcaccaccaacaccaaggagggcagcaacaucugccugaccagaaccgacagaggcugguacugcgacaacgccggcagcgugagcuucuucccccaggccgagaccugcaaggugcagagcaacagaguguucugcgacaccaugaacagccugacccugcccagcgaggugaaccugugcaacaucgacaucuucaaccccaaguacgacugcaagaucaugaccagcaagaccgacgugagcagcagcgugaucaccagccugggcgccaucgugagcugcuacggcaagaccaagugcaccgccagcaacaagaacagaggcaucaucaagaccuucagcaacggcugcgacuacgugagcaacaagggcguggacaccgugagcgugggcaacacccuguacugcgugaacaagcaggagggccagagccuguacgugaagggcgagcccaucaucaacuucuacgacccccugguguuccccagcgacgaguucgacgccagcaucagccaggugaacgagaagaucaaccagagccuggccuucaucagaaagagcgacgagcugcugcacaacgugaacgugggcaagagcaccaccaacaucaugaucaccaccaucaucaucgugaucaucgugauccugcugcugcugaucgccgugggccuguuccuguacugcaaggccagaugaggacuaguaauaaggaaacuguaugaaugucugugggcaggaagugaagagauccuucuguaaagguuuuuggaauuaugucugcugaauaauaaacuuuuuugaaauaauaaaucugguagaaaaaugagaucuaaaaaaaaaaaaaaaaaaaaaaaaaaaaaaaaaaaaaaaaaaaaaaaaaaaaaaaaaaaaaaaaugcaucccccccccccccccccccccccccccccccaaaggcucuuuucagagccaccagaauu

SEQ ID NO: 15125 - RNA, 1885 nt, Artificial Sequence
  mRNA product Design b-4 comprising derived and/or modified sequence from HRSV(Memphis-37)__AIY60640.1__F-del_DSCav1_mut2 (opt5)
gggagagucccgcagucggcguccagcggcucugcuuguucgugugugugucguugcaggccuuauucaagcuuaccauggagcugcccauccucaagaccaacgccauuacaacgauccuggcugccgugacccuuugcuucgcgagcucccagaauauuacagaagaguuuuaccaaucuaccuguagcgcugucuccaaaggcuaucugggggcccucagaacaggaugguacaccucuguuaucacaauugaacugagcaacaucaaggagaauaaaugcaacggcaccgacgccaaggugaaacuuaucaagcaggaacuggauaaguauaaaaaugcugugacggaccuccagcugcugaugcaguccaccccugccgcugggucuggaagcgccauuuguuccggcaucgcggucugcaaggugcuccaccuggagggggagguuaacaaaauuaagaaugcccuucugagcacaaacaaagcuguggucucucucuccaauggagugagcguucugaccuucaaggugcuugaucugaagaacuacaucgacaaacaacuccugccgauucugaauaagcagucuuguuccauccccaacauugaaacagucaucgaguuucagcagaaaaauaaccggcuccuggaaaucacccgcgaguucagcgugaaugccggcgugacgacaccugucucuaccuauaugcuuacaaacuccgagcugcucagccugauuaacgauaugcccaucaccaaugaccaaaagaaacuuauguccaacaauguucagauugugagacagcagucuuacagcaucaugugcauuaucaaggaagaggugcuggcuuaugucgugcaacucccucuguacggcguuaucgauacccccuguuggaaacugcauacauccccucucugcacgaccaacacaaaggaagggagcaauauuugucugacccggacagaccgcggaugguacugcgauaacgccggcucuguguccuuuuucccgcaggcggagaccuguaagguccagagcaauagaguguuuugcgacacgaugaacucucuuacacugcccagcgaaguuaaucucugcaacaucgauauuuucaauccuaaauaugacuguaagaucaugaccuccaaaaccgaugugucuagcuccgucauuacaagccugggggccaucgugucuugcuacggaaagaccaaauguacagcuuccaacaagaaucggggcaucauuaagacguuuagcaacgggugcgacuaugucucuaauaaaggaguggacaccguuuccgugggcaacacacuuuacugugucaacaagcaagagggccagagccuguaugugaaaggggagcccaucauuaauuucuacgauccucucguuuuucccuccgacgaguucgaugccucuaucagccaggugaacgaaaagauuaaucagucccuggcuuuuauccgcaaaucugacgaacugcuccacaacgucaaugugggaaagagcaccacaaacauuaugaucaccacgaucauuaucgugauuaucguuauucugcuucugcucaucgccgucggccuguuccuguauugcaaggccagaugaggacuaguaauaaggaaacuguaugaaugucugugggcaggaagugaagagauccuucuguaaagguuuuuggaauuaugucugcugaauaauaaacuuuuuugaaauaauaaaucugguagaaaaaugagaucuaaaaaaaaaaaaaaaaaaaaaaaaaaaaaaaaaaaaaaaaaaaaaaaaaaaaaaaaaaaaaaaaugcaucccccccccccccccccccccccccccccccaaaggcucuuuucagagccaccagaauu

SEQ ID NO: 15126 - RNA, 1885 nt, Artificial Sequence
  mRNA product Design b-4 comprising derived and/or modified sequence from HRSV(Memphis-37)__AIY60640.1__F-del_DSCav1_mut2 (opt6)
gggagagucccgcagucggcguccagcggcucugcuuguucgugugugugucguugcaggccuuauucaagcuuaccauggaacuaccaauacucaaaacaaacgcaauaacaacaauuuuagcugcaguaacacuuuguuucgcauccucccaaaauauaacagaagaauuuuaucaaucaaccugcucagccgucuccaaaggauaucuaggugcacuacgcacuggaugguacacaagugucaucacaauagaacuuuccaacaucaaagaaaauaaauguaauggaacugacgcaaaaguaaaacucauaaaacaagaacuagacaaauacaaaaacgcaguaacagaccuacaacuauuaaugcaaucaacaccagcagcaggauccggcagugccauaugcucuggaauagcagucugcaaaguuuuacacuuagaaggcgaaguaaacaaaaucaaaaacgcccuacuaucuacaaauaaagccgucguaucucucucaaauggaguaucaguacuaacauucaaaguauuagacuuaaaaaacuacaucgauaaacaauuauugccaauauuaaacaaacaaucuugcucaauaccaaauauagaaacagucauagaauuucaacaaaaaaauaaccgauuauuagaaauaacacgagaauuuucaguaaaugccggagucaccacaccaguaucaacauacaugcuaacaaauucagaacuauuaucauuaauaaacgacaugccuauuacaaaugaucaaaaaaaacuaauguccaacaauguacaaauaguccgacaacaaagcuacucaaucauguguauaauaaaagaagaaguacuugcauacguaguacaauuaccacuauacggaguuaucgacacaccaugcuggaaacuccacacuucaccacucugcaccacaaacacaaaagaaggcucaaacauaugccuaacaagaacagaccgaggaugguacugcgacaacgcaggaucaguaucauucuucccacaagcagaaacuugcaaaguacaaucuaacagaguuuucugugacaccaugaauagccuaacacuccccuccgaaguuaaccuauguaacauagauauauuuaaucccaaauaugauugcaaaaucaugacaucuaaaaccgacguaucaucaucuguaaucacaucacuaggugccauagucucaugcuacggcaaaacaaaaugcaccgccucaaacaaaaaccgagguauaauaaaaaccuucaguaauggaugugacuacguaucaaacaaagguguugauaccguaagcgucggcaacacccuauacugcguaaauaaacaagaaggccaaucacuauacgucaaaggcgaaccaauuauuaacuucuaugacccacucgucuuucccuccgacgaauuugacgcaagcauaucacaaguaaacgaaaaaauaaaccaaucacuagcauucauacgcaaaucagaugaacuacuacauaacguaaacguaggaaaauccacuacaaauauaaugaucacaacaauaauaaucguaauuauagucauauuauuacuacuaauagcaguaggacuuuuccuauacuguaaagcaagauaaggacuaguaauaaggaaacuguaugaaugucugugggcaggaagugaagagauccuucuguaaagguuuuuggaauuaugucugcugaauaauaaacuuuuuugaaauaauaaaucugguagaaaaaugagaucuaaaaaaaaaaaaaaaaaaaaaaaaaaaaaaaaaaaaaaaaaaaaaaaaaaaaaaaaaaaaaaaaugcaucccccccccccccccccccccccccccccccaaaggcucuuuucagagccaccagaauu

SEQ ID NO: 15127 - RNA, 1885 nt, Artificial Sequence
  mRNA product Design b-4 comprising derived and/or modified sequence from HRSV(Memphis-37)__AIY60640.1__F-del_DSCav1_mut2 (opt11)
gggagagucccgcagucggcguccagcggcucugcuuguucgugugugugucguugcaggccuuauucaagcuuaccauggaacuucccauccucaagaccaacgcuauuacgaccauccucgccgcagucacccucugcuucgcgucaucccaaaacaucaccgaagaauuuuaccaauccacaugcuccgcagucucaaaaggcuaccuaggagcccuacgcaccggaugguacacauccgucaucacaaucgaacucuccaacauaaaagaaaacaaaugcaacggcaccgaugccaaaguaaaacugauuaaacaagaacucgacaaauacaagaacgccgucacagaccuacagcuccucaugcaaucaacucccgccgccggcagcggauccgcuaucugcucaggcaucgccguaugcaaaguccuccaccuagaaggcgaaguaaacaaaaucaagaacgcacuacucucaacaaacaaagccgucgucucccucuccaacggcgucuccguccuuaccuucaaaguccucgaccuuaagaacuacauugacaaacaacuccuacccauccucaacaaacaauccugcucuauaccuaauauagaaaccguaaucgaauuucaacagaaaaacaaccgccuccucgaaauuacccgcgaguucucaguaaacgccggcguaaccacccccgucuccaccuacaugcucacaaauucagaacuccucagccucaucaacgacaugcccauaaccaacgaccaaaagaaacucaugucaaacaacguccaaaucgucaggcaacaaagcuacagcaucaugugcaucauuaaagaagaaguacucgccuacgucgugcaacuaccccucuacggcgucauagacacacccugcuggaaacuucacacaucaccgcucugcaccacaaacaccaaagaaggcaguaacauaugccucacccgaaccgaccgcggaugguacugcgacaacgccggauccgucagcuucuucccacaagccgaaaccugcaaaguacaauccaaccgagucuucugcgacaccaugaacucucuuacgcuccccucagaagucaaccuaugcaacaucgacaucuucaaccccaaauacgacugcaaaaucaugaccuccaaaacagacgucuccuccucagugauaaccucccucggcgccauugucuccugcuacggcaaaaccaaaugcaccgccuccaacaaaaaccgugggaucaucaaaaccuucucaaacggcugcgacuacguauccaauaagggugucgacacagucuccguaggcaauacccucuauugcgucaacaaacaagaaggccaaucccucuacgucaaaggcgaaccuaucaucaacuucuacgacccgcuagucuuccccucagacgaguucgacgcauccaucucacaagucaacgaaaagaucaaccagucccucgcauucauccgaaaauccgacgaacuucuccacaacguuaacgucggcaaauccaccacuaacauaaugaucaccacgaucaucauaguaauuaucgucauacuccuccuccuaaucgcugucggacucuuccucuacugcaaggcccgcuaaggacuaguaauaaggaaacuguaugaaugucugugggcaggaagugaagagauccuucuguaaagguuuuuggaauuaugucugcugaauaauaaacuuuuuugaaauaauaaaucugguagaaaaaugagaucuaaaaaaaaaaaaaaaaaaaaaaaaaaaaaaaaaaaaaaaaaaaaaaaaaaaaaaaaaaaaaaaaugcaucccccccccccccccccccccccccccccccaaaggcucuuuucagagccaccagaauu

SEQ ID NO: 15128 - RNA, 1947 nt, Artificial Sequence
  mRNA product Design b-5 comprising derived and/or modified sequence from HRSV(Memphis-37)__AIY60640.1__F-del_DSCav1_mut2 (opt1)
gggagacuccugucgggcggaaguaggaggaguagaguuuaaaaacaguacucuuuuuccgguucgggacguaguugaagcaacgacaagccggauaaccgcucuugagacaggaagcuuaccauggagcugcccauccucaagaccaacgccaucaccacgauccuggccgcggugacccugugcuucgccagcucccagaacaucaccgaggaguucuaccagagcacgugcuccgccgucagcaagggcuaccucggcgcccugcgcaccgggugguacaccagcgugaucaccaucgagcuguccaacaucaaggagaacaagugcaacggcaccgacgccaaggugaagcucaucaagcaggagcuggacaaguacaagaacgcggucacggaccugcagcuccugaugcagagcaccccggccgccggcuccgggagcgcgaucugcuccggcaucgccgucugcaaggugcugcaccucgagggcgaggugaacaagaucaagaacgcccugcuguccaccaacaaggccgucgugagccucuccaacggggugagcguccugaccuucaaggugcuggaccucaagaacuacaucgacaagcagcugcugcccauccugaacaagcagagcugcuccauccccaacaucgagaccgucaucgaguuccagcagaagaacaaccgccuccuggagaucacgcgggaguucagcgugaacgcgggcgugaccacccccgucuccaccuacaugcugacgaacagcgagcuccugucccugaucaacgacaugccgaucaccaacgaccagaagaagcucaugagcaacaacgugcagaucgugcgccagcaguccuacagcaucaugugcaucaucaaggaggagguccuggccuacguggugcagcugccccucuacggggucaucgacacccccugcuggaagcugcacaccagcccccugugcacgaccaacaccaaggagggcuccaacaucugccucacccggacggaccgcgggugguacugcgacaacgccggcagcguguccuucuucccgcaggccgagaccugcaagguccagagcaaccggguguucugcgacaccaugaacucccugacccugcccagcgaggugaaccucugcaacaucgacaucuucaaccccaaguacgacugcaagaucaugacguccaagaccgacgucagcuccagcgugaucaccucccugggcgccaucgugagcugcuacgggaagaccaagugcacggcgagcaacaagaaccgcggcaucaucaagaccuucuccaacgggugcgacuacgucagcaacaagggcguggacaccguguccgucggcaacacccuguacugcgugaacaagcaggagggccagagccucuacgugaagggggagcccaucaucaacuucuacgacccgcuggucuuccccuccgacgaguucgacgccagcaucucccaggugaacgagaagaucaaccagagccuggccuucauccggaaguccgacgagcuccugcacaacgugaacgucggcaagagcaccacgaacaucaugaucaccaccaucaucaucgugaucaucgugauccugcugcuccugaucgccgucgggcuguuccucuacugcaaggcccgcugaggacuaguacuggcugcaucucccuuuccucuguccuccauccuucucccaggauggugaagggggaccugguacccagugauccccaccccaggauccuaaaucaugacuuaccugcuaauaaaaacucauuggaaaagugagaagaucuaaaaaaaaaaaaaaaaaaaaaaaaaaaaaaaaaaaaaaaaaaaaaaaaaaaaaaaaaaaaaaaaugcaucccccccccccccccccccccccccccccccaaaggcucuuuucagagccaccagaauu

SEQ ID NO: 15129 - RNA, 1947 nt, Artificial Sequence
  mRNA product Design b-5 comprising derived and/or modified sequence from HRSV(Memphis-37)__AIY60640.1__F-del_DSCav1_mut2 (opt1)
gggagacuccugucgggcggaaguaggaggaguagaguuuaaaaacaguacucuuuuuccgguucgggacguaguugaagcaacgacaagccggauaaccgcucuugagacaggaagcuuaccauggagcugcccauccucaagaccaacgccaucaccacgauccuggccgcggugacccugugcuucgccagcucccagaacaucaccgaggaguucuaccagagcacgugcuccgccgucagcaagggcuaccucggggcccugcgcaccggcugguacaccuccgugaucaccaucgagcugagcaacaucaaggagaacaagugcaacgggaccgacgccaaggugaagcucaucaagcaggagcuggacaaguacaagaacgcggucacggaccugcagcuccugaugcaguccaccccggccgccggcagcggguccgccaucugcagcggcaucgcggugugcaaggugcugcaccucgagggcgaggucaacaagaucaagaacgcccugcuguccaccaacaaggccguggugagccucuccaacggggucagcgugcugaccuucaaggugcuggaccucaagaacuacaucgacaagcagcugcugcccauccucaacaagcaguccugcagcauccccaacaucgagacggucaucgaguuccagcagaagaacaaccggcugcuggagaucacccgcgaguucuccgugaacgccggcgugaccacccccgucagcacguacaugcucaccaacuccgagcugcugagccucaucaacgacaugccgaucaccaacgaccagaagaagcugaugagcaacaacgugcagaucgugcggcagcaguccuacagcaucaugugcaucaucaaggaggagguccuggccuacguggugcagcucccccuguacggggucaucgacacccccugcuggaagcugcacacgagcccccucugcaccaccaacaccaaggagggcuccaacaucugccugacgcgcaccgaccgggggugguacugcgacaacgcgggcuccgugagcuucuucccgcaggccgagaccugcaaggugcaguccaaccgcgucuucugcgacaccaugaacagccugacgcuccccuccgaggugaaccugugcaacaucgacaucuucaaccccaaguacgacugcaagaucaugaccagcaagaccgacgucuccagcuccgugaucaccagccugggcgccaucguguccugcuacgggaagacgaagugcaccgccagcaacaagaaccggggcaucaucaagaccuucuccaacgggugcgacuacgucagcaacaagggcguggacaccguguccgucggcaacacgcucuacugcgugaacaagcaggaggggcagagccuguacgugaagggcgagcccaucaucaacuucuacgacccgcuggucuuccccagcgacgaguucgacgccuccaucagccaggugaacgagaagaucaaccagucccucgcguucauccgcaagagcgacgagcugcugcacaacgugaacgucgggaaguccaccaccaacaucaugaucaccaccaucaucaucgugaucaucgugauccuccugcugcucaucgccgucggccuguuccuguacugcaaggcccggugaggacuaguacuggcugcaucucccuuuccucuguccuccauccuucucccaggauggugaagggggaccugguacccagugauccccaccccaggauccuaaaucaugacuuaccugcuaauaaaaacucauuggaaaagugagaagaucuaaaaaaaaaaaaaaaaaaaaaaaaaaaaaaaaaaaaaaaaaaaaaaaaaaaaaaaaaaaaaaaaugcaucccccccccccccccccccccccccccccccaaaggcucuuuucagagccaccagaauu

SEQ ID NO: 15130 - RNA, 1947 nt, Artificial Sequence
  mRNA product Design b-5 comprising derived and/or modified sequence from HRSV(Memphis-37)__AIY60640.1__F-del_DSCav1_mut2 (opt2)
gggagacuccugucgggcggaaguaggaggaguagaguuuaaaaacaguacucuuuuuccgguucgggacguaguugaagcaacgacaagccggauaaccgcucuugagacaggaagcuuaccauggagcuccccauccucaagaccaacgccaucaccaccauccucgccgccgucacccucugcuucgccuccucccagaacaucaccgaggaguucuaccaguccaccugcuccgccgucuccaagggcuaccucggcgcccuccgcaccggcugguacaccuccgucaucaccaucgagcucuccaacaucaaggagaacaagugcaacggcaccgacgccaaggucaagcucaucaagcaggagcucgacaaguacaagaacgccgucaccgaccuccagcuccucaugcaguccacccccgccgccggcuccggcuccgccaucugcuccggcaucgccgucugcaagguccuccaccucgagggcgaggucaacaagaucaagaacgcccuccucuccaccaacaaggccgucgucucccucuccaacggcgucuccguccucaccuucaagguccucgaccucaagaacuacaucgacaagcagcuccuccccauccucaacaagcaguccugcuccauccccaacaucgagaccgucaucgaguuccagcagaagaacaaccgccuccucgagaucacccgcgaguucuccgucaacgccggcgucaccacccccgucuccaccuacaugcucaccaacuccgagcuccucucccucaucaacgacaugcccaucaccaacgaccagaagaagcucauguccaacaacguccagaucguccgccagcaguccuacuccaucaugugcaucaucaaggaggagguccucgccuacgucguccagcucccccucuacggcgucaucgacacccccugcuggaagcuccacaccuccccccucugcaccaccaacaccaaggagggcuccaacaucugccucacccgcaccgaccgcggcugguacugcgacaacgccggcuccgucuccuucuucccccaggccgagaccugcaagguccaguccaaccgcgucuucugcgacaccaugaacucccucacccuccccuccgaggucaaccucugcaacaucgacaucuucaaccccaaguacgacugcaagaucaugaccuccaagaccgacgucuccuccuccgucaucaccucccucggcgccaucgucuccugcuacggcaagaccaagugcaccgccuccaacaagaaccgcggcaucaucaagaccuucuccaacggcugcgacuacgucuccaacaagggcgucgacaccgucuccgucggcaacacccucuacugcgucaacaagcaggagggccagucccucuacgucaagggcgagcccaucaucaacuucuacgacccccucgucuuccccuccgacgaguucgacgccuccaucucccaggucaacgagaagaucaaccagucccucgccuucauccgcaaguccgacgagcuccuccacaacgucaacgucggcaaguccaccaccaacaucaugaucaccaccaucaucaucgucaucaucgucauccuccuccuccucaucgccgucggccucuuccucuacugcaaggcccgcugaggacuaguacuggcugcaucucccuuuccucuguccuccauccuucucccaggauggugaagggggaccugguacccagugauccccaccccaggauccuaaaucaugacuuaccugcuaauaaaaacucauuggaaaagugagaagaucuaaaaaaaaaaaaaaaaaaaaaaaaaaaaaaaaaaaaaaaaaaaaaaaaaaaaaaaaaaaaaaaaugcaucccccccccccccccccccccccccccccccaaaggcucuuuucagagccaccagaauu

SEQ ID NO: 15131 - RNA, 1947 nt, Artificial Sequence
  mRNA product Design b-5 comprising derived and/or modified sequence from HRSV(Memphis-37)__AIY60640.1__F-del_DSCav1_mut2 (opt3)
gggagacuccugucgggcggaaguaggaggaguagaguuuaaaaacaguacucuuuuuccgguucgggacguaguugaagcaacgacaagccggauaaccgcucuugagacaggaagcuuaccauggagcugcccauccucaagaccaacgccauuacaacuauacuugcugcagugacgcugugcuucgccagcucccagaauaucaccgaagaguuuuaccaaucuacauguucagcggucaguaaaggcuauuugggggcuuuaagaacuggaugguacaccagcguuauuacaaucgaacuguccaacauuaaggagaauaaaugcaacgguaccgacgccaaggugaaacuaaucaagcaggaacucgauaaguauaaaaaugcaguaacugaccugcagcuucugaugcagucuacuccugccgcuggcucggggucagcaauauguagcggaaucgccgugugcaaggucuugcaccucgagggcgaggugaacaaaauuaagaaugcucugcugaguaccaacaaagccguugugucccucucuaauggugucagcguguuaacguucaagguacuggaucuuaagaacuacaucgacaaacaauugcugccaauucuaaauaagcaguccuguucaaucccgaacauagaaacuguuauugaguuucagcagaaaaauaacaggcuccuggaaaucacccgggaguucagugugaaugcgggggucacaacucccgugagcaccuauaugcuuacaaacucugagcuguugucccucauuaacgauaugccuaucaccaaugaccaaaagaaacugaugucaaacaaugugcagaucguccgccagcagagcuacaguauuaugugcauaaucaaggaagagguuuuagcauaugugguacaacugccacucuacggagugauugauacgcccuguuggaaacuucauacuucuccucugugcacaaccaacacuaaggaaggcuccaauaucuguuugacacgaaccgaccguggcugguacugcgauaacgccgggagcgucucguuuuucccacaggcugagacguguaaggugcagucuaauagaguuuucugcgacaccaugaacucccuaacacugcccucagaagugaaucucugcaacauagauauuuucaauccuaaauaugacuguaagaucaugacaaguaaaaccgaugucagcuccucugugaucacaagccugggagccauuguaucaugcuacgguaagacuaaauguaccgcaaguaacaagaauaggggcaucauuaagacauuuuccaacgggugcgacuauguuagcaauaaaggaguggacaccgucucugugggcaacacucuuuacugugucaacaagcaagagggucagucacuguaugugaaaggggagccaauaaucaauuucuacgauccguugguuuuucccagugacgaauuugaugcuagcauuucccaggugaacgagaagaucaaucagucucucgccuuuauccggaaaucggacgaacuguuacacaacguaaaugucggaaagagcacgacaaacauuaugauaaccacuaucauuaucgugauuaucguuauacugcuacuccugaucgcggugggccuuuucuuguauugcaaggcccgcugaggacuaguacuggcugcaucucccuuuccucuguccuccauccuucucccaggauggugaagggggaccugguacccagugauccccaccccaggauccuaaaucaugacuuaccugcuaauaaaaacucauuggaaaagugagaagaucuaaaaaaaaaaaaaaaaaaaaaaaaaaaaaaaaaaaaaaaaaaaaaaaaaaaaaaaaaaaaaaaaugcaucccccccccccccccccccccccccccccccaaaggcucuuuucagagccaccagaauu

SEQ ID NO: 15132 - RNA, 1947 nt, Artificial Sequence
  mRNA product Design b-5 comprising derived and/or modified sequence from HRSV(Memphis-37)__AIY60640.1__F-del_DSCav1_mut2 (opt4)
gggagacuccugucgggcggaaguaggaggaguagaguuuaaaaacaguacucuuuuuccgguucgggacguaguugaagcaacgacaagccggauaaccgcucuugagacaggaagcuuaccauggagcugcccauccugaagaccaacgccaucaccaccauccuggccgccgugacccugugcuucgccagcagccagaacaucaccgaggaguucuaccagagcaccugcagcgccgugagcaagggcuaccugggcgcccugagaaccggcugguacaccagcgugaucaccaucgagcugagcaacaucaaggagaacaagugcaacggcaccgacgccaaggugaagcugaucaagcaggagcuggacaaguacaagaacgccgugaccgaccugcagcugcugaugcagagcacccccgccgccggcagcggcagcgccaucugcagcggcaucgccgugugcaaggugcugcaccuggagggcgaggugaacaagaucaagaacgcccugcugagcaccaacaaggccguggugagccugagcaacggcgugagcgugcugaccuucaaggugcuggaccugaagaacuacaucgacaagcagcugcugcccauccugaacaagcagagcugcagcauccccaacaucgagaccgugaucgaguuccagcagaagaacaacagacugcuggagaucaccagagaguucagcgugaacgccggcgugaccacccccgugagcaccuacaugcugaccaacagcgagcugcugagccugaucaacgacaugcccaucaccaacgaccagaagaagcugaugagcaacaacgugcagaucgugagacagcagagcuacagcaucaugugcaucaucaaggaggaggugcuggccuacguggugcagcugccccuguacggcgugaucgacacccccugcuggaagcugcacaccagcccccugugcaccaccaacaccaaggagggcagcaacaucugccugaccagaaccgacagaggcugguacugcgacaacgccggcagcgugagcuucuucccccaggccgagaccugcaaggugcagagcaacagaguguucugcgacaccaugaacagccugacccugcccagcgaggugaaccugugcaacaucgacaucuucaaccccaaguacgacugcaagaucaugaccagcaagaccgacgugagcagcagcgugaucaccagccugggcgccaucgugagcugcuacggcaagaccaagugcaccgccagcaacaagaacagaggcaucaucaagaccuucagcaacggcugcgacuacgugagcaacaagggcguggacaccgugagcgugggcaacacccuguacugcgugaacaagcaggagggccagagccuguacgugaagggcgagcccaucaucaacuucuacgacccccugguguuccccagcgacgaguucgacgccagcaucagccaggugaacgagaagaucaaccagagccuggccuucaucagaaagagcgacgagcugcugcacaacgugaacgugggcaagagcaccaccaacaucaugaucaccaccaucaucaucgugaucaucgugauccugcugcugcugaucgccgugggccuguuccuguacugcaaggccagaugaggacuaguacuggcugcaucucccuuuccucuguccuccauccuucucccaggauggugaagggggaccugguacccagugauccccaccccaggauccuaaaucaugacuuaccugcuaauaaaaacucauuggaaaagugagaagaucuaaaaaaaaaaaaaaaaaaaaaaaaaaaaaaaaaaaaaaaaaaaaaaaaaaaaaaaaaaaaaaaaugcaucccccccccccccccccccccccccccccccaaaggcucuuuucagagccaccagaauu

SEQ ID NO: 15133 - RNA, 1947 nt, Artificial Sequence
  mRNA product Design b-5 comprising derived and/or modified sequence from HRSV(Memphis-37)__AIY60640.1__F-del_DSCav1_mut2 (opt5)
gggagacuccugucgggcggaaguaggaggaguagaguuuaaaaacaguacucuuuuuccgguucgggacguaguugaagcaacgacaagccggauaaccgcucuugagacaggaagcuuaccauggagcugcccauccucaagaccaacgccauuacaacgauccuggcugccgugacccuuugcuucgcgagcucccagaauauuacagaagaguuuuaccaaucuaccuguagcgcugucuccaaaggcuaucugggggcccucagaacaggaugguacaccucuguuaucacaauugaacugagcaacaucaaggagaauaaaugcaacggcaccgacgccaaggugaaacuuaucaagcaggaacuggauaaguauaaaaaugcugugacggaccuccagcugcugaugcaguccaccccugccgcugggucuggaagcgccauuuguuccggcaucgcggucugcaaggugcuccaccuggagggggagguuaacaaaauuaagaaugcccuucugagcacaaacaaagcuguggucucucucuccaauggagugagcguucugaccuucaaggugcuugaucugaagaacuacaucgacaaacaacuccugccgauucugaauaagcagucuuguuccauccccaacauugaaacagucaucgaguuucagcagaaaaauaaccggcuccuggaaaucacccgcgaguucagcgugaaugccggcgugacgacaccugucucuaccuauaugcuuacaaacuccgagcugcucagccugauuaacgauaugcccaucaccaaugaccaaaagaaacuuauguccaacaauguucagauugugagacagcagucuuacagcaucaugugcauuaucaaggaagaggugcuggcuuaugucgugcaacucccucuguacggcguuaucgauacccccuguuggaaacugcauacauccccucucugcacgaccaacacaaaggaagggagcaauauuugucugacccggacagaccgcggaugguacugcgauaacgccggcucuguguccuuuuucccgcaggcggagaccuguaagguccagagcaauagaguguuuugcgacacgaugaacucucuuacacugcccagcgaaguuaaucucugcaacaucgauauuuucaauccuaaauaugacuguaagaucaugaccuccaaaaccgaugugucuagcuccgucauuacaagccugggggccaucgugucuugcuacggaaagaccaaauguacagcuuccaacaagaaucggggcaucauuaagacguuuagcaacgggugcgacuaugucucuaauaaaggaguggacaccguuuccgugggcaacacacuuuacugugucaacaagcaagagggccagagccuguaugugaaaggggagcccaucauuaauuucuacgauccucucguuuuucccuccgacgaguucgaugccucuaucagccaggugaacgaaaagauuaaucagucccuggcuuuuauccgcaaaucugacgaacugcuccacaacgucaaugugggaaagagcaccacaaacauuaugaucaccacgaucauuaucgugauuaucguuauucugcuucugcucaucgccgucggccuguuccuguauugcaaggccagaugaggacuaguacuggcugcaucucccuuuccucuguccuccauccuucucccaggauggugaagggggaccugguacccagugauccccaccccaggauccuaaaucaugacuuaccugcuaauaaaaacucauuggaaaagugagaagaucuaaaaaaaaaaaaaaaaaaaaaaaaaaaaaaaaaaaaaaaaaaaaaaaaaaaaaaaaaaaaaaaaugcaucccccccccccccccccccccccccccccccaaaggcucuuuucagagccaccagaauu

SEQ ID NO: 15134 - RNA, 1947 nt, Artificial Sequence
  mRNA product Design b-5 comprising derived and/or modified sequence from HRSV(Memphis-37)__AIY60640.1__F-del_DSCav1_mut2 (opt6)
gggagacuccugucgggcggaaguaggaggaguagaguuuaaaaacaguacucuuuuuccgguucgggacguaguugaagcaacgacaagccggauaaccgcucuugagacaggaagcuuaccauggaacuaccaauacucaaaacaaacgcaauaacaacaauuuuagcugcaguaacacuuuguuucgcauccucccaaaauauaacagaagaauuuuaucaaucaaccugcucagccgucuccaaaggauaucuaggugcacuacgcacuggaugguacacaagugucaucacaauagaacuuuccaacaucaaagaaaauaaauguaauggaacugacgcaaaaguaaaacucauaaaacaagaacuagacaaauacaaaaacgcaguaacagaccuacaacuauuaaugcaaucaacaccagcagcaggauccggcagugccauaugcucuggaauagcagucugcaaaguuuuacacuuagaaggcgaaguaaacaaaaucaaaaacgcccuacuaucuacaaauaaagccgucguaucucucucaaauggaguaucaguacuaacauucaaaguauuagacuuaaaaaacuacaucgauaaacaauuauugccaauauuaaacaaacaaucuugcucaauaccaaauauagaaacagucauagaauuucaacaaaaaaauaaccgauuauuagaaauaacacgagaauuuucaguaaaugccggagucaccacaccaguaucaacauacaugcuaacaaauucagaacuauuaucauuaauaaacgacaugccuauuacaaaugaucaaaaaaaacuaauguccaacaauguacaaauaguccgacaacaaagcuacucaaucauguguauaauaaaagaagaaguacuugcauacguaguacaauuaccacuauacggaguuaucgacacaccaugcuggaaacuccacacuucaccacucugcaccacaaacacaaaagaaggcucaaacauaugccuaacaagaacagaccgaggaugguacugcgacaacgcaggaucaguaucauucuucccacaagcagaaacuugcaaaguacaaucuaacagaguuuucugugacaccaugaauagccuaacacuccccuccgaaguuaaccuauguaacauagauauauuuaaucccaaauaugauugcaaaaucaugacaucuaaaaccgacguaucaucaucuguaaucacaucacuaggugccauagucucaugcuacggcaaaacaaaaugcaccgccucaaacaaaaaccgagguauaauaaaaaccuucaguaauggaugugacuacguaucaaacaaagguguugauaccguaagcgucggcaacacccuauacugcguaaauaaacaagaaggccaaucacuauacgucaaaggcgaaccaauuauuaacuucuaugacccacucgucuuucccuccgacgaauuugacgcaagcauaucacaaguaaacgaaaaaauaaaccaaucacuagcauucauacgcaaaucagaugaacuacuacauaacguaaacguaggaaaauccacuacaaauauaaugaucacaacaauaauaaucguaauuauagucauauuauuacuacuaauagcaguaggacuuuuccuauacuguaaagcaagauaaggacuaguacuggcugcaucucccuuuccucuguccuccauccuucucccaggauggugaagggggaccugguacccagugauccccaccccaggauccuaaaucaugacuuaccugcuaauaaaaacucauuggaaaagugagaagaucuaaaaaaaaaaaaaaaaaaaaaaaaaaaaaaaaaaaaaaaaaaaaaaaaaaaaaaaaaaaaaaaaugcaucccccccccccccccccccccccccccccccaaaggcucuuuucagagccaccagaauu

SEQ ID NO: 15135 - RNA, 1947 nt, Artificial Sequence
  mRNA product Design b-5 comprising derived and/or modified sequence from HRSV(Memphis-37)__AIY60640.1__F-del_DSCav1_mut2 (opt11)
gggagacuccugucgggcggaaguaggaggaguagaguuuaaaaacaguacucuuuuuccgguucgggacguaguugaagcaacgacaagccggauaaccgcucuugagacaggaagcuuaccauggaacuucccauccucaagaccaacgcuauuacgaccauccucgccgcagucacccucugcuucgcgucaucccaaaacaucaccgaagaauuuuaccaauccacaugcuccgcagucucaaaaggcuaccuaggagcccuacgcaccggaugguacacauccgucaucacaaucgaacucuccaacauaaaagaaaacaaaugcaacggcaccgaugccaaaguaaaacugauuaaacaagaacucgacaaauacaagaacgccgucacagaccuacagcuccucaugcaaucaacucccgccgccggcagcggauccgcuaucugcucaggcaucgccguaugcaaaguccuccaccuagaaggcgaaguaaacaaaaucaagaacgcacuacucucaacaaacaaagccgucgucucccucuccaacggcgucuccguccuuaccuucaaaguccucgaccuuaagaacuacauugacaaacaacuccuacccauccucaacaaacaauccugcucuauaccuaauauagaaaccguaaucgaauuucaacagaaaaacaaccgccuccucgaaauuacccgcgaguucucaguaaacgccggcguaaccacccccgucuccaccuacaugcucacaaauucagaacuccucagccucaucaacgacaugcccauaaccaacgaccaaaagaaacucaugucaaacaacguccaaaucgucaggcaacaaagcuacagcaucaugugcaucauuaaagaagaaguacucgccuacgucgugcaacuaccccucuacggcgucauagacacacccugcuggaaacuucacacaucaccgcucugcaccacaaacaccaaagaaggcaguaacauaugccucacccgaaccgaccgcggaugguacugcgacaacgccggauccgucagcuucuucccacaagccgaaaccugcaaaguacaauccaaccgagucuucugcgacaccaugaacucucuuacgcuccccucagaagucaaccuaugcaacaucgacaucuucaaccccaaauacgacugcaaaaucaugaccuccaaaacagacgucuccuccucagugauaaccucccucggcgccauugucuccugcuacggcaaaaccaaaugcaccgccuccaacaaaaaccgugggaucaucaaaaccuucucaaacggcugcgacuacguauccaauaagggugucgacacagucuccguaggcaauacccucuauugcgucaacaaacaagaaggccaaucccucuacgucaaaggcgaaccuaucaucaacuucuacgacccgcuagucuuccccucagacgaguucgacgcauccaucucacaagucaacgaaaagaucaaccagucccucgcauucauccgaaaauccgacgaacuucuccacaacguuaacgucggcaaauccaccacuaacauaaugaucaccacgaucaucauaguaauuaucgucauacuccuccuccuaaucgcugucggacucuuccucuacugcaaggcccgcuaaggacuaguacuggcugcaucucccuuuccucuguccuccauccuucucccaggauggugaagggggaccugguacccagugauccccaccccaggauccuaaaucaugacuuaccugcuaauaaaaacucauuggaaaagugagaagaucuaaaaaaaaaaaaaaaaaaaaaaaaaaaaaaaaaaaaaaaaaaaaaaaaaaaaaaaaaaaaaaaaugcaucccccccccccccccccccccccccccccccaaaggcucuuuucagagccaccagaauu

SEQ ID NO: 15136 - RNA, 1853 nt, Artificial Sequence
  mRNA product Design c-1 comprising derived and/or modified sequence from HRSV(Memphis-37)__AIY60640.1__F-del_DSCav1_mut2 (opt1)
gggagaguccgcucagccagguugcagaagcggcuuagcguguguccuaaucuucucucugcguguagguaggccugugccgcaaacaagcuuaccauggagcugcccauccucaagaccaacgccaucaccacgauccuggccgcggugacccugugcuucgccagcucccagaacaucaccgaggaguucuaccagagcacgugcuccgccgucagcaagggcuaccucggcgcccugcgcaccgggugguacaccagcgugaucaccaucgagcuguccaacaucaaggagaacaagugcaacggcaccgacgccaaggugaagcucaucaagcaggagcuggacaaguacaagaacgcggucacggaccugcagcuccugaugcagagcaccccggccgccggcuccgggagcgcgaucugcuccggcaucgccgucugcaaggugcugcaccucgagggcgaggugaacaagaucaagaacgcccugcuguccaccaacaaggccgucgugagccucuccaacggggugagcguccugaccuucaaggugcuggaccucaagaacuacaucgacaagcagcugcugcccauccugaacaagcagagcugcuccauccccaacaucgagaccgucaucgaguuccagcagaagaacaaccgccuccuggagaucacgcgggaguucagcgugaacgcgggcgugaccacccccgucuccaccuacaugcugacgaacagcgagcuccugucccugaucaacgacaugccgaucaccaacgaccagaagaagcucaugagcaacaacgugcagaucgugcgccagcaguccuacagcaucaugugcaucaucaaggaggagguccuggccuacguggugcagcugccccucuacggggucaucgacacccccugcuggaagcugcacaccagcccccugugcacgaccaacaccaaggagggcuccaacaucugccucacccggacggaccgcgggugguacugcgacaacgccggcagcguguccuucuucccgcaggccgagaccugcaagguccagagcaaccggguguucugcgacaccaugaacucccugacccugcccagcgaggugaaccucugcaacaucgacaucuucaaccccaaguacgacugcaagaucaugacguccaagaccgacgucagcuccagcgugaucaccucccugggcgccaucgugagcugcuacgggaagaccaagugcacggcgagcaacaagaaccgcggcaucaucaagaccuucuccaacgggugcgacuacgucagcaacaagggcguggacaccguguccgucggcaacacccuguacugcgugaacaagcaggagggccagagccucuacgugaagggggagcccaucaucaacuucuacgacccgcuggucuuccccuccgacgaguucgacgccagcaucucccaggugaacgagaagaucaaccagagccuggccuucauccggaaguccgacgagcuccugcacaacgugaacgucggcaagagcaccacgaacaucaugaucaccaccaucaucaucgugaucaucgugauccugcugcuccugaucgccgucgggcuguuccucuacugcaaggcccgcugaggacuaguguccaccugucccuccugggcugcuggauugucucguuuuccugccaaauaaacaggaucagcgcuuuacagaucuaaaaaaaaaaaaaaaaaaaaaaaaaaaaaaaaaaaaaaaaaaaaaaaaaaaaaaaaaaaaaaaaugcaucccccccccccccccccccccccccccccccaaaggcucuuuucagagccaccagaauu

SEQ ID NO: 15137 - RNA, 1853 nt, Artificial Sequence
  mRNA product Design c-1 comprising derived and/or modified sequence from HRSV(Memphis-37)__AIY60640.1__F-del_DSCav1_mut2 (opt1)
gggagaguccgcucagccagguugcagaagcggcuuagcguguguccuaaucuucucucugcguguagguaggccugugccgcaaacaagcuuaccauggagcugcccauccucaagaccaacgccaucaccacgauccuggccgcggugacccugugcuucgccagcucccagaacaucaccgaggaguucuaccagagcacgugcuccgccgucagcaagggcuaccucggggcccugcgcaccggcugguacaccuccgugaucaccaucgagcugagcaacaucaaggagaacaagugcaacgggaccgacgccaaggugaagcucaucaagcaggagcuggacaaguacaagaacgcggucacggaccugcagcuccugaugcaguccaccccggccgccggcagcggguccgccaucugcagcggcaucgcggugugcaaggugcugcaccucgagggcgaggucaacaagaucaagaacgcccugcuguccaccaacaaggccguggugagccucuccaacggggucagcgugcugaccuucaaggugcuggaccucaagaacuacaucgacaagcagcugcugcccauccucaacaagcaguccugcagcauccccaacaucgagacggucaucgaguuccagcagaagaacaaccggcugcuggagaucacccgcgaguucuccgugaacgccggcgugaccacccccgucagcacguacaugcucaccaacuccgagcugcugagccucaucaacgacaugccgaucaccaacgaccagaagaagcugaugagcaacaacgugcagaucgugcggcagcaguccuacagcaucaugugcaucaucaaggaggagguccuggccuacguggugcagcucccccuguacggggucaucgacacccccugcuggaagcugcacacgagcccccucugcaccaccaacaccaaggagggcuccaacaucugccugacgcgcaccgaccgggggugguacugcgacaacgcgggcuccgugagcuucuucccgcaggccgagaccugcaaggugcaguccaaccgcgucuucugcgacaccaugaacagccugacgcuccccuccgaggugaaccugugcaacaucgacaucuucaaccccaaguacgacugcaagaucaugaccagcaagaccgacgucuccagcuccgugaucaccagccugggcgccaucguguccugcuacgggaagacgaagugcaccgccagcaacaagaaccggggcaucaucaagaccuucuccaacgggugcgacuacgucagcaacaagggcguggacaccguguccgucggcaacacgcucuacugcgugaacaagcaggaggggcagagccuguacgugaagggcgagcccaucaucaacuucuacgacccgcuggucuuccccagcgacgaguucgacgccuccaucagccaggugaacgagaagaucaaccagucccucgcguucauccgcaagagcgacgagcugcugcacaacgugaacgucgggaaguccaccaccaacaucaugaucaccaccaucaucaucgugaucaucgugauccuccugcugcucaucgccgucggccuguuccuguacugcaaggcccggugaggacuaguguccaccugucccuccugggcugcuggauugucucguuuuccugccaaauaaacaggaucagcgcuuuacagaucuaaaaaaaaaaaaaaaaaaaaaaaaaaaaaaaaaaaaaaaaaaaaaaaaaaaaaaaaaaaaaaaaugcaucccccccccccccccccccccccccccccccaaaggcucuuuucagagccaccagaauu

SEQ ID NO: 15138 - RNA, 1853 nt, Artificial Sequence
  mRNA product Design c-1 comprising derived and/or modified sequence from HRSV(Memphis-37)__AIY60640.1__F-del_DSCav1_mut2 (opt2)
gggagaguccgcucagccagguugcagaagcggcuuagcguguguccuaaucuucucucugcguguagguaggccugugccgcaaacaagcuuaccauggagcuccccauccucaagaccaacgccaucaccaccauccucgccgccgucacccucugcuucgccuccucccagaacaucaccgaggaguucuaccaguccaccugcuccgccgucuccaagggcuaccucggcgcccuccgcaccggcugguacaccuccgucaucaccaucgagcucuccaacaucaaggagaacaagugcaacggcaccgacgccaaggucaagcucaucaagcaggagcucgacaaguacaagaacgccgucaccgaccuccagcuccucaugcaguccacccccgccgccggcuccggcuccgccaucugcuccggcaucgccgucugcaagguccuccaccucgagggcgaggucaacaagaucaagaacgcccuccucuccaccaacaaggccgucgucucccucuccaacggcgucuccguccucaccuucaagguccucgaccucaagaacuacaucgacaagcagcuccuccccauccucaacaagcaguccugcuccauccccaacaucgagaccgucaucgaguuccagcagaagaacaaccgccuccucgagaucacccgcgaguucuccgucaacgccggcgucaccacccccgucuccaccuacaugcucaccaacuccgagcuccucucccucaucaacgacaugcccaucaccaacgaccagaagaagcucauguccaacaacguccagaucguccgccagcaguccuacuccaucaugugcaucaucaaggaggagguccucgccuacgucguccagcucccccucuacggcgucaucgacacccccugcuggaagcuccacaccuccccccucugcaccaccaacaccaaggagggcuccaacaucugccucacccgcaccgaccgcggcugguacugcgacaacgccggcuccgucuccuucuucccccaggccgagaccugcaagguccaguccaaccgcgucuucugcgacaccaugaacucccucacccuccccuccgaggucaaccucugcaacaucgacaucuucaaccccaaguacgacugcaagaucaugaccuccaagaccgacgucuccuccuccgucaucaccucccucggcgccaucgucuccugcuacggcaagaccaagugcaccgccuccaacaagaaccgcggcaucaucaagaccuucuccaacggcugcgacuacgucuccaacaagggcgucgacaccgucuccgucggcaacacccucuacugcgucaacaagcaggagggccagucccucuacgucaagggcgagcccaucaucaacuucuacgacccccucgucuuccccuccgacgaguucgacgccuccaucucccaggucaacgagaagaucaaccagucccucgccuucauccgcaaguccgacgagcuccuccacaacgucaacgucggcaaguccaccaccaacaucaugaucaccaccaucaucaucgucaucaucgucauccuccuccuccucaucgccgucggccucuuccucuacugcaaggcccgcugaggacuaguguccaccugucccuccugggcugcuggauugucucguuuuccugccaaauaaacaggaucagcgcuuuacagaucuaaaaaaaaaaaaaaaaaaaaaaaaaaaaaaaaaaaaaaaaaaaaaaaaaaaaaaaaaaaaaaaaugcaucccccccccccccccccccccccccccccccaaaggcucuuuucagagccaccagaauu

SEQ ID NO: 15139 - RNA, 1853 nt, Artificial Sequence
  mRNA product Design c-1 comprising derived and/or modified sequence from HRSV(Memphis-37)__AIY60640.1__F-del_DSCav1_mut2 (opt3)
gggagaguccgcucagccagguugcagaagcggcuuagcguguguccuaaucuucucucugcguguagguaggccugugccgcaaacaagcuuaccauggagcugcccauccucaagaccaacgccauuacaacuauacuugcugcagugacgcugugcuucgccagcucccagaauaucaccgaagaguuuuaccaaucuacauguucagcggucaguaaaggcuauuugggggcuuuaagaacuggaugguacaccagcguuauuacaaucgaacuguccaacauuaaggagaauaaaugcaacgguaccgacgccaaggugaaacuaaucaagcaggaacucgauaaguauaaaaaugcaguaacugaccugcagcuucugaugcagucuacuccugccgcuggcucggggucagcaauauguagcggaaucgccgugugcaaggucuugcaccucgagggcgaggugaacaaaauuaagaaugcucugcugaguaccaacaaagccguugugucccucucuaauggugucagcguguuaacguucaagguacuggaucuuaagaacuacaucgacaaacaauugcugccaauucuaaauaagcaguccuguucaaucccgaacauagaaacuguuauugaguuucagcagaaaaauaacaggcuccuggaaaucacccgggaguucagugugaaugcgggggucacaacucccgugagcaccuauaugcuuacaaacucugagcuguugucccucauuaacgauaugccuaucaccaaugaccaaaagaaacugaugucaaacaaugugcagaucguccgccagcagagcuacaguauuaugugcauaaucaaggaagagguuuuagcauaugugguacaacugccacucuacggagugauugauacgcccuguuggaaacuucauacuucuccucugugcacaaccaacacuaaggaaggcuccaauaucuguuugacacgaaccgaccguggcugguacugcgauaacgccgggagcgucucguuuuucccacaggcugagacguguaaggugcagucuaauagaguuuucugcgacaccaugaacucccuaacacugcccucagaagugaaucucugcaacauagauauuuucaauccuaaauaugacuguaagaucaugacaaguaaaaccgaugucagcuccucugugaucacaagccugggagccauuguaucaugcuacgguaagacuaaauguaccgcaaguaacaagaauaggggcaucauuaagacauuuuccaacgggugcgacuauguuagcaauaaaggaguggacaccgucucugugggcaacacucuuuacugugucaacaagcaagagggucagucacuguaugugaaaggggagccaauaaucaauuucuacgauccguugguuuuucccagugacgaauuugaugcuagcauuucccaggugaacgagaagaucaaucagucucucgccuuuauccggaaaucggacgaacuguuacacaacguaaaugucggaaagagcacgacaaacauuaugauaaccacuaucauuaucgugauuaucguuauacugcuacuccugaucgcggugggccuuuucuuguauugcaaggcccgcugaggacuaguguccaccugucccuccugggcugcuggauugucucguuuuccugccaaauaaacaggaucagcgcuuuacagaucuaaaaaaaaaaaaaaaaaaaaaaaaaaaaaaaaaaaaaaaaaaaaaaaaaaaaaaaaaaaaaaaaugcaucccccccccccccccccccccccccccccccaaaggcucuuuucagagccaccagaauu

SEQ ID NO: 15140 - RNA, 1853 nt, Artificial Sequence
  mRNA product Design c-1 comprising derived and/or modified sequence from HRSV(Memphis-37)__AIY60640.1__F-del_DSCav1_mut2 (opt4)
gggagaguccgcucagccagguugcagaagcggcuuagcguguguccuaaucuucucucugcguguagguaggccugugccgcaaacaagcuuaccauggagcugcccauccugaagaccaacgccaucaccaccauccuggccgccgugacccugugcuucgccagcagccagaacaucaccgaggaguucuaccagagcaccugcagcgccgugagcaagggcuaccugggcgcccugagaaccggcugguacaccagcgugaucaccaucgagcugagcaacaucaaggagaacaagugcaacggcaccgacgccaaggugaagcugaucaagcaggagcuggacaaguacaagaacgccgugaccgaccugcagcugcugaugcagagcacccccgccgccggcagcggcagcgccaucugcagcggcaucgccgugugcaaggugcugcaccuggagggcgaggugaacaagaucaagaacgcccugcugagcaccaacaaggccguggugagccugagcaacggcgugagcgugcugaccuucaaggugcuggaccugaagaacuacaucgacaagcagcugcugcccauccugaacaagcagagcugcagcauccccaacaucgagaccgugaucgaguuccagcagaagaacaacagacugcuggagaucaccagagaguucagcgugaacgccggcgugaccacccccgugagcaccuacaugcugaccaacagcgagcugcugagccugaucaacgacaugcccaucaccaacgaccagaagaagcugaugagcaacaacgugcagaucgugagacagcagagcuacagcaucaugugcaucaucaaggaggaggugcuggccuacguggugcagcugccccuguacggcgugaucgacacccccugcuggaagcugcacaccagcccccugugcaccaccaacaccaaggagggcagcaacaucugccugaccagaaccgacagaggcugguacugcgacaacgccggcagcgugagcuucuucccccaggccgagaccugcaaggugcagagcaacagaguguucugcgacaccaugaacagccugacccugcccagcgaggugaaccugugcaacaucgacaucuucaaccccaaguacgacugcaagaucaugaccagcaagaccgacgugagcagcagcgugaucaccagccugggcgccaucgugagcugcuacggcaagaccaagugcaccgccagcaacaagaacagaggcaucaucaagaccuucagcaacggcugcgacuacgugagcaacaagggcguggacaccgugagcgugggcaacacccuguacugcgugaacaagcaggagggccagagccuguacgugaagggcgagcccaucaucaacuucuacgacccccugguguuccccagcgacgaguucgacgccagcaucagccaggugaacgagaagaucaaccagagccuggccuucaucagaaagagcgacgagcugcugcacaacgugaacgugggcaagagcaccaccaacaucaugaucaccaccaucaucaucgugaucaucgugauccugcugcugcugaucgccgugggccuguuccuguacugcaaggccagaugaggacuaguguccaccugucccuccugggcugcuggauugucucguuuuccugccaaauaaacaggaucagcgcuuuacagaucuaaaaaaaaaaaaaaaaaaaaaaaaaaaaaaaaaaaaaaaaaaaaaaaaaaaaaaaaaaaaaaaaugcaucccccccccccccccccccccccccccccccaaaggcucuuuucagagccaccagaauu

SEQ ID NO: 15141 - RNA, 1853 nt, Artificial Sequence
  mRNA product Design c-1 comprising derived and/or modified sequence from HRSV(Memphis-37)__AIY60640.1__F-del_DSCav1_mut2 (opt5)
gggagaguccgcucagccagguugcagaagcggcuuagcguguguccuaaucuucucucugcguguagguaggccugugccgcaaacaagcuuaccauggagcugcccauccucaagaccaacgccauuacaacgauccuggcugccgugacccuuugcuucgcgagcucccagaauauuacagaagaguuuuaccaaucuaccuguagcgcugucuccaaaggcuaucugggggcccucagaacaggaugguacaccucuguuaucacaauugaacugagcaacaucaaggagaauaaaugcaacggcaccgacgccaaggugaaacuuaucaagcaggaacuggauaaguauaaaaaugcugugacggaccuccagcugcugaugcaguccaccccugccgcugggucuggaagcgccauuuguuccggcaucgcggucugcaaggugcuccaccuggagggggagguuaacaaaauuaagaaugcccuucugagcacaaacaaagcuguggucucucucuccaauggagugagcguucugaccuucaaggugcuugaucugaagaacuacaucgacaaacaacuccugccgauucugaauaagcagucuuguuccauccccaacauugaaacagucaucgaguuucagcagaaaaauaaccggcuccuggaaaucacccgcgaguucagcgugaaugccggcgugacgacaccugucucuaccuauaugcuuacaaacuccgagcugcucagccugauuaacgauaugcccaucaccaaugaccaaaagaaacuuauguccaacaauguucagauugugagacagcagucuuacagcaucaugugcauuaucaaggaagaggugcuggcuuaugucgugcaacucccucuguacggcguuaucgauacccccuguuggaaacugcauacauccccucucugcacgaccaacacaaaggaagggagcaauauuugucugacccggacagaccgcggaugguacugcgauaacgccggcucuguguccuuuuucccgcaggcggagaccuguaagguccagagcaauagaguguuuugcgacacgaugaacucucuuacacugcccagcgaaguuaaucucugcaacaucgauauuuucaauccuaaauaugacuguaagaucaugaccuccaaaaccgaugugucuagcuccgucauuacaagccugggggccaucgugucuugcuacggaaagaccaaauguacagcuuccaacaagaaucggggcaucauuaagacguuuagcaacgggugcgacuaugucucuaauaaaggaguggacaccguuuccgugggcaacacacuuuacugugucaacaagcaagagggccagagccuguaugugaaaggggagcccaucauuaauuucuacgauccucucguuuuucccuccgacgaguucgaugccucuaucagccaggugaacgaaaagauuaaucagucccuggcuuuuauccgcaaaucugacgaacugcuccacaacgucaaugugggaaagagcaccacaaacauuaugaucaccacgaucauuaucgugauuaucguuauucugcuucugcucaucgccgucggccuguuccuguauugcaaggccagaugaggacuaguguccaccugucccuccugggcugcuggauugucucguuuuccugccaaauaaacaggaucagcgcuuuacagaucuaaaaaaaaaaaaaaaaaaaaaaaaaaaaaaaaaaaaaaaaaaaaaaaaaaaaaaaaaaaaaaaaugcaucccccccccccccccccccccccccccccccaaaggcucuuuucagagccaccagaauu

SEQ ID NO: 15142 - RNA, 1853 nt, Artificial Sequence
  mRNA product Design c-1 comprising derived and/or modified sequence from HRSV(Memphis-37)__AIY60640.1__F-del_DSCav1_mut2 (opt6)
gggagaguccgcucagccagguugcagaagcggcuuagcguguguccuaaucuucucucugcguguagguaggccugugccgcaaacaagcuuaccauggaacuaccaauacucaaaacaaacgcaauaacaacaauuuuagcugcaguaacacuuuguuucgcauccucccaaaauauaacagaagaauuuuaucaaucaaccugcucagccgucuccaaaggauaucuaggugcacuacgcacuggaugguacacaagugucaucacaauagaacuuuccaacaucaaagaaaauaaauguaauggaacugacgcaaaaguaaaacucauaaaacaagaacuagacaaauacaaaaacgcaguaacagaccuacaacuauuaaugcaaucaacaccagcagcaggauccggcagugccauaugcucuggaauagcagucugcaaaguuuuacacuuagaaggcgaaguaaacaaaaucaaaaacgcccuacuaucuacaaauaaagccgucguaucucucucaaauggaguaucaguacuaacauucaaaguauuagacuuaaaaaacuacaucgauaaacaauuauugccaauauuaaacaaacaaucuugcucaauaccaaauauagaaacagucauagaauuucaacaaaaaaauaaccgauuauuagaaauaacacgagaauuuucaguaaaugccggagucaccacaccaguaucaacauacaugcuaacaaauucagaacuauuaucauuaauaaacgacaugccuauuacaaaugaucaaaaaaaacuaauguccaacaauguacaaauaguccgacaacaaagcuacucaaucauguguauaauaaaagaagaaguacuugcauacguaguacaauuaccacuauacggaguuaucgacacaccaugcuggaaacuccacacuucaccacucugcaccacaaacacaaaagaaggcucaaacauaugccuaacaagaacagaccgaggaugguacugcgacaacgcaggaucaguaucauucuucccacaagcagaaacuugcaaaguacaaucuaacagaguuuucugugacaccaugaauagccuaacacuccccuccgaaguuaaccuauguaacauagauauauuuaaucccaaauaugauugcaaaaucaugacaucuaaaaccgacguaucaucaucuguaaucacaucacuaggugccauagucucaugcuacggcaaaacaaaaugcaccgccucaaacaaaaaccgagguauaauaaaaaccuucaguaauggaugugacuacguaucaaacaaagguguugauaccguaagcgucggcaacacccuauacugcguaaauaaacaagaaggccaaucacuauacgucaaaggcgaaccaauuauuaacuucuaugacccacucgucuuucccuccgacgaauuugacgcaagcauaucacaaguaaacgaaaaaauaaaccaaucacuagcauucauacgcaaaucagaugaacuacuacauaacguaaacguaggaaaauccacuacaaauauaaugaucacaacaauaauaaucguaauuauagucauauuauuacuacuaauagcaguaggacuuuuccuauacuguaaagcaagauaaggacuaguguccaccugucccuccugggcugcuggauugucucguuuuccugccaaauaaacaggaucagcgcuuuacagaucuaaaaaaaaaaaaaaaaaaaaaaaaaaaaaaaaaaaaaaaaaaaaaaaaaaaaaaaaaaaaaaaaugcaucccccccccccccccccccccccccccccccaaaggcucuuuucagagccaccagaauu

SEQ ID NO: 15143 - RNA, 1853 nt, Artificial Sequence
  mRNA product Design c-1 comprising derived and/or modified sequence from HRSV(Memphis-37)__AIY60640.1__F-del_DSCav1_mut2 (opt11)
gggagaguccgcucagccagguugcagaagcggcuuagcguguguccuaaucuucucucugcguguagguaggccugugccgcaaacaagcuuaccauggaacuucccauccucaagaccaacgcuauuacgaccauccucgccgcagucacccucugcuucgcgucaucccaaaacaucaccgaagaauuuuaccaauccacaugcuccgcagucucaaaaggcuaccuaggagcccuacgcaccggaugguacacauccgucaucacaaucgaacucuccaacauaaaagaaaacaaaugcaacggcaccgaugccaaaguaaaacugauuaaacaagaacucgacaaauacaagaacgccgucacagaccuacagcuccucaugcaaucaacucccgccgccggcagcggauccgcuaucugcucaggcaucgccguaugcaaaguccuccaccuagaaggcgaaguaaacaaaaucaagaacgcacuacucucaacaaacaaagccgucgucucccucuccaacggcgucuccguccuuaccuucaaaguccucgaccuuaagaacuacauugacaaacaacuccuacccauccucaacaaacaauccugcucuauaccuaauauagaaaccguaaucgaauuucaacagaaaaacaaccgccuccucgaaauuacccgcgaguucucaguaaacgccggcguaaccacccccgucuccaccuacaugcucacaaauucagaacuccucagccucaucaacgacaugcccauaaccaacgaccaaaagaaacucaugucaaacaacguccaaaucgucaggcaacaaagcuacagcaucaugugcaucauuaaagaagaaguacucgccuacgucgugcaacuaccccucuacggcgucauagacacacccugcuggaaacuucacacaucaccgcucugcaccacaaacaccaaagaaggcaguaacauaugccucacccgaaccgaccgcggaugguacugcgacaacgccggauccgucagcuucuucccacaagccgaaaccugcaaaguacaauccaaccgagucuucugcgacaccaugaacucucuuacgcuccccucagaagucaaccuaugcaacaucgacaucuucaaccccaaauacgacugcaaaaucaugaccuccaaaacagacgucuccuccucagugauaaccucccucggcgccauugucuccugcuacggcaaaaccaaaugcaccgccuccaacaaaaaccgugggaucaucaaaaccuucucaaacggcugcgacuacguauccaauaagggugucgacacagucuccguaggcaauacccucuauugcgucaacaaacaagaaggccaaucccucuacgucaaaggcgaaccuaucaucaacuucuacgacccgcuagucuuccccucagacgaguucgacgcauccaucucacaagucaacgaaaagaucaaccagucccucgcauucauccgaaaauccgacgaacuucuccacaacguuaacgucggcaaauccaccacuaacauaaugaucaccacgaucaucauaguaauuaucgucauacuccuccuccuaaucgcugucggacucuuccucuacugcaaggcccgcuaaggacuaguguccaccugucccuccugggcugcuggauugucucguuuuccugccaaauaaacaggaucagcgcuuuacagaucuaaaaaaaaaaaaaaaaaaaaaaaaaaaaaaaaaaaaaaaaaaaaaaaaaaaaaaaaaaaaaaaaugcaucccccccccccccccccccccccccccccccaaaggcucuuuucagagccaccagaauu

SEQ ID NO: 15144 - RNA, 1943 nt, Artificial Sequence
  mRNA product Design c-2 comprising derived and/or modified sequence from HRSV(Memphis-37)__AIY60640.1__F-del_DSCav1_mut2 (opt1)
gggagacuccugucgggcggaaguaggaggaguagaguuuaaaaacaguacucuuuuuccgguucgggacguaguugaagcaacgacaagccggauaaccgcucuugagacaggaagcuuaccauggagcugcccauccucaagaccaacgccaucaccacgauccuggccgcggugacccugugcuucgccagcucccagaacaucaccgaggaguucuaccagagcacgugcuccgccgucagcaagggcuaccucggcgcccugcgcaccgggugguacaccagcgugaucaccaucgagcuguccaacaucaaggagaacaagugcaacggcaccgacgccaaggugaagcucaucaagcaggagcuggacaaguacaagaacgcggucacggaccugcagcuccugaugcagagcaccccggccgccggcuccgggagcgcgaucugcuccggcaucgccgucugcaaggugcugcaccucgagggcgaggugaacaagaucaagaacgcccugcuguccaccaacaaggccgucgugagccucuccaacggggugagcguccugaccuucaaggugcuggaccucaagaacuacaucgacaagcagcugcugcccauccugaacaagcagagcugcuccauccccaacaucgagaccgucaucgaguuccagcagaagaacaaccgccuccuggagaucacgcgggaguucagcgugaacgcgggcgugaccacccccgucuccaccuacaugcugacgaacagcgagcuccugucccugaucaacgacaugccgaucaccaacgaccagaagaagcucaugagcaacaacgugcagaucgugcgccagcaguccuacagcaucaugugcaucaucaaggaggagguccuggccuacguggugcagcugccccucuacggggucaucgacacccccugcuggaagcugcacaccagcccccugugcacgaccaacaccaaggagggcuccaacaucugccucacccggacggaccgcgggugguacugcgacaacgccggcagcguguccuucuucccgcaggccgagaccugcaagguccagagcaaccggguguucugcgacaccaugaacucccugacccugcccagcgaggugaaccucugcaacaucgacaucuucaaccccaaguacgacugcaagaucaugacguccaagaccgacgucagcuccagcgugaucaccucccugggcgccaucgugagcugcuacgggaagaccaagugcacggcgagcaacaagaaccgcggcaucaucaagaccuucuccaacgggugcgacuacgucagcaacaagggcguggacaccguguccgucggcaacacccuguacugcgugaacaagcaggagggccagagccucuacgugaagggggagcccaucaucaacuucuacgacccgcuggucuuccccuccgacgaguucgacgccagcaucucccaggugaacgagaagaucaaccagagccuggccuucauccggaaguccgacgagcuccugcacaacgugaacgucggcaagagcaccacgaacaucaugaucaccaccaucaucaucgugaucaucgugauccugcugcuccugaucgccgucgggcuguuccucuacugcaaggcccgcugaggacuaguggaagcauuuuccuggcugauuaaaagaaauuacucagcuauggucaucuguuccuguuagaaggcuaugcagcauauuauauacuaugcgcauguuaugaaaugcauaauaaaaaauuuuaaaaaaucuaaaagaucuaaaaaaaaaaaaaaaaaaaaaaaaaaaaaaaaaaaaaaaaaaaaaaaaaaaaaaaaaaaaaaaaugcaucccccccccccccccccccccccccccccccaaaggcucuuuucagagccaccagaauu

SEQ ID NO: 15145 - RNA, 1943 nt, Artificial Sequence
  mRNA product Design c-2 comprising derived and/or modified sequence from HRSV(Memphis-37)__AIY60640.1__F-del_DSCav1_mut2 (opt1)
gggagacuccugucgggcggaaguaggaggaguagaguuuaaaaacaguacucuuuuuccgguucgggacguaguugaagcaacgacaagccggauaaccgcucuugagacaggaagcuuaccauggagcugcccauccucaagaccaacgccaucaccacgauccuggccgcggugacccugugcuucgccagcucccagaacaucaccgaggaguucuaccagagcacgugcuccgccgucagcaagggcuaccucggggcccugcgcaccggcugguacaccuccgugaucaccaucgagcugagcaacaucaaggagaacaagugcaacgggaccgacgccaaggugaagcucaucaagcaggagcuggacaaguacaagaacgcggucacggaccugcagcuccugaugcaguccaccccggccgccggcagcggguccgccaucugcagcggcaucgcggugugcaaggugcugcaccucgagggcgaggucaacaagaucaagaacgcccugcuguccaccaacaaggccguggugagccucuccaacggggucagcgugcugaccuucaaggugcuggaccucaagaacuacaucgacaagcagcugcugcccauccucaacaagcaguccugcagcauccccaacaucgagacggucaucgaguuccagcagaagaacaaccggcugcuggagaucacccgcgaguucuccgugaacgccggcgugaccacccccgucagcacguacaugcucaccaacuccgagcugcugagccucaucaacgacaugccgaucaccaacgaccagaagaagcugaugagcaacaacgugcagaucgugcggcagcaguccuacagcaucaugugcaucaucaaggaggagguccuggccuacguggugcagcucccccuguacggggucaucgacacccccugcuggaagcugcacacgagcccccucugcaccaccaacaccaaggagggcuccaacaucugccugacgcgcaccgaccgggggugguacugcgacaacgcgggcuccgugagcuucuucccgcaggccgagaccugcaaggugcaguccaaccgcgucuucugcgacaccaugaacagccugacgcuccccuccgaggugaaccugugcaacaucgacaucuucaaccccaaguacgacugcaagaucaugaccagcaagaccgacgucuccagcuccgugaucaccagccugggcgccaucguguccugcuacgggaagacgaagugcaccgccagcaacaagaaccggggcaucaucaagaccuucuccaacgggugcgacuacgucagcaacaagggcguggacaccguguccgucggcaacacgcucuacugcgugaacaagcaggaggggcagagccuguacgugaagggcgagcccaucaucaacuucuacgacccgcuggucuuccccagcgacgaguucgacgccuccaucagccaggugaacgagaagaucaaccagucccucgcguucauccgcaagagcgacgagcugcugcacaacgugaacgucgggaaguccaccaccaacaucaugaucaccaccaucaucaucgugaucaucgugauccuccugcugcucaucgccgucggccuguuccuguacugcaaggcccggugaggacuaguggaagcauuuuccuggcugauuaaaagaaauuacucagcuauggucaucuguuccuguuagaaggcuaugcagcauauuauauacuaugcgcauguuaugaaaugcauaauaaaaaauuuuaaaaaaucuaaaagaucuaaaaaaaaaaaaaaaaaaaaaaaaaaaaaaaaaaaaaaaaaaaaaaaaaaaaaaaaaaaaaaaaugcaucccccccccccccccccccccccccccccccaaaggcucuuuucagagccaccagaauu

SEQ ID NO: 15146 - RNA, 1943 nt, Artificial Sequence
  mRNA product Design c-2 comprising derived and/or modified sequence from HRSV(Memphis-37)__AIY60640.1__F-del_DSCav1_mut2 (opt2)
gggagacuccugucgggcggaaguaggaggaguagaguuuaaaaacaguacucuuuuuccgguucgggacguaguugaagcaacgacaagccggauaaccgcucuugagacaggaagcuuaccauggagcuccccauccucaagaccaacgccaucaccaccauccucgccgccgucacccucugcuucgccuccucccagaacaucaccgaggaguucuaccaguccaccugcuccgccgucuccaagggcuaccucggcgcccuccgcaccggcugguacaccuccgucaucaccaucgagcucuccaacaucaaggagaacaagugcaacggcaccgacgccaaggucaagcucaucaagcaggagcucgacaaguacaagaacgccgucaccgaccuccagcuccucaugcaguccacccccgccgccggcuccggcuccgccaucugcuccggcaucgccgucugcaagguccuccaccucgagggcgaggucaacaagaucaagaacgcccuccucuccaccaacaaggccgucgucucccucuccaacggcgucuccguccucaccuucaagguccucgaccucaagaacuacaucgacaagcagcuccuccccauccucaacaagcaguccugcuccauccccaacaucgagaccgucaucgaguuccagcagaagaacaaccgccuccucgagaucacccgcgaguucuccgucaacgccggcgucaccacccccgucuccaccuacaugcucaccaacuccgagcuccucucccucaucaacgacaugcccaucaccaacgaccagaagaagcucauguccaacaacguccagaucguccgccagcaguccuacuccaucaugugcaucaucaaggaggagguccucgccuacgucguccagcucccccucuacggcgucaucgacacccccugcuggaagcuccacaccuccccccucugcaccaccaacaccaaggagggcuccaacaucugccucacccgcaccgaccgcggcugguacugcgacaacgccggcuccgucuccuucuucccccaggccgagaccugcaagguccaguccaaccgcgucuucugcgacaccaugaacucccucacccuccccuccgaggucaaccucugcaacaucgacaucuucaaccccaaguacgacugcaagaucaugaccuccaagaccgacgucuccuccuccgucaucaccucccucggcgccaucgucuccugcuacggcaagaccaagugcaccgccuccaacaagaaccgcggcaucaucaagaccuucuccaacggcugcgacuacgucuccaacaagggcgucgacaccgucuccgucggcaacacccucuacugcgucaacaagcaggagggccagucccucuacgucaagggcgagcccaucaucaacuucuacgacccccucgucuuccccuccgacgaguucgacgccuccaucucccaggucaacgagaagaucaaccagucccucgccuucauccgcaaguccgacgagcuccuccacaacgucaacgucggcaaguccaccaccaacaucaugaucaccaccaucaucaucgucaucaucgucauccuccuccuccucaucgccgucggccucuuccucuacugcaaggcccgcugaggacuaguggaagcauuuuccuggcugauuaaaagaaauuacucagcuauggucaucuguuccuguuagaaggcuaugcagcauauuauauacuaugcgcauguuaugaaaugcauaauaaaaaauuuuaaaaaaucuaaaagaucuaaaaaaaaaaaaaaaaaaaaaaaaaaaaaaaaaaaaaaaaaaaaaaaaaaaaaaaaaaaaaaaaugcaucccccccccccccccccccccccccccccccaaaggcucuuuucagagccaccagaauu

SEQ ID NO: 15147 - RNA, 1943 nt, Artificial Sequence
  mRNA product Design c-2 comprising derived and/or modified sequence from HRSV(Memphis-37)__AIY60640.1__F-del_DSCav1_mut2 (opt3)
gggagacuccugucgggcggaaguaggaggaguagaguuuaaaaacaguacucuuuuuccgguucgggacguaguugaagcaacgacaagccggauaaccgcucuugagacaggaagcuuaccauggagcugcccauccucaagaccaacgccauuacaacuauacuugcugcagugacgcugugcuucgccagcucccagaauaucaccgaagaguuuuaccaaucuacauguucagcggucaguaaaggcuauuugggggcuuuaagaacuggaugguacaccagcguuauuacaaucgaacuguccaacauuaaggagaauaaaugcaacgguaccgacgccaaggugaaacuaaucaagcaggaacucgauaaguauaaaaaugcaguaacugaccugcagcuucugaugcagucuacuccugccgcuggcucggggucagcaauauguagcggaaucgccgugugcaaggucuugcaccucgagggcgaggugaacaaaauuaagaaugcucugcugaguaccaacaaagccguugugucccucucuaauggugucagcguguuaacguucaagguacuggaucuuaagaacuacaucgacaaacaauugcugccaauucuaaauaagcaguccuguucaaucccgaacauagaaacuguuauugaguuucagcagaaaaauaacaggcuccuggaaaucacccgggaguucagugugaaugcgggggucacaacucccgugagcaccuauaugcuuacaaacucugagcuguugucccucauuaacgauaugccuaucaccaaugaccaaaagaaacugaugucaaacaaugugcagaucguccgccagcagagcuacaguauuaugugcauaaucaaggaagagguuuuagcauaugugguacaacugccacucuacggagugauugauacgcccuguuggaaacuucauacuucuccucugugcacaaccaacacuaaggaaggcuccaauaucuguuugacacgaaccgaccguggcugguacugcgauaacgccgggagcgucucguuuuucccacaggcugagacguguaaggugcagucuaauagaguuuucugcgacaccaugaacucccuaacacugcccucagaagugaaucucugcaacauagauauuuucaauccuaaauaugacuguaagaucaugacaaguaaaaccgaugucagcuccucugugaucacaagccugggagccauuguaucaugcuacgguaagacuaaauguaccgcaaguaacaagaauaggggcaucauuaagacauuuuccaacgggugcgacuauguuagcaauaaaggaguggacaccgucucugugggcaacacucuuuacugugucaacaagcaagagggucagucacuguaugugaaaggggagccaauaaucaauuucuacgauccguugguuuuucccagugacgaauuugaugcuagcauuucccaggugaacgagaagaucaaucagucucucgccuuuauccggaaaucggacgaacuguuacacaacguaaaugucggaaagagcacgacaaacauuaugauaaccacuaucauuaucgugauuaucguuauacugcuacuccugaucgcggugggccuuuucuuguauugcaaggcccgcugaggacuaguggaagcauuuuccuggcugauuaaaagaaauuacucagcuauggucaucuguuccuguuagaaggcuaugcagcauauuauauacuaugcgcauguuaugaaaugcauaauaaaaaauuuuaaaaaaucuaaaagaucuaaaaaaaaaaaaaaaaaaaaaaaaaaaaaaaaaaaaaaaaaaaaaaaaaaaaaaaaaaaaaaaaugcaucccccccccccccccccccccccccccccccaaaggcucuuuucagagccaccagaauu

SEQ ID NO: 15148 - RNA, 1943 nt, Artificial Sequence
  mRNA product Design c-2 comprising derived and/or modified sequence from HRSV(Memphis-37)__AIY60640.1__F-del_DSCav1_mut2 (opt4)
gggagacuccugucgggcggaaguaggaggaguagaguuuaaaaacaguacucuuuuuccgguucgggacguaguugaagcaacgacaagccggauaaccgcucuugagacaggaagcuuaccauggagcugcccauccugaagaccaacgccaucaccaccauccuggccgccgugacccugugcuucgccagcagccagaacaucaccgaggaguucuaccagagcaccugcagcgccgugagcaagggcuaccugggcgcccugagaaccggcugguacaccagcgugaucaccaucgagcugagcaacaucaaggagaacaagugcaacggcaccgacgccaaggugaagcugaucaagcaggagcuggacaaguacaagaacgccgugaccgaccugcagcugcugaugcagagcacccccgccgccggcagcggcagcgccaucugcagcggcaucgccgugugcaaggugcugcaccuggagggcgaggugaacaagaucaagaacgcccugcugagcaccaacaaggccguggugagccugagcaacggcgugagcgugcugaccuucaaggugcuggaccugaagaacuacaucgacaagcagcugcugcccauccugaacaagcagagcugcagcauccccaacaucgagaccgugaucgaguuccagcagaagaacaacagacugcuggagaucaccagagaguucagcgugaacgccggcgugaccacccccgugagcaccuacaugcugaccaacagcgagcugcugagccugaucaacgacaugcccaucaccaacgaccagaagaagcugaugagcaacaacgugcagaucgugagacagcagagcuacagcaucaugugcaucaucaaggaggaggugcuggccuacguggugcagcugccccuguacggcgugaucgacacccccugcuggaagcugcacaccagcccccugugcaccaccaacaccaaggagggcagcaacaucugccugaccagaaccgacagaggcugguacugcgacaacgccggcagcgugagcuucuucccccaggccgagaccugcaaggugcagagcaacagaguguucugcgacaccaugaacagccugacccugcccagcgaggugaaccugugcaacaucgacaucuucaaccccaaguacgacugcaagaucaugaccagcaagaccgacgugagcagcagcgugaucaccagccugggcgccaucgugagcugcuacggcaagaccaagugcaccgccagcaacaagaacagaggcaucaucaagaccuucagcaacggcugcgacuacgugagcaacaagggcguggacaccgugagcgugggcaacacccuguacugcgugaacaagcaggagggccagagccuguacgugaagggcgagcccaucaucaacuucuacgacccccugguguuccccagcgacgaguucgacgccagcaucagccaggugaacgagaagaucaaccagagccuggccuucaucagaaagagcgacgagcugcugcacaacgugaacgugggcaagagcaccaccaacaucaugaucaccaccaucaucaucgugaucaucgugauccugcugcugcugaucgccgugggccuguuccuguacugcaaggccagaugaggacuaguggaagcauuuuccuggcugauuaaaagaaauuacucagcuauggucaucuguuccuguuagaaggcuaugcagcauauuauauacuaugcgcauguuaugaaaugcauaauaaaaaauuuuaaaaaaucuaaaagaucuaaaaaaaaaaaaaaaaaaaaaaaaaaaaaaaaaaaaaaaaaaaaaaaaaaaaaaaaaaaaaaaaugcaucccccccccccccccccccccccccccccccaaaggcucuuuucagagccaccagaauu

SEQ ID NO: 15149 - RNA, 1943 nt, Artificial Sequence
  mRNA product Design c-2 comprising derived and/or modified sequence from HRSV(Memphis-37)__AIY60640.1__F-del_DSCav1_mut2 (opt5)
gggagacuccugucgggcggaaguaggaggaguagaguuuaaaaacaguacucuuuuuccgguucgggacguaguugaagcaacgacaagccggauaaccgcucuugagacaggaagcuuaccauggagcugcccauccucaagaccaacgccauuacaacgauccuggcugccgugacccuuugcuucgcgagcucccagaauauuacagaagaguuuuaccaaucuaccuguagcgcugucuccaaaggcuaucugggggcccucagaacaggaugguacaccucuguuaucacaauugaacugagcaacaucaaggagaauaaaugcaacggcaccgacgccaaggugaaacuuaucaagcaggaacuggauaaguauaaaaaugcugugacggaccuccagcugcugaugcaguccaccccugccgcugggucuggaagcgccauuuguuccggcaucgcggucugcaaggugcuccaccuggagggggagguuaacaaaauuaagaaugcccuucugagcacaaacaaagcuguggucucucucuccaauggagugagcguucugaccuucaaggugcuugaucugaagaacuacaucgacaaacaacuccugccgauucugaauaagcagucuuguuccauccccaacauugaaacagucaucgaguuucagcagaaaaauaaccggcuccuggaaaucacccgcgaguucagcgugaaugccggcgugacgacaccugucucuaccuauaugcuuacaaacuccgagcugcucagccugauuaacgauaugcccaucaccaaugaccaaaagaaacuuauguccaacaauguucagauugugagacagcagucuuacagcaucaugugcauuaucaaggaagaggugcuggcuuaugucgugcaacucccucuguacggcguuaucgauacccccuguuggaaacugcauacauccccucucugcacgaccaacacaaaggaagggagcaauauuugucugacccggacagaccgcggaugguacugcgauaacgccggcucuguguccuuuuucccgcaggcggagaccuguaagguccagagcaauagaguguuuugcgacacgaugaacucucuuacacugcccagcgaaguuaaucucugcaacaucgauauuuucaauccuaaauaugacuguaagaucaugaccuccaaaaccgaugugucuagcuccgucauuacaagccugggggccaucgugucuugcuacggaaagaccaaauguacagcuuccaacaagaaucggggcaucauuaagacguuuagcaacgggugcgacuaugucucuaauaaaggaguggacaccguuuccgugggcaacacacuuuacugugucaacaagcaagagggccagagccuguaugugaaaggggagcccaucauuaauuucuacgauccucucguuuuucccuccgacgaguucgaugccucuaucagccaggugaacgaaaagauuaaucagucccuggcuuuuauccgcaaaucugacgaacugcuccacaacgucaaugugggaaagagcaccacaaacauuaugaucaccacgaucauuaucgugauuaucguuauucugcuucugcucaucgccgucggccuguuccuguauugcaaggccagaugaggacuaguggaagcauuuuccuggcugauuaaaagaaauuacucagcuauggucaucuguuccuguuagaaggcuaugcagcauauuauauacuaugcgcauguuaugaaaugcauaauaaaaaauuuuaaaaaaucuaaaagaucuaaaaaaaaaaaaaaaaaaaaaaaaaaaaaaaaaaaaaaaaaaaaaaaaaaaaaaaaaaaaaaaaugcaucccccccccccccccccccccccccccccccaaaggcucuuuucagagccaccagaauu

SEQ ID NO: 15150 - RNA, 1943 nt, Artificial Sequence
  mRNA product Design c-2 comprising derived and/or modified sequence from HRSV(Memphis-37)__AIY60640.1__F-del_DSCav1_mut2 (opt6)
gggagacuccugucgggcggaaguaggaggaguagaguuuaaaaacaguacucuuuuuccgguucgggacguaguugaagcaacgacaagccggauaaccgcucuugagacaggaagcuuaccauggaacuaccaauacucaaaacaaacgcaauaacaacaauuuuagcugcaguaacacuuuguuucgcauccucccaaaauauaacagaagaauuuuaucaaucaaccugcucagccgucuccaaaggauaucuaggugcacuacgcacuggaugguacacaagugucaucacaauagaacuuuccaacaucaaagaaaauaaauguaauggaacugacgcaaaaguaaaacucauaaaacaagaacuagacaaauacaaaaacgcaguaacagaccuacaacuauuaaugcaaucaacaccagcagcaggauccggcagugccauaugcucuggaauagcagucugcaaaguuuuacacuuagaaggcgaaguaaacaaaaucaaaaacgcccuacuaucuacaaauaaagccgucguaucucucucaaauggaguaucaguacuaacauucaaaguauuagacuuaaaaaacuacaucgauaaacaauuauugccaauauuaaacaaacaaucuugcucaauaccaaauauagaaacagucauagaauuucaacaaaaaaauaaccgauuauuagaaauaacacgagaauuuucaguaaaugccggagucaccacaccaguaucaacauacaugcuaacaaauucagaacuauuaucauuaauaaacgacaugccuauuacaaaugaucaaaaaaaacuaauguccaacaauguacaaauaguccgacaacaaagcuacucaaucauguguauaauaaaagaagaaguacuugcauacguaguacaauuaccacuauacggaguuaucgacacaccaugcuggaaacuccacacuucaccacucugcaccacaaacacaaaagaaggcucaaacauaugccuaacaagaacagaccgaggaugguacugcgacaacgcaggaucaguaucauucuucccacaagcagaaacuugcaaaguacaaucuaacagaguuuucugugacaccaugaauagccuaacacuccccuccgaaguuaaccuauguaacauagauauauuuaaucccaaauaugauugcaaaaucaugacaucuaaaaccgacguaucaucaucuguaaucacaucacuaggugccauagucucaugcuacggcaaaacaaaaugcaccgccucaaacaaaaaccgagguauaauaaaaaccuucaguaauggaugugacuacguaucaaacaaagguguugauaccguaagcgucggcaacacccuauacugcguaaauaaacaagaaggccaaucacuauacgucaaaggcgaaccaauuauuaacuucuaugacccacucgucuuucccuccgacgaauuugacgcaagcauaucacaaguaaacgaaaaaauaaaccaaucacuagcauucauacgcaaaucagaugaacuacuacauaacguaaacguaggaaaauccacuacaaauauaaugaucacaacaauaauaaucguaauuauagucauauuauuacuacuaauagcaguaggacuuuuccuauacuguaaagcaagauaaggacuaguggaagcauuuuccuggcugauuaaaagaaauuacucagcuauggucaucuguuccuguuagaaggcuaugcagcauauuauauacuaugcgcauguuaugaaaugcauaauaaaaaauuuuaaaaaaucuaaaagaucuaaaaaaaaaaaaaaaaaaaaaaaaaaaaaaaaaaaaaaaaaaaaaaaaaaaaaaaaaaaaaaaaugcaucccccccccccccccccccccccccccccccaaaggcucuuuucagagccaccagaauu

SEQ ID NO: 15151 - RNA, 1943 nt, Artificial Sequence
  mRNA product Design c-2 comprising derived and/or modified sequence from HRSV(Memphis-37)__AIY60640.1__F-del_DSCav1_mut2 (opt11)
gggagacuccugucgggcggaaguaggaggaguagaguuuaaaaacaguacucuuuuuccgguucgggacguaguugaagcaacgacaagccggauaaccgcucuugagacaggaagcuuaccauggaacuucccauccucaagaccaacgcuauuacgaccauccucgccgcagucacccucugcuucgcgucaucccaaaacaucaccgaagaauuuuaccaauccacaugcuccgcagucucaaaaggcuaccuaggagcccuacgcaccggaugguacacauccgucaucacaaucgaacucuccaacauaaaagaaaacaaaugcaacggcaccgaugccaaaguaaaacugauuaaacaagaacucgacaaauacaagaacgccgucacagaccuacagcuccucaugcaaucaacucccgccgccggcagcggauccgcuaucugcucaggcaucgccguaugcaaaguccuccaccuagaaggcgaaguaaacaaaaucaagaacgcacuacucucaacaaacaaagccgucgucucccucuccaacggcgucuccguccuuaccuucaaaguccucgaccuuaagaacuacauugacaaacaacuccuacccauccucaacaaacaauccugcucuauaccuaauauagaaaccguaaucgaauuucaacagaaaaacaaccgccuccucgaaauuacccgcgaguucucaguaaacgccggcguaaccacccccgucuccaccuacaugcucacaaauucagaacuccucagccucaucaacgacaugcccauaaccaacgaccaaaagaaacucaugucaaacaacguccaaaucgucaggcaacaaagcuacagcaucaugugcaucauuaaagaagaaguacucgccuacgucgugcaacuaccccucuacggcgucauagacacacccugcuggaaacuucacacaucaccgcucugcaccacaaacaccaaagaaggcaguaacauaugccucacccgaaccgaccgcggaugguacugcgacaacgccggauccgucagcuucuucccacaagccgaaaccugcaaaguacaauccaaccgagucuucugcgacaccaugaacucucuuacgcuccccucagaagucaaccuaugcaacaucgacaucuucaaccccaaauacgacugcaaaaucaugaccuccaaaacagacgucuccuccucagugauaaccucccucggcgccauugucuccugcuacggcaaaaccaaaugcaccgccuccaacaaaaaccgugggaucaucaaaaccuucucaaacggcugcgacuacguauccaauaagggugucgacacagucuccguaggcaauacccucuauugcgucaacaaacaagaaggccaaucccucuacgucaaaggcgaaccuaucaucaacuucuacgacccgcuagucuuccccucagacgaguucgacgcauccaucucacaagucaacgaaaagaucaaccagucccucgcauucauccgaaaauccgacgaacuucuccacaacguuaacgucggcaaauccaccacuaacauaaugaucaccacgaucaucauaguaauuaucgucauacuccuccuccuaaucgcugucggacucuuccucuacugcaaggcccgcuaaggacuaguggaagcauuuuccuggcugauuaaaagaaauuacucagcuauggucaucuguuccuguuagaaggcuaugcagcauauuauauacuaugcgcauguuaugaaaugcauaauaaaaaauuuuaaaaaaucuaaaagaucuaaaaaaaaaaaaaaaaaaaaaaaaaaaaaaaaaaaaaaaaaaaaaaaaaaaaaaaaaaaaaaaaugcaucccccccccccccccccccccccccccccccaaaggcucuuuucagagccaccagaauu

SEQ ID NO: 15152 - RNA, 1920 nt, Artificial Sequence
  mRNA product Design c-3 comprising derived and/or modified sequence from HRSV(Memphis-37)__AIY60640.1__F-del_DSCav1_mut2 (opt1)
gggagaguccgcucagccagguugcagaagcggcuuagcguguguccuaaucuucucucugcguguagguaggccugugccgcaaacaagcuuaccauggagcugcccauccucaagaccaacgccaucaccacgauccuggccgcggugacccugugcuucgccagcucccagaacaucaccgaggaguucuaccagagcacgugcuccgccgucagcaagggcuaccucggcgcccugcgcaccgggugguacaccagcgugaucaccaucgagcuguccaacaucaaggagaacaagugcaacggcaccgacgccaaggugaagcucaucaagcaggagcuggacaaguacaagaacgcggucacggaccugcagcuccugaugcagagcaccccggccgccggcuccgggagcgcgaucugcuccggcaucgccgucugcaaggugcugcaccucgagggcgaggugaacaagaucaagaacgcccugcuguccaccaacaaggccgucgugagccucuccaacggggugagcguccugaccuucaaggugcuggaccucaagaacuacaucgacaagcagcugcugcccauccugaacaagcagagcugcuccauccccaacaucgagaccgucaucgaguuccagcagaagaacaaccgccuccuggagaucacgcgggaguucagcgugaacgcgggcgugaccacccccgucuccaccuacaugcugacgaacagcgagcuccugucccugaucaacgacaugccgaucaccaacgaccagaagaagcucaugagcaacaacgugcagaucgugcgccagcaguccuacagcaucaugugcaucaucaaggaggagguccuggccuacguggugcagcugccccucuacggggucaucgacacccccugcuggaagcugcacaccagcccccugugcacgaccaacaccaaggagggcuccaacaucugccucacccggacggaccgcgggugguacugcgacaacgccggcagcguguccuucuucccgcaggccgagaccugcaagguccagagcaaccggguguucugcgacaccaugaacucccugacccugcccagcgaggugaaccucugcaacaucgacaucuucaaccccaaguacgacugcaagaucaugacguccaagaccgacgucagcuccagcgugaucaccucccugggcgccaucgugagcugcuacgggaagaccaagugcacggcgagcaacaagaaccgcggcaucaucaagaccuucuccaacgggugcgacuacgucagcaacaagggcguggacaccguguccgucggcaacacccuguacugcgugaacaagcaggagggccagagccucuacgugaagggggagcccaucaucaacuucuacgacccgcuggucuuccccuccgacgaguucgacgccagcaucucccaggugaacgagaagaucaaccagagccuggccuucauccggaaguccgacgagcuccugcacaacgugaacgucggcaagagcaccacgaacaucaugaucaccaccaucaucaucgugaucaucgugauccugcugcuccugaucgccgucgggcuguuccucuacugcaaggcccgcugaggacuaguacuggcugcaucucccuuuccucuguccuccauccuucucccaggauggugaagggggaccugguacccagugauccccaccccaggauccuaaaucaugacuuaccugcuaauaaaaacucauuggaaaagugagaagaucuaaaaaaaaaaaaaaaaaaaaaaaaaaaaaaaaaaaaaaaaaaaaaaaaaaaaaaaaaaaaaaaaugcaucccccccccccccccccccccccccccccccaaaggcucuuuucagagccaccagaauu

SEQ ID NO: 15153 - RNA, 1920 nt, Artificial Sequence
  mRNA product Design c-3 comprising derived and/or modified sequence from HRSV(Memphis-37)__AIY60640.1__F-del_DSCav1_mut2 (opt1)
gggagaguccgcucagccagguugcagaagcggcuuagcguguguccuaaucuucucucugcguguagguaggccugugccgcaaacaagcuuaccauggagcugcccauccucaagaccaacgccaucaccacgauccuggccgcggugacccugugcuucgccagcucccagaacaucaccgaggaguucuaccagagcacgugcuccgccgucagcaagggcuaccucggggcccugcgcaccggcugguacaccuccgugaucaccaucgagcugagcaacaucaaggagaacaagugcaacgggaccgacgccaaggugaagcucaucaagcaggagcuggacaaguacaagaacgcggucacggaccugcagcuccugaugcaguccaccccggccgccggcagcggguccgccaucugcagcggcaucgcggugugcaaggugcugcaccucgagggcgaggucaacaagaucaagaacgcccugcuguccaccaacaaggccguggugagccucuccaacggggucagcgugcugaccuucaaggugcuggaccucaagaacuacaucgacaagcagcugcugcccauccucaacaagcaguccugcagcauccccaacaucgagacggucaucgaguuccagcagaagaacaaccggcugcuggagaucacccgcgaguucuccgugaacgccggcgugaccacccccgucagcacguacaugcucaccaacuccgagcugcugagccucaucaacgacaugccgaucaccaacgaccagaagaagcugaugagcaacaacgugcagaucgugcggcagcaguccuacagcaucaugugcaucaucaaggaggagguccuggccuacguggugcagcucccccuguacggggucaucgacacccccugcuggaagcugcacacgagcccccucugcaccaccaacaccaaggagggcuccaacaucugccugacgcgcaccgaccgggggugguacugcgacaacgcgggcuccgugagcuucuucccgcaggccgagaccugcaaggugcaguccaaccgcgucuucugcgacaccaugaacagccugacgcuccccuccgaggugaaccugugcaacaucgacaucuucaaccccaaguacgacugcaagaucaugaccagcaagaccgacgucuccagcuccgugaucaccagccugggcgccaucguguccugcuacgggaagacgaagugcaccgccagcaacaagaaccggggcaucaucaagaccuucuccaacgggugcgacuacgucagcaacaagggcguggacaccguguccgucggcaacacgcucuacugcgugaacaagcaggaggggcagagccuguacgugaagggcgagcccaucaucaacuucuacgacccgcuggucuuccccagcgacgaguucgacgccuccaucagccaggugaacgagaagaucaaccagucccucgcguucauccgcaagagcgacgagcugcugcacaacgugaacgucgggaaguccaccaccaacaucaugaucaccaccaucaucaucgugaucaucgugauccuccugcugcucaucgccgucggccuguuccuguacugcaaggcccggugaggacuaguacuggcugcaucucccuuuccucuguccuccauccuucucccaggauggugaagggggaccugguacccagugauccccaccccaggauccuaaaucaugacuuaccugcuaauaaaaacucauuggaaaagugagaagaucuaaaaaaaaaaaaaaaaaaaaaaaaaaaaaaaaaaaaaaaaaaaaaaaaaaaaaaaaaaaaaaaaugcaucccccccccccccccccccccccccccccccaaaggcucuuuucagagccaccagaauu

SEQ ID NO: 15154 - RNA, 1920 nt, Artificial Sequence
  mRNA product Design c-3 comprising derived and/or modified sequence from HRSV(Memphis-37)__AIY60640.1__F-del_DSCav1_mut2 (opt2)
gggagaguccgcucagccagguugcagaagcggcuuagcguguguccuaaucuucucucugcguguagguaggccugugccgcaaacaagcuuaccauggagcuccccauccucaagaccaacgccaucaccaccauccucgccgccgucacccucugcuucgccuccucccagaacaucaccgaggaguucuaccaguccaccugcuccgccgucuccaagggcuaccucggcgcccuccgcaccggcugguacaccuccgucaucaccaucgagcucuccaacaucaaggagaacaagugcaacggcaccgacgccaaggucaagcucaucaagcaggagcucgacaaguacaagaacgccgucaccgaccuccagcuccucaugcaguccacccccgccgccggcuccggcuccgccaucugcuccggcaucgccgucugcaagguccuccaccucgagggcgaggucaacaagaucaagaacgcccuccucuccaccaacaaggccgucgucucccucuccaacggcgucuccguccucaccuucaagguccucgaccucaagaacuacaucgacaagcagcuccuccccauccucaacaagcaguccugcuccauccccaacaucgagaccgucaucgaguuccagcagaagaacaaccgccuccucgagaucacccgcgaguucuccgucaacgccggcgucaccacccccgucuccaccuacaugcucaccaacuccgagcuccucucccucaucaacgacaugcccaucaccaacgaccagaagaagcucauguccaacaacguccagaucguccgccagcaguccuacuccaucaugugcaucaucaaggaggagguccucgccuacgucguccagcucccccucuacggcgucaucgacacccccugcuggaagcuccacaccuccccccucugcaccaccaacaccaaggagggcuccaacaucugccucacccgcaccgaccgcggcugguacugcgacaacgccggcuccgucuccuucuucccccaggccgagaccugcaagguccaguccaaccgcgucuucugcgacaccaugaacucccucacccuccccuccgaggucaaccucugcaacaucgacaucuucaaccccaaguacgacugcaagaucaugaccuccaagaccgacgucuccuccuccgucaucaccucccucggcgccaucgucuccugcuacggcaagaccaagugcaccgccuccaacaagaaccgcggcaucaucaagaccuucuccaacggcugcgacuacgucuccaacaagggcgucgacaccgucuccgucggcaacacccucuacugcgucaacaagcaggagggccagucccucuacgucaagggcgagcccaucaucaacuucuacgacccccucgucuuccccuccgacgaguucgacgccuccaucucccaggucaacgagaagaucaaccagucccucgccuucauccgcaaguccgacgagcuccuccacaacgucaacgucggcaaguccaccaccaacaucaugaucaccaccaucaucaucgucaucaucgucauccuccuccuccucaucgccgucggccucuuccucuacugcaaggcccgcugaggacuaguacuggcugcaucucccuuuccucuguccuccauccuucucccaggauggugaagggggaccugguacccagugauccccaccccaggauccuaaaucaugacuuaccugcuaauaaaaacucauuggaaaagugagaagaucuaaaaaaaaaaaaaaaaaaaaaaaaaaaaaaaaaaaaaaaaaaaaaaaaaaaaaaaaaaaaaaaaugcaucccccccccccccccccccccccccccccccaaaggcucuuuucagagccaccagaauu

SEQ ID NO: 15155 - RNA, 1920 nt, Artificial Sequence
  mRNA product Design c-3 comprising derived and/or modified sequence from HRSV(Memphis-37)__AIY60640.1__F-del_DSCav1_mut2 (opt3)
gggagaguccgcucagccagguugcagaagcggcuuagcguguguccuaaucuucucucugcguguagguaggccugugccgcaaacaagcuuaccauggagcugcccauccucaagaccaacgccauuacaacuauacuugcugcagugacgcugugcuucgccagcucccagaauaucaccgaagaguuuuaccaaucuacauguucagcggucaguaaaggcuauuugggggcuuuaagaacuggaugguacaccagcguuauuacaaucgaacuguccaacauuaaggagaauaaaugcaacgguaccgacgccaaggugaaacuaaucaagcaggaacucgauaaguauaaaaaugcaguaacugaccugcagcuucugaugcagucuacuccugccgcuggcucggggucagcaauauguagcggaaucgccgugugcaaggucuugcaccucgagggcgaggugaacaaaauuaagaaugcucugcugaguaccaacaaagccguugugucccucucuaauggugucagcguguuaacguucaagguacuggaucuuaagaacuacaucgacaaacaauugcugccaauucuaaauaagcaguccuguucaaucccgaacauagaaacuguuauugaguuucagcagaaaaauaacaggcuccuggaaaucacccgggaguucagugugaaugcgggggucacaacucccgugagcaccuauaugcuuacaaacucugagcuguugucccucauuaacgauaugccuaucaccaaugaccaaaagaaacugaugucaaacaaugugcagaucguccgccagcagagcuacaguauuaugugcauaaucaaggaagagguuuuagcauaugugguacaacugccacucuacggagugauugauacgcccuguuggaaacuucauacuucuccucugugcacaaccaacacuaaggaaggcuccaauaucuguuugacacgaaccgaccguggcugguacugcgauaacgccgggagcgucucguuuuucccacaggcugagacguguaaggugcagucuaauagaguuuucugcgacaccaugaacucccuaacacugcccucagaagugaaucucugcaacauagauauuuucaauccuaaauaugacuguaagaucaugacaaguaaaaccgaugucagcuccucugugaucacaagccugggagccauuguaucaugcuacgguaagacuaaauguaccgcaaguaacaagaauaggggcaucauuaagacauuuuccaacgggugcgacuauguuagcaauaaaggaguggacaccgucucugugggcaacacucuuuacugugucaacaagcaagagggucagucacuguaugugaaaggggagccaauaaucaauuucuacgauccguugguuuuucccagugacgaauuugaugcuagcauuucccaggugaacgagaagaucaaucagucucucgccuuuauccggaaaucggacgaacuguuacacaacguaaaugucggaaagagcacgacaaacauuaugauaaccacuaucauuaucgugauuaucguuauacugcuacuccugaucgcggugggccuuuucuuguauugcaaggcccgcugaggacuaguacuggcugcaucucccuuuccucuguccuccauccuucucccaggauggugaagggggaccugguacccagugauccccaccccaggauccuaaaucaugacuuaccugcuaauaaaaacucauuggaaaagugagaagaucuaaaaaaaaaaaaaaaaaaaaaaaaaaaaaaaaaaaaaaaaaaaaaaaaaaaaaaaaaaaaaaaaugcaucccccccccccccccccccccccccccccccaaaggcucuuuucagagccaccagaauu

SEQ ID NO: 15156 - RNA, 1920 nt, Artificial Sequence
  mRNA product Design c-3 comprising derived and/or modified sequence from HRSV(Memphis-37)__AIY60640.1__F-del_DSCav1_mut2 (opt4)
gggagaguccgcucagccagguugcagaagcggcuuagcguguguccuaaucuucucucugcguguagguaggccugugccgcaaacaagcuuaccauggagcugcccauccugaagaccaacgccaucaccaccauccuggccgccgugacccugugcuucgccagcagccagaacaucaccgaggaguucuaccagagcaccugcagcgccgugagcaagggcuaccugggcgcccugagaaccggcugguacaccagcgugaucaccaucgagcugagcaacaucaaggagaacaagugcaacggcaccgacgccaaggugaagcugaucaagcaggagcuggacaaguacaagaacgccgugaccgaccugcagcugcugaugcagagcacccccgccgccggcagcggcagcgccaucugcagcggcaucgccgugugcaaggugcugcaccuggagggcgaggugaacaagaucaagaacgcccugcugagcaccaacaaggccguggugagccugagcaacggcgugagcgugcugaccuucaaggugcuggaccugaagaacuacaucgacaagcagcugcugcccauccugaacaagcagagcugcagcauccccaacaucgagaccgugaucgaguuccagcagaagaacaacagacugcuggagaucaccagagaguucagcgugaacgccggcgugaccacccccgugagcaccuacaugcugaccaacagcgagcugcugagccugaucaacgacaugcccaucaccaacgaccagaagaagcugaugagcaacaacgugcagaucgugagacagcagagcuacagcaucaugugcaucaucaaggaggaggugcuggccuacguggugcagcugccccuguacggcgugaucgacacccccugcuggaagcugcacaccagcccccugugcaccaccaacaccaaggagggcagcaacaucugccugaccagaaccgacagaggcugguacugcgacaacgccggcagcgugagcuucuucccccaggccgagaccugcaaggugcagagcaacagaguguucugcgacaccaugaacagccugacccugcccagcgaggugaaccugugcaacaucgacaucuucaaccccaaguacgacugcaagaucaugaccagcaagaccgacgugagcagcagcgugaucaccagccugggcgccaucgugagcugcuacggcaagaccaagugcaccgccagcaacaagaacagaggcaucaucaagaccuucagcaacggcugcgacuacgugagcaacaagggcguggacaccgugagcgugggcaacacccuguacugcgugaacaagcaggagggccagagccuguacgugaagggcgagcccaucaucaacuucuacgacccccugguguuccccagcgacgaguucgacgccagcaucagccaggugaacgagaagaucaaccagagccuggccuucaucagaaagagcgacgagcugcugcacaacgugaacgugggcaagagcaccaccaacaucaugaucaccaccaucaucaucgugaucaucgugauccugcugcugcugaucgccgugggccuguuccuguacugcaaggccagaugaggacuaguacuggcugcaucucccuuuccucuguccuccauccuucucccaggauggugaagggggaccugguacccagugauccccaccccaggauccuaaaucaugacuuaccugcuaauaaaaacucauuggaaaagugagaagaucuaaaaaaaaaaaaaaaaaaaaaaaaaaaaaaaaaaaaaaaaaaaaaaaaaaaaaaaaaaaaaaaaugcaucccccccccccccccccccccccccccccccaaaggcucuuuucagagccaccagaauu

SEQ ID NO: 15157 - RNA, 1920 nt, Artificial Sequence
  mRNA product Design c-3 comprising derived and/or modified sequence from HRSV(Memphis-37)__AIY60640.1__F-del_DSCav1_mut2 (opt5)
gggagaguccgcucagccagguugcagaagcggcuuagcguguguccuaaucuucucucugcguguagguaggccugugccgcaaacaagcuuaccauggagcugcccauccucaagaccaacgccauuacaacgauccuggcugccgugacccuuugcuucgcgagcucccagaauauuacagaagaguuuuaccaaucuaccuguagcgcugucuccaaaggcuaucugggggcccucagaacaggaugguacaccucuguuaucacaauugaacugagcaacaucaaggagaauaaaugcaacggcaccgacgccaaggugaaacuuaucaagcaggaacuggauaaguauaaaaaugcugugacggaccuccagcugcugaugcaguccaccccugccgcugggucuggaagcgccauuuguuccggcaucgcggucugcaaggugcuccaccuggagggggagguuaacaaaauuaagaaugcccuucugagcacaaacaaagcuguggucucucucuccaauggagugagcguucugaccuucaaggugcuugaucugaagaacuacaucgacaaacaacuccugccgauucugaauaagcagucuuguuccauccccaacauugaaacagucaucgaguuucagcagaaaaauaaccggcuccuggaaaucacccgcgaguucagcgugaaugccggcgugacgacaccugucucuaccuauaugcuuacaaacuccgagcugcucagccugauuaacgauaugcccaucaccaaugaccaaaagaaacuuauguccaacaauguucagauugugagacagcagucuuacagcaucaugugcauuaucaaggaagaggugcuggcuuaugucgugcaacucccucuguacggcguuaucgauacccccuguuggaaacugcauacauccccucucugcacgaccaacacaaaggaagggagcaauauuugucugacccggacagaccgcggaugguacugcgauaacgccggcucuguguccuuuuucccgcaggcggagaccuguaagguccagagcaauagaguguuuugcgacacgaugaacucucuuacacugcccagcgaaguuaaucucugcaacaucgauauuuucaauccuaaauaugacuguaagaucaugaccuccaaaaccgaugugucuagcuccgucauuacaagccugggggccaucgugucuugcuacggaaagaccaaauguacagcuuccaacaagaaucggggcaucauuaagacguuuagcaacgggugcgacuaugucucuaauaaaggaguggacaccguuuccgugggcaacacacuuuacugugucaacaagcaagagggccagagccuguaugugaaaggggagcccaucauuaauuucuacgauccucucguuuuucccuccgacgaguucgaugccucuaucagccaggugaacgaaaagauuaaucagucccuggcuuuuauccgcaaaucugacgaacugcuccacaacgucaaugugggaaagagcaccacaaacauuaugaucaccacgaucauuaucgugauuaucguuauucugcuucugcucaucgccgucggccuguuccuguauugcaaggccagaugaggacuaguacuggcugcaucucccuuuccucuguccuccauccuucucccaggauggugaagggggaccugguacccagugauccccaccccaggauccuaaaucaugacuuaccugcuaauaaaaacucauuggaaaagugagaagaucuaaaaaaaaaaaaaaaaaaaaaaaaaaaaaaaaaaaaaaaaaaaaaaaaaaaaaaaaaaaaaaaaugcaucccccccccccccccccccccccccccccccaaaggcucuuuucagagccaccagaauu

SEQ ID NO: 15158 - RNA, 1920 nt, Artificial Sequence
  mRNA product Design c-3 comprising derived and/or modified sequence from HRSV(Memphis-37)__AIY60640.1__F-del_DSCav1_mut2 (opt6)
gggagaguccgcucagccagguugcagaagcggcuuagcguguguccuaaucuucucucugcguguagguaggccugugccgcaaacaagcuuaccauggaacuaccaauacucaaaacaaacgcaauaacaacaauuuuagcugcaguaacacuuuguuucgcauccucccaaaauauaacagaagaauuuuaucaaucaaccugcucagccgucuccaaaggauaucuaggugcacuacgcacuggaugguacacaagugucaucacaauagaacuuuccaacaucaaagaaaauaaauguaauggaacugacgcaaaaguaaaacucauaaaacaagaacuagacaaauacaaaaacgcaguaacagaccuacaacuauuaaugcaaucaacaccagcagcaggauccggcagugccauaugcucuggaauagcagucugcaaaguuuuacacuuagaaggcgaaguaaacaaaaucaaaaacgcccuacuaucuacaaauaaagccgucguaucucucucaaauggaguaucaguacuaacauucaaaguauuagacuuaaaaaacuacaucgauaaacaauuauugccaauauuaaacaaacaaucuugcucaauaccaaauauagaaacagucauagaauuucaacaaaaaaauaaccgauuauuagaaauaacacgagaauuuucaguaaaugccggagucaccacaccaguaucaacauacaugcuaacaaauucagaacuauuaucauuaauaaacgacaugccuauuacaaaugaucaaaaaaaacuaauguccaacaauguacaaauaguccgacaacaaagcuacucaaucauguguauaauaaaagaagaaguacuugcauacguaguacaauuaccacuauacggaguuaucgacacaccaugcuggaaacuccacacuucaccacucugcaccacaaacacaaaagaaggcucaaacauaugccuaacaagaacagaccgaggaugguacugcgacaacgcaggaucaguaucauucuucccacaagcagaaacuugcaaaguacaaucuaacagaguuuucugugacaccaugaauagccuaacacuccccuccgaaguuaaccuauguaacauagauauauuuaaucccaaauaugauugcaaaaucaugacaucuaaaaccgacguaucaucaucuguaaucacaucacuaggugccauagucucaugcuacggcaaaacaaaaugcaccgccucaaacaaaaaccgagguauaauaaaaaccuucaguaauggaugugacuacguaucaaacaaagguguugauaccguaagcgucggcaacacccuauacugcguaaauaaacaagaaggccaaucacuauacgucaaaggcgaaccaauuauuaacuucuaugacccacucgucuuucccuccgacgaauuugacgcaagcauaucacaaguaaacgaaaaaauaaaccaaucacuagcauucauacgcaaaucagaugaacuacuacauaacguaaacguaggaaaauccacuacaaauauaaugaucacaacaauaauaaucguaauuauagucauauuauuacuacuaauagcaguaggacuuuuccuauacuguaaagcaagauaaggacuaguacuggcugcaucucccuuuccucuguccuccauccuucucccaggauggugaagggggaccugguacccagugauccccaccccaggauccuaaaucaugacuuaccugcuaauaaaaacucauuggaaaagugagaagaucuaaaaaaaaaaaaaaaaaaaaaaaaaaaaaaaaaaaaaaaaaaaaaaaaaaaaaaaaaaaaaaaaugcaucccccccccccccccccccccccccccccccaaaggcucuuuucagagccaccagaauu

SEQ ID NO: 15159 - RNA, 1920 nt, Artificial Sequence
  mRNA product Design c-3 comprising derived and/or modified sequence from HRSV(Memphis-37)__AIY60640.1__F-del_DSCav1_mut2 (opt11)
gggagaguccgcucagccagguugcagaagcggcuuagcguguguccuaaucuucucucugcguguagguaggccugugccgcaaacaagcuuaccauggaacuucccauccucaagaccaacgcuauuacgaccauccucgccgcagucacccucugcuucgcgucaucccaaaacaucaccgaagaauuuuaccaauccacaugcuccgcagucucaaaaggcuaccuaggagcccuacgcaccggaugguacacauccgucaucacaaucgaacucuccaacauaaaagaaaacaaaugcaacggcaccgaugccaaaguaaaacugauuaaacaagaacucgacaaauacaagaacgccgucacagaccuacagcuccucaugcaaucaacucccgccgccggcagcggauccgcuaucugcucaggcaucgccguaugcaaaguccuccaccuagaaggcgaaguaaacaaaaucaagaacgcacuacucucaacaaacaaagccgucgucucccucuccaacggcgucuccguccuuaccuucaaaguccucgaccuuaagaacuacauugacaaacaacuccuacccauccucaacaaacaauccugcucuauaccuaauauagaaaccguaaucgaauuucaacagaaaaacaaccgccuccucgaaauuacccgcgaguucucaguaaacgccggcguaaccacccccgucuccaccuacaugcucacaaauucagaacuccucagccucaucaacgacaugcccauaaccaacgaccaaaagaaacucaugucaaacaacguccaaaucgucaggcaacaaagcuacagcaucaugugcaucauuaaagaagaaguacucgccuacgucgugcaacuaccccucuacggcgucauagacacacccugcuggaaacuucacacaucaccgcucugcaccacaaacaccaaagaaggcaguaacauaugccucacccgaaccgaccgcggaugguacugcgacaacgccggauccgucagcuucuucccacaagccgaaaccugcaaaguacaauccaaccgagucuucugcgacaccaugaacucucuuacgcuccccucagaagucaaccuaugcaacaucgacaucuucaaccccaaauacgacugcaaaaucaugaccuccaaaacagacgucuccuccucagugauaaccucccucggcgccauugucuccugcuacggcaaaaccaaaugcaccgccuccaacaaaaaccgugggaucaucaaaaccuucucaaacggcugcgacuacguauccaauaagggugucgacacagucuccguaggcaauacccucuauugcgucaacaaacaagaaggccaaucccucuacgucaaaggcgaaccuaucaucaacuucuacgacccgcuagucuuccccucagacgaguucgacgcauccaucucacaagucaacgaaaagaucaaccagucccucgcauucauccgaaaauccgacgaacuucuccacaacguuaacgucggcaaauccaccacuaacauaaugaucaccacgaucaucauaguaauuaucgucauacuccuccuccuaaucgcugucggacucuuccucuacugcaaggcccgcuaaggacuaguacuggcugcaucucccuuuccucuguccuccauccuucucccaggauggugaagggggaccugguacccagugauccccaccccaggauccuaaaucaugacuuaccugcuaauaaaaacucauuggaaaagugagaagaucuaaaaaaaaaaaaaaaaaaaaaaaaaaaaaaaaaaaaaaaaaaaaaaaaaaaaaaaaaaaaaaaaugcaucccccccccccccccccccccccccccccccaaaggcucuuuucagagccaccagaauu

SEQ ID NO: 15160 - RNA, 1916 nt, Artificial Sequence
  mRNA product Design c-4 comprising derived and/or modified sequence from HRSV(Memphis-37)__AIY60640.1__F-del_DSCav1_mut2 (opt1)
gggagaguccgcucagccagguugcagaagcggcuuagcguguguccuaaucuucucucugcguguagguaggccugugccgcaaacaagcuuaccauggagcugcccauccucaagaccaacgccaucaccacgauccuggccgcggugacccugugcuucgccagcucccagaacaucaccgaggaguucuaccagagcacgugcuccgccgucagcaagggcuaccucggcgcccugcgcaccgggugguacaccagcgugaucaccaucgagcuguccaacaucaaggagaacaagugcaacggcaccgacgccaaggugaagcucaucaagcaggagcuggacaaguacaagaacgcggucacggaccugcagcuccugaugcagagcaccccggccgccggcuccgggagcgcgaucugcuccggcaucgccgucugcaaggugcugcaccucgagggcgaggugaacaagaucaagaacgcccugcuguccaccaacaaggccgucgugagccucuccaacggggugagcguccugaccuucaaggugcuggaccucaagaacuacaucgacaagcagcugcugcccauccugaacaagcagagcugcuccauccccaacaucgagaccgucaucgaguuccagcagaagaacaaccgccuccuggagaucacgcgggaguucagcgugaacgcgggcgugaccacccccgucuccaccuacaugcugacgaacagcgagcuccugucccugaucaacgacaugccgaucaccaacgaccagaagaagcucaugagcaacaacgugcagaucgugcgccagcaguccuacagcaucaugugcaucaucaaggaggagguccuggccuacguggugcagcugccccucuacggggucaucgacacccccugcuggaagcugcacaccagcccccugugcacgaccaacaccaaggagggcuccaacaucugccucacccggacggaccgcgggugguacugcgacaacgccggcagcguguccuucuucccgcaggccgagaccugcaagguccagagcaaccggguguucugcgacaccaugaacucccugacccugcccagcgaggugaaccucugcaacaucgacaucuucaaccccaaguacgacugcaagaucaugacguccaagaccgacgucagcuccagcgugaucaccucccugggcgccaucgugagcugcuacgggaagaccaagugcacggcgagcaacaagaaccgcggcaucaucaagaccuucuccaacgggugcgacuacgucagcaacaagggcguggacaccguguccgucggcaacacccuguacugcgugaacaagcaggagggccagagccucuacgugaagggggagcccaucaucaacuucuacgacccgcuggucuuccccuccgacgaguucgacgccagcaucucccaggugaacgagaagaucaaccagagccuggccuucauccggaaguccgacgagcuccugcacaacgugaacgucggcaagagcaccacgaacaucaugaucaccaccaucaucaucgugaucaucgugauccugcugcuccugaucgccgucgggcuguuccucuacugcaaggcccgcugaggacuaguggaagcauuuuccuggcugauuaaaagaaauuacucagcuauggucaucuguuccuguuagaaggcuaugcagcauauuauauacuaugcgcauguuaugaaaugcauaauaaaaaauuuuaaaaaaucuaaaagaucuaaaaaaaaaaaaaaaaaaaaaaaaaaaaaaaaaaaaaaaaaaaaaaaaaaaaaaaaaaaaaaaaugcaucccccccccccccccccccccccccccccccaaaggcucuuuucagagccaccagaauu

SEQ ID NO: 15161 - RNA, 1916 nt, Artificial Sequence
  mRNA product Design c-4 comprising derived and/or modified sequence from HRSV(Memphis-37)__AIY60640.1__F-del_DSCav1_mut2 (opt1)
gggagaguccgcucagccagguugcagaagcggcuuagcguguguccuaaucuucucucugcguguagguaggccugugccgcaaacaagcuuaccauggagcugcccauccucaagaccaacgccaucaccacgauccuggccgcggugacccugugcuucgccagcucccagaacaucaccgaggaguucuaccagagcacgugcuccgccgucagcaagggcuaccucggggcccugcgcaccggcugguacaccuccgugaucaccaucgagcugagcaacaucaaggagaacaagugcaacgggaccgacgccaaggugaagcucaucaagcaggagcuggacaaguacaagaacgcggucacggaccugcagcuccugaugcaguccaccccggccgccggcagcggguccgccaucugcagcggcaucgcggugugcaaggugcugcaccucgagggcgaggucaacaagaucaagaacgcccugcuguccaccaacaaggccguggugagccucuccaacggggucagcgugcugaccuucaaggugcuggaccucaagaacuacaucgacaagcagcugcugcccauccucaacaagcaguccugcagcauccccaacaucgagacggucaucgaguuccagcagaagaacaaccggcugcuggagaucacccgcgaguucuccgugaacgccggcgugaccacccccgucagcacguacaugcucaccaacuccgagcugcugagccucaucaacgacaugccgaucaccaacgaccagaagaagcugaugagcaacaacgugcagaucgugcggcagcaguccuacagcaucaugugcaucaucaaggaggagguccuggccuacguggugcagcucccccuguacggggucaucgacacccccugcuggaagcugcacacgagcccccucugcaccaccaacaccaaggagggcuccaacaucugccugacgcgcaccgaccgggggugguacugcgacaacgcgggcuccgugagcuucuucccgcaggccgagaccugcaaggugcaguccaaccgcgucuucugcgacaccaugaacagccugacgcuccccuccgaggugaaccugugcaacaucgacaucuucaaccccaaguacgacugcaagaucaugaccagcaagaccgacgucuccagcuccgugaucaccagccugggcgccaucguguccugcuacgggaagacgaagugcaccgccagcaacaagaaccggggcaucaucaagaccuucuccaacgggugcgacuacgucagcaacaagggcguggacaccguguccgucggcaacacgcucuacugcgugaacaagcaggaggggcagagccuguacgugaagggcgagcccaucaucaacuucuacgacccgcuggucuuccccagcgacgaguucgacgccuccaucagccaggugaacgagaagaucaaccagucccucgcguucauccgcaagagcgacgagcugcugcacaacgugaacgucgggaaguccaccaccaacaucaugaucaccaccaucaucaucgugaucaucgugauccuccugcugcucaucgccgucggccuguuccuguacugcaaggcccggugaggacuaguggaagcauuuuccuggcugauuaaaagaaauuacucagcuauggucaucuguuccuguuagaaggcuaugcagcauauuauauacuaugcgcauguuaugaaaugcauaauaaaaaauuuuaaaaaaucuaaaagaucuaaaaaaaaaaaaaaaaaaaaaaaaaaaaaaaaaaaaaaaaaaaaaaaaaaaaaaaaaaaaaaaaugcaucccccccccccccccccccccccccccccccaaaggcucuuuucagagccaccagaauu

SEQ ID NO: 15162 - RNA, 1916 nt, Artificial Sequence
  mRNA product Design c-4 comprising derived and/or modified sequence from HRSV(Memphis-37)__AIY60640.1__F-del_DSCav1_mut2 (opt2)
gggagaguccgcucagccagguugcagaagcggcuuagcguguguccuaaucuucucucugcguguagguaggccugugccgcaaacaagcuuaccauggagcuccccauccucaagaccaacgccaucaccaccauccucgccgccgucacccucugcuucgccuccucccagaacaucaccgaggaguucuaccaguccaccugcuccgccgucuccaagggcuaccucggcgcccuccgcaccggcugguacaccuccgucaucaccaucgagcucuccaacaucaaggagaacaagugcaacggcaccgacgccaaggucaagcucaucaagcaggagcucgacaaguacaagaacgccgucaccgaccuccagcuccucaugcaguccacccccgccgccggcuccggcuccgccaucugcuccggcaucgccgucugcaagguccuccaccucgagggcgaggucaacaagaucaagaacgcccuccucuccaccaacaaggccgucgucucccucuccaacggcgucuccguccucaccuucaagguccucgaccucaagaacuacaucgacaagcagcuccuccccauccucaacaagcaguccugcuccauccccaacaucgagaccgucaucgaguuccagcagaagaacaaccgccuccucgagaucacccgcgaguucuccgucaacgccggcgucaccacccccgucuccaccuacaugcucaccaacuccgagcuccucucccucaucaacgacaugcccaucaccaacgaccagaagaagcucauguccaacaacguccagaucguccgccagcaguccuacuccaucaugugcaucaucaaggaggagguccucgccuacgucguccagcucccccucuacggcgucaucgacacccccugcuggaagcuccacaccuccccccucugcaccaccaacaccaaggagggcuccaacaucugccucacccgcaccgaccgcggcugguacugcgacaacgccggcuccgucuccuucuucccccaggccgagaccugcaagguccaguccaaccgcgucuucugcgacaccaugaacucccucacccuccccuccgaggucaaccucugcaacaucgacaucuucaaccccaaguacgacugcaagaucaugaccuccaagaccgacgucuccuccuccgucaucaccucccucggcgccaucgucuccugcuacggcaagaccaagugcaccgccuccaacaagaaccgcggcaucaucaagaccuucuccaacggcugcgacuacgucuccaacaagggcgucgacaccgucuccgucggcaacacccucuacugcgucaacaagcaggagggccagucccucuacgucaagggcgagcccaucaucaacuucuacgacccccucgucuuccccuccgacgaguucgacgccuccaucucccaggucaacgagaagaucaaccagucccucgccuucauccgcaaguccgacgagcuccuccacaacgucaacgucggcaaguccaccaccaacaucaugaucaccaccaucaucaucgucaucaucgucauccuccuccuccucaucgccgucggccucuuccucuacugcaaggcccgcugaggacuaguggaagcauuuuccuggcugauuaaaagaaauuacucagcuauggucaucuguuccuguuagaaggcuaugcagcauauuauauacuaugcgcauguuaugaaaugcauaauaaaaaauuuuaaaaaaucuaaaagaucuaaaaaaaaaaaaaaaaaaaaaaaaaaaaaaaaaaaaaaaaaaaaaaaaaaaaaaaaaaaaaaaaugcaucccccccccccccccccccccccccccccccaaaggcucuuuucagagccaccagaauu

SEQ ID NO: 15163 - RNA, 1916 nt, Artificial Sequence
  mRNA product Design c-4 comprising derived and/or modified sequence from HRSV(Memphis-37)__AIY60640.1__F-del_DSCav1_mut2 (opt3)
gggagaguccgcucagccagguugcagaagcggcuuagcguguguccuaaucuucucucugcguguagguaggccugugccgcaaacaagcuuaccauggagcugcccauccucaagaccaacgccauuacaacuauacuugcugcagugacgcugugcuucgccagcucccagaauaucaccgaagaguuuuaccaaucuacauguucagcggucaguaaaggcuauuugggggcuuuaagaacuggaugguacaccagcguuauuacaaucgaacuguccaacauuaaggagaauaaaugcaacgguaccgacgccaaggugaaacuaaucaagcaggaacucgauaaguauaaaaaugcaguaacugaccugcagcuucugaugcagucuacuccugccgcuggcucggggucagcaauauguagcggaaucgccgugugcaaggucuugcaccucgagggcgaggugaacaaaauuaagaaugcucugcugaguaccaacaaagccguugugucccucucuaauggugucagcguguuaacguucaagguacuggaucuuaagaacuacaucgacaaacaauugcugccaauucuaaauaagcaguccuguucaaucccgaacauagaaacuguuauugaguuucagcagaaaaauaacaggcuccuggaaaucacccgggaguucagugugaaugcgggggucacaacucccgugagcaccuauaugcuuacaaacucugagcuguugucccucauuaacgauaugccuaucaccaaugaccaaaagaaacugaugucaaacaaugugcagaucguccgccagcagagcuacaguauuaugugcauaaucaaggaagagguuuuagcauaugugguacaacugccacucuacggagugauugauacgcccuguuggaaacuucauacuucuccucugugcacaaccaacacuaaggaaggcuccaauaucuguuugacacgaaccgaccguggcugguacugcgauaacgccgggagcgucucguuuuucccacaggcugagacguguaaggugcagucuaauagaguuuucugcgacaccaugaacucccuaacacugcccucagaagugaaucucugcaacauagauauuuucaauccuaaauaugacuguaagaucaugacaaguaaaaccgaugucagcuccucugugaucacaagccugggagccauuguaucaugcuacgguaagacuaaauguaccgcaaguaacaagaauaggggcaucauuaagacauuuuccaacgggugcgacuauguuagcaauaaaggaguggacaccgucucugugggcaacacucuuuacugugucaacaagcaagagggucagucacuguaugugaaaggggagccaauaaucaauuucuacgauccguugguuuuucccagugacgaauuugaugcuagcauuucccaggugaacgagaagaucaaucagucucucgccuuuauccggaaaucggacgaacuguuacacaacguaaaugucggaaagagcacgacaaacauuaugauaaccacuaucauuaucgugauuaucguuauacugcuacuccugaucgcggugggccuuuucuuguauugcaaggcccgcugaggacuaguggaagcauuuuccuggcugauuaaaagaaauuacucagcuauggucaucuguuccuguuagaaggcuaugcagcauauuauauacuaugcgcauguuaugaaaugcauaauaaaaaauuuuaaaaaaucuaaaagaucuaaaaaaaaaaaaaaaaaaaaaaaaaaaaaaaaaaaaaaaaaaaaaaaaaaaaaaaaaaaaaaaaugcaucccccccccccccccccccccccccccccccaaaggcucuuuucagagccaccagaauu

SEQ ID NO: 15164 - RNA, 1916 nt, Artificial Sequence
  mRNA product Design c-4 comprising derived and/or modified sequence from HRSV(Memphis-37)__AIY60640.1__F-del_DSCav1_mut2 (opt4)
gggagaguccgcucagccagguugcagaagcggcuuagcguguguccuaaucuucucucugcguguagguaggccugugccgcaaacaagcuuaccauggagcugcccauccugaagaccaacgccaucaccaccauccuggccgccgugacccugugcuucgccagcagccagaacaucaccgaggaguucuaccagagcaccugcagcgccgugagcaagggcuaccugggcgcccugagaaccggcugguacaccagcgugaucaccaucgagcugagcaacaucaaggagaacaagugcaacggcaccgacgccaaggugaagcugaucaagcaggagcuggacaaguacaagaacgccgugaccgaccugcagcugcugaugcagagcacccccgccgccggcagcggcagcgccaucugcagcggcaucgccgugugcaaggugcugcaccuggagggcgaggugaacaagaucaagaacgcccugcugagcaccaacaaggccguggugagccugagcaacggcgugagcgugcugaccuucaaggugcuggaccugaagaacuacaucgacaagcagcugcugcccauccugaacaagcagagcugcagcauccccaacaucgagaccgugaucgaguuccagcagaagaacaacagacugcuggagaucaccagagaguucagcgugaacgccggcgugaccacccccgugagcaccuacaugcugaccaacagcgagcugcugagccugaucaacgacaugcccaucaccaacgaccagaagaagcugaugagcaacaacgugcagaucgugagacagcagagcuacagcaucaugugcaucaucaaggaggaggugcuggccuacguggugcagcugccccuguacggcgugaucgacacccccugcuggaagcugcacaccagcccccugugcaccaccaacaccaaggagggcagcaacaucugccugaccagaaccgacagaggcugguacugcgacaacgccggcagcgugagcuucuucccccaggccgagaccugcaaggugcagagcaacagaguguucugcgacaccaugaacagccugacccugcccagcgaggugaaccugugcaacaucgacaucuucaaccccaaguacgacugcaagaucaugaccagcaagaccgacgugagcagcagcgugaucaccagccugggcgccaucgugagcugcuacggcaagaccaagugcaccgccagcaacaagaacagaggcaucaucaagaccuucagcaacggcugcgacuacgugagcaacaagggcguggacaccgugagcgugggcaacacccuguacugcgugaacaagcaggagggccagagccuguacgugaagggcgagcccaucaucaacuucuacgacccccugguguuccccagcgacgaguucgacgccagcaucagccaggugaacgagaagaucaaccagagccuggccuucaucagaaagagcgacgagcugcugcacaacgugaacgugggcaagagcaccaccaacaucaugaucaccaccaucaucaucgugaucaucgugauccugcugcugcugaucgccgugggccuguuccuguacugcaaggccagaugaggacuaguggaagcauuuuccuggcugauuaaaagaaauuacucagcuauggucaucuguuccuguuagaaggcuaugcagcauauuauauacuaugcgcauguuaugaaaugcauaauaaaaaauuuuaaaaaaucuaaaagaucuaaaaaaaaaaaaaaaaaaaaaaaaaaaaaaaaaaaaaaaaaaaaaaaaaaaaaaaaaaaaaaaaugcaucccccccccccccccccccccccccccccccaaaggcucuuuucagagccaccagaauu

SEQ ID NO: 15165 - RNA, 1916 nt, Artificial Sequence
  mRNA product Design c-4 comprising derived and/or modified sequence from HRSV(Memphis-37)__AIY60640.1__F-del_DSCav1_mut2 (opt5)
gggagaguccgcucagccagguugcagaagcggcuuagcguguguccuaaucuucucucugcguguagguaggccugugccgcaaacaagcuuaccauggagcugcccauccucaagaccaacgccauuacaacgauccuggcugccgugacccuuugcuucgcgagcucccagaauauuacagaagaguuuuaccaaucuaccuguagcgcugucuccaaaggcuaucugggggcccucagaacaggaugguacaccucuguuaucacaauugaacugagcaacaucaaggagaauaaaugcaacggcaccgacgccaaggugaaacuuaucaagcaggaacuggauaaguauaaaaaugcugugacggaccuccagcugcugaugcaguccaccccugccgcugggucuggaagcgccauuuguuccggcaucgcggucugcaaggugcuccaccuggagggggagguuaacaaaauuaagaaugcccuucugagcacaaacaaagcuguggucucucucuccaauggagugagcguucugaccuucaaggugcuugaucugaagaacuacaucgacaaacaacuccugccgauucugaauaagcagucuuguuccauccccaacauugaaacagucaucgaguuucagcagaaaaauaaccggcuccuggaaaucacccgcgaguucagcgugaaugccggcgugacgacaccugucucuaccuauaugcuuacaaacuccgagcugcucagccugauuaacgauaugcccaucaccaaugaccaaaagaaacuuauguccaacaauguucagauugugagacagcagucuuacagcaucaugugcauuaucaaggaagaggugcuggcuuaugucgugcaacucccucuguacggcguuaucgauacccccuguuggaaacugcauacauccccucucugcacgaccaacacaaaggaagggagcaauauuugucugacccggacagaccgcggaugguacugcgauaacgccggcucuguguccuuuuucccgcaggcggagaccuguaagguccagagcaauagaguguuuugcgacacgaugaacucucuuacacugcccagcgaaguuaaucucugcaacaucgauauuuucaauccuaaauaugacuguaagaucaugaccuccaaaaccgaugugucuagcuccgucauuacaagccugggggccaucgugucuugcuacggaaagaccaaauguacagcuuccaacaagaaucggggcaucauuaagacguuuagcaacgggugcgacuaugucucuaauaaaggaguggacaccguuuccgugggcaacacacuuuacugugucaacaagcaagagggccagagccuguaugugaaaggggagcccaucauuaauuucuacgauccucucguuuuucccuccgacgaguucgaugccucuaucagccaggugaacgaaaagauuaaucagucccuggcuuuuauccgcaaaucugacgaacugcuccacaacgucaaugugggaaagagcaccacaaacauuaugaucaccacgaucauuaucgugauuaucguuauucugcuucugcucaucgccgucggccuguuccuguauugcaaggccagaugaggacuaguggaagcauuuuccuggcugauuaaaagaaauuacucagcuauggucaucuguuccuguuagaaggcuaugcagcauauuauauacuaugcgcauguuaugaaaugcauaauaaaaaauuuuaaaaaaucuaaaagaucuaaaaaaaaaaaaaaaaaaaaaaaaaaaaaaaaaaaaaaaaaaaaaaaaaaaaaaaaaaaaaaaaugcaucccccccccccccccccccccccccccccccaaaggcucuuuucagagccaccagaauu

SEQ ID NO: 15166 - RNA, 1916 nt, Artificial Sequence
  mRNA product Design c-4 comprising derived and/or modified sequence from HRSV(Memphis-37)__AIY60640.1__F-del_DSCav1_mut2 (opt6)
gggagaguccgcucagccagguugcagaagcggcuuagcguguguccuaaucuucucucugcguguagguaggccugugccgcaaacaagcuuaccauggaacuaccaauacucaaaacaaacgcaauaacaacaauuuuagcugcaguaacacuuuguuucgcauccucccaaaauauaacagaagaauuuuaucaaucaaccugcucagccgucuccaaaggauaucuaggugcacuacgcacuggaugguacacaagugucaucacaauagaacuuuccaacaucaaagaaaauaaauguaauggaacugacgcaaaaguaaaacucauaaaacaagaacuagacaaauacaaaaacgcaguaacagaccuacaacuauuaaugcaaucaacaccagcagcaggauccggcagugccauaugcucuggaauagcagucugcaaaguuuuacacuuagaaggcgaaguaaacaaaaucaaaaacgcccuacuaucuacaaauaaagccgucguaucucucucaaauggaguaucaguacuaacauucaaaguauuagacuuaaaaaacuacaucgauaaacaauuauugccaauauuaaacaaacaaucuugcucaauaccaaauauagaaacagucauagaauuucaacaaaaaaauaaccgauuauuagaaauaacacgagaauuuucaguaaaugccggagucaccacaccaguaucaacauacaugcuaacaaauucagaacuauuaucauuaauaaacgacaugccuauuacaaaugaucaaaaaaaacuaauguccaacaauguacaaauaguccgacaacaaagcuacucaaucauguguauaauaaaagaagaaguacuugcauacguaguacaauuaccacuauacggaguuaucgacacaccaugcuggaaacuccacacuucaccacucugcaccacaaacacaaaagaaggcucaaacauaugccuaacaagaacagaccgaggaugguacugcgacaacgcaggaucaguaucauucuucccacaagcagaaacuugcaaaguacaaucuaacagaguuuucugugacaccaugaauagccuaacacuccccuccgaaguuaaccuauguaacauagauauauuuaaucccaaauaugauugcaaaaucaugacaucuaaaaccgacguaucaucaucuguaaucacaucacuaggugccauagucucaugcuacggcaaaacaaaaugcaccgccucaaacaaaaaccgagguauaauaaaaaccuucaguaauggaugugacuacguaucaaacaaagguguugauaccguaagcgucggcaacacccuauacugcguaaauaaacaagaaggccaaucacuauacgucaaaggcgaaccaauuauuaacuucuaugacccacucgucuuucccuccgacgaauuugacgcaagcauaucacaaguaaacgaaaaaauaaaccaaucacuagcauucauacgcaaaucagaugaacuacuacauaacguaaacguaggaaaauccacuacaaauauaaugaucacaacaauaauaaucguaauuauagucauauuauuacuacuaauagcaguaggacuuuuccuauacuguaaagcaagauaaggacuaguggaagcauuuuccuggcugauuaaaagaaauuacucagcuauggucaucuguuccuguuagaaggcuaugcagcauauuauauacuaugcgcauguuaugaaaugcauaauaaaaaauuuuaaaaaaucuaaaagaucuaaaaaaaaaaaaaaaaaaaaaaaaaaaaaaaaaaaaaaaaaaaaaaaaaaaaaaaaaaaaaaaaugcaucccccccccccccccccccccccccccccccaaaggcucuuuucagagccaccagaauu

SEQ ID NO: 15167 - RNA, 1916 nt, Artificial Sequence
  mRNA product Design c-4 comprising derived and/or modified sequence from HRSV(Memphis-37)__AIY60640.1__F-del_DSCav1_mut2 (opt11)
gggagaguccgcucagccagguugcagaagcggcuuagcguguguccuaaucuucucucugcguguagguaggccugugccgcaaacaagcuuaccauggaacuucccauccucaagaccaacgcuauuacgaccauccucgccgcagucacccucugcuucgcgucaucccaaaacaucaccgaagaauuuuaccaauccacaugcuccgcagucucaaaaggcuaccuaggagcccuacgcaccggaugguacacauccgucaucacaaucgaacucuccaacauaaaagaaaacaaaugcaacggcaccgaugccaaaguaaaacugauuaaacaagaacucgacaaauacaagaacgccgucacagaccuacagcuccucaugcaaucaacucccgccgccggcagcggauccgcuaucugcucaggcaucgccguaugcaaaguccuccaccuagaaggcgaaguaaacaaaaucaagaacgcacuacucucaacaaacaaagccgucgucucccucuccaacggcgucuccguccuuaccuucaaaguccucgaccuuaagaacuacauugacaaacaacuccuacccauccucaacaaacaauccugcucuauaccuaauauagaaaccguaaucgaauuucaacagaaaaacaaccgccuccucgaaauuacccgcgaguucucaguaaacgccggcguaaccacccccgucuccaccuacaugcucacaaauucagaacuccucagccucaucaacgacaugcccauaaccaacgaccaaaagaaacucaugucaaacaacguccaaaucgucaggcaacaaagcuacagcaucaugugcaucauuaaagaagaaguacucgccuacgucgugcaacuaccccucuacggcgucauagacacacccugcuggaaacuucacacaucaccgcucugcaccacaaacaccaaagaaggcaguaacauaugccucacccgaaccgaccgcggaugguacugcgacaacgccggauccgucagcuucuucccacaagccgaaaccugcaaaguacaauccaaccgagucuucugcgacaccaugaacucucuuacgcuccccucagaagucaaccuaugcaacaucgacaucuucaaccccaaauacgacugcaaaaucaugaccuccaaaacagacgucuccuccucagugauaaccucccucggcgccauugucuccugcuacggcaaaaccaaaugcaccgccuccaacaaaaaccgugggaucaucaaaaccuucucaaacggcugcgacuacguauccaauaagggugucgacacagucuccguaggcaauacccucuauugcgucaacaaacaagaaggccaaucccucuacgucaaaggcgaaccuaucaucaacuucuacgacccgcuagucuuccccucagacgaguucgacgcauccaucucacaagucaacgaaaagaucaaccagucccucgcauucauccgaaaauccgacgaacuucuccacaacguuaacgucggcaaauccaccacuaacauaaugaucaccacgaucaucauaguaauuaucgucauacuccuccuccuaaucgcugucggacucuuccucuacugcaaggcccgcuaaggacuaguggaagcauuuuccuggcugauuaaaagaaauuacucagcuauggucaucuguuccuguuagaaggcuaugcagcauauuauauacuaugcgcauguuaugaaaugcauaauaaaaaauuuuaaaaaaucuaaaagaucuaaaaaaaaaaaaaaaaaaaaaaaaaaaaaaaaaaaaaaaaaaaaaaaaaaaaaaaaaaaaaaaaugcaucccccccccccccccccccccccccccccccaaaggcucuuuucagagccaccagaauu

SEQ ID NO: 15168 - RNA, 1834 nt, Artificial Sequence
  mRNA product Design c-5 comprising derived and/or modified sequence from HRSV(Memphis-37)__AIY60640.1__F-del_DSCav1_mut2 (opt1)
gggagagcggcucggccauuuugucccagucaguccggaggcugcggcugcagaaguaccgccugcggaguaacugcaaagaagcuuaccauggagcugcccauccucaagaccaacgccaucaccacgauccuggccgcggugacccugugcuucgccagcucccagaacaucaccgaggaguucuaccagagcacgugcuccgccgucagcaagggcuaccucggcgcccugcgcaccgggugguacaccagcgugaucaccaucgagcuguccaacaucaaggagaacaagugcaacggcaccgacgccaaggugaagcucaucaagcaggagcuggacaaguacaagaacgcggucacggaccugcagcuccugaugcagagcaccccggccgccggcuccgggagcgcgaucugcuccggcaucgccgucugcaaggugcugcaccucgagggcgaggugaacaagaucaagaacgcccugcuguccaccaacaaggccgucgugagccucuccaacggggugagcguccugaccuucaaggugcuggaccucaagaacuacaucgacaagcagcugcugcccauccugaacaagcagagcugcuccauccccaacaucgagaccgucaucgaguuccagcagaagaacaaccgccuccuggagaucacgcgggaguucagcgugaacgcgggcgugaccacccccgucuccaccuacaugcugacgaacagcgagcuccugucccugaucaacgacaugccgaucaccaacgaccagaagaagcucaugagcaacaacgugcagaucgugcgccagcaguccuacagcaucaugugcaucaucaaggaggagguccuggccuacguggugcagcugccccucuacggggucaucgacacccccugcuggaagcugcacaccagcccccugugcacgaccaacaccaaggagggcuccaacaucugccucacccggacggaccgcgggugguacugcgacaacgccggcagcguguccuucuucccgcaggccgagaccugcaagguccagagcaaccggguguucugcgacaccaugaacucccugacccugcccagcgaggugaaccucugcaacaucgacaucuucaaccccaaguacgacugcaagaucaugacguccaagaccgacgucagcuccagcgugaucaccucccugggcgccaucgugagcugcuacgggaagaccaagugcacggcgagcaacaagaaccgcggcaucaucaagaccuucuccaacgggugcgacuacgucagcaacaagggcguggacaccguguccgucggcaacacccuguacugcgugaacaagcaggagggccagagccucuacgugaagggggagcccaucaucaacuucuacgacccgcuggucuuccccuccgacgaguucgacgccagcaucucccaggugaacgagaagaucaaccagagccuggccuucauccggaaguccgacgagcuccugcacaacgugaacgucggcaagagcaccacgaacaucaugaucaccaccaucaucaucgugaucaucgugauccugcugcuccugaucgccgucgggcuguuccucuacugcaaggcccgcugaggacuagucccuguucccagagcccacuuuuuuuucuuuuuuugaaauaaaauagccugucuuucagaucuaaaaaaaaaaaaaaaaaaaaaaaaaaaaaaaaaaaaaaaaaaaaaaaaaaaaaaaaaaaaaaaaugcaucccccccccccccccccccccccccccccccaaaggcucuuuucagagccaccagaauu

SEQ ID NO: 15169 - RNA, 1834 nt, Artificial Sequence
  mRNA product Design c-5 comprising derived and/or modified sequence from HRSV(Memphis-37)__AIY60640.1__F-del_DSCav1_mut2 (opt1)
gggagagcggcucggccauuuugucccagucaguccggaggcugcggcugcagaaguaccgccugcggaguaacugcaaagaagcuuaccauggagcugcccauccucaagaccaacgccaucaccacgauccuggccgcggugacccugugcuucgccagcucccagaacaucaccgaggaguucuaccagagcacgugcuccgccgucagcaagggcuaccucggggcccugcgcaccggcugguacaccuccgugaucaccaucgagcugagcaacaucaaggagaacaagugcaacgggaccgacgccaaggugaagcucaucaagcaggagcuggacaaguacaagaacgcggucacggaccugcagcuccugaugcaguccaccccggccgccggcagcggguccgccaucugcagcggcaucgcggugugcaaggugcugcaccucgagggcgaggucaacaagaucaagaacgcccugcuguccaccaacaaggccguggugagccucuccaacggggucagcgugcugaccuucaaggugcuggaccucaagaacuacaucgacaagcagcugcugcccauccucaacaagcaguccugcagcauccccaacaucgagacggucaucgaguuccagcagaagaacaaccggcugcuggagaucacccgcgaguucuccgugaacgccggcgugaccacccccgucagcacguacaugcucaccaacuccgagcugcugagccucaucaacgacaugccgaucaccaacgaccagaagaagcugaugagcaacaacgugcagaucgugcggcagcaguccuacagcaucaugugcaucaucaaggaggagguccuggccuacguggugcagcucccccuguacggggucaucgacacccccugcuggaagcugcacacgagcccccucugcaccaccaacaccaaggagggcuccaacaucugccugacgcgcaccgaccgggggugguacugcgacaacgcgggcuccgugagcuucuucccgcaggccgagaccugcaaggugcaguccaaccgcgucuucugcgacaccaugaacagccugacgcuccccuccgaggugaaccugugcaacaucgacaucuucaaccccaaguacgacugcaagaucaugaccagcaagaccgacgucuccagcuccgugaucaccagccugggcgccaucguguccugcuacgggaagacgaagugcaccgccagcaacaagaaccggggcaucaucaagaccuucuccaacgggugcgacuacgucagcaacaagggcguggacaccguguccgucggcaacacgcucuacugcgugaacaagcaggaggggcagagccuguacgugaagggcgagcccaucaucaacuucuacgacccgcuggucuuccccagcgacgaguucgacgccuccaucagccaggugaacgagaagaucaaccagucccucgcguucauccgcaagagcgacgagcugcugcacaacgugaacgucgggaaguccaccaccaacaucaugaucaccaccaucaucaucgugaucaucgugauccuccugcugcucaucgccgucggccuguuccuguacugcaaggcccggugaggacuagucccuguucccagagcccacuuuuuuuucuuuuuuugaaauaaaauagccugucuuucagaucuaaaaaaaaaaaaaaaaaaaaaaaaaaaaaaaaaaaaaaaaaaaaaaaaaaaaaaaaaaaaaaaaugcaucccccccccccccccccccccccccccccccaaaggcucuuuucagagccaccagaauu

SEQ ID NO: 15170 - RNA, 1834 nt, Artificial Sequence
  mRNA product Design c-5 comprising derived and/or modified sequence from HRSV(Memphis-37)__AIY60640.1__F-del_DSCav1_mut2 (opt2)
gggagagcggcucggccauuuugucccagucaguccggaggcugcggcugcagaaguaccgccugcggaguaacugcaaagaagcuuaccauggagcuccccauccucaagaccaacgccaucaccaccauccucgccgccgucacccucugcuucgccuccucccagaacaucaccgaggaguucuaccaguccaccugcuccgccgucuccaagggcuaccucggcgcccuccgcaccggcugguacaccuccgucaucaccaucgagcucuccaacaucaaggagaacaagugcaacggcaccgacgccaaggucaagcucaucaagcaggagcucgacaaguacaagaacgccgucaccgaccuccagcuccucaugcaguccacccccgccgccggcuccggcuccgccaucugcuccggcaucgccgucugcaagguccuccaccucgagggcgaggucaacaagaucaagaacgcccuccucuccaccaacaaggccgucgucucccucuccaacggcgucuccguccucaccuucaagguccucgaccucaagaacuacaucgacaagcagcuccuccccauccucaacaagcaguccugcuccauccccaacaucgagaccgucaucgaguuccagcagaagaacaaccgccuccucgagaucacccgcgaguucuccgucaacgccggcgucaccacccccgucuccaccuacaugcucaccaacuccgagcuccucucccucaucaacgacaugcccaucaccaacgaccagaagaagcucauguccaacaacguccagaucguccgccagcaguccuacuccaucaugugcaucaucaaggaggagguccucgccuacgucguccagcucccccucuacggcgucaucgacacccccugcuggaagcuccacaccuccccccucugcaccaccaacaccaaggagggcuccaacaucugccucacccgcaccgaccgcggcugguacugcgacaacgccggcuccgucuccuucuucccccaggccgagaccugcaagguccaguccaaccgcgucuucugcgacaccaugaacucccucacccuccccuccgaggucaaccucugcaacaucgacaucuucaaccccaaguacgacugcaagaucaugaccuccaagaccgacgucuccuccuccgucaucaccucccucggcgccaucgucuccugcuacggcaagaccaagugcaccgccuccaacaagaaccgcggcaucaucaagaccuucuccaacggcugcgacuacgucuccaacaagggcgucgacaccgucuccgucggcaacacccucuacugcgucaacaagcaggagggccagucccucuacgucaagggcgagcccaucaucaacuucuacgacccccucgucuuccccuccgacgaguucgacgccuccaucucccaggucaacgagaagaucaaccagucccucgccuucauccgcaaguccgacgagcuccuccacaacgucaacgucggcaaguccaccaccaacaucaugaucaccaccaucaucaucgucaucaucgucauccuccuccuccucaucgccgucggccucuuccucuacugcaaggcccgcugaggacuagucccuguucccagagcccacuuuuuuuucuuuuuuugaaauaaaauagccugucuuucagaucuaaaaaaaaaaaaaaaaaaaaaaaaaaaaaaaaaaaaaaaaaaaaaaaaaaaaaaaaaaaaaaaaugcaucccccccccccccccccccccccccccccccaaaggcucuuuucagagccaccagaauu

SEQ ID NO: 15171 - RNA, 1834 nt, Artificial Sequence
  mRNA product Design c-5 comprising derived and/or modified sequence from HRSV(Memphis-37)__AIY60640.1__F-del_DSCav1_mut2 (opt3)
gggagagcggcucggccauuuugucccagucaguccggaggcugcggcugcagaaguaccgccugcggaguaacugcaaagaagcuuaccauggagcugcccauccucaagaccaacgccauuacaacuauacuugcugcagugacgcugugcuucgccagcucccagaauaucaccgaagaguuuuaccaaucuacauguucagcggucaguaaaggcuauuugggggcuuuaagaacuggaugguacaccagcguuauuacaaucgaacuguccaacauuaaggagaauaaaugcaacgguaccgacgccaaggugaaacuaaucaagcaggaacucgauaaguauaaaaaugcaguaacugaccugcagcuucugaugcagucuacuccugccgcuggcucggggucagcaauauguagcggaaucgccgugugcaaggucuugcaccucgagggcgaggugaacaaaauuaagaaugcucugcugaguaccaacaaagccguugugucccucucuaauggugucagcguguuaacguucaagguacuggaucuuaagaacuacaucgacaaacaauugcugccaauucuaaauaagcaguccuguucaaucccgaacauagaaacuguuauugaguuucagcagaaaaauaacaggcuccuggaaaucacccgggaguucagugugaaugcgggggucacaacucccgugagcaccuauaugcuuacaaacucugagcuguugucccucauuaacgauaugccuaucaccaaugaccaaaagaaacugaugucaaacaaugugcagaucguccgccagcagagcuacaguauuaugugcauaaucaaggaagagguuuuagcauaugugguacaacugccacucuacggagugauugauacgcccuguuggaaacuucauacuucuccucugugcacaaccaacacuaaggaaggcuccaauaucuguuugacacgaaccgaccguggcugguacugcgauaacgccgggagcgucucguuuuucccacaggcugagacguguaaggugcagucuaauagaguuuucugcgacaccaugaacucccuaacacugcccucagaagugaaucucugcaacauagauauuuucaauccuaaauaugacuguaagaucaugacaaguaaaaccgaugucagcuccucugugaucacaagccugggagccauuguaucaugcuacgguaagacuaaauguaccgcaaguaacaagaauaggggcaucauuaagacauuuuccaacgggugcgacuauguuagcaauaaaggaguggacaccgucucugugggcaacacucuuuacugugucaacaagcaagagggucagucacuguaugugaaaggggagccaauaaucaauuucuacgauccguugguuuuucccagugacgaauuugaugcuagcauuucccaggugaacgagaagaucaaucagucucucgccuuuauccggaaaucggacgaacuguuacacaacguaaaugucggaaagagcacgacaaacauuaugauaaccacuaucauuaucgugauuaucguuauacugcuacuccugaucgcggugggccuuuucuuguauugcaaggcccgcugaggacuagucccuguucccagagcccacuuuuuuuucuuuuuuugaaauaaaauagccugucuuucagaucuaaaaaaaaaaaaaaaaaaaaaaaaaaaaaaaaaaaaaaaaaaaaaaaaaaaaaaaaaaaaaaaaugcaucccccccccccccccccccccccccccccccaaaggcucuuuucagagccaccagaauu

SEQ ID NO: 15172 - RNA, 1834 nt, Artificial Sequence
  mRNA product Design c-5 comprising derived and/or modified sequence from HRSV(Memphis-37)__AIY60640.1__F-del_DSCav1_mut2 (opt4)
gggagagcggcucggccauuuugucccagucaguccggaggcugcggcugcagaaguaccgccugcggaguaacugcaaagaagcuuaccauggagcugcccauccugaagaccaacgccaucaccaccauccuggccgccgugacccugugcuucgccagcagccagaacaucaccgaggaguucuaccagagcaccugcagcgccgugagcaagggcuaccugggcgcccugagaaccggcugguacaccagcgugaucaccaucgagcugagcaacaucaaggagaacaagugcaacggcaccgacgccaaggugaagcugaucaagcaggagcuggacaaguacaagaacgccgugaccgaccugcagcugcugaugcagagcacccccgccgccggcagcggcagcgccaucugcagcggcaucgccgugugcaaggugcugcaccuggagggcgaggugaacaagaucaagaacgcccugcugagcaccaacaaggccguggugagccugagcaacggcgugagcgugcugaccuucaaggugcuggaccugaagaacuacaucgacaagcagcugcugcccauccugaacaagcagagcugcagcauccccaacaucgagaccgugaucgaguuccagcagaagaacaacagacugcuggagaucaccagagaguucagcgugaacgccggcgugaccacccccgugagcaccuacaugcugaccaacagcgagcugcugagccugaucaacgacaugcccaucaccaacgaccagaagaagcugaugagcaacaacgugcagaucgugagacagcagagcuacagcaucaugugcaucaucaaggaggaggugcuggccuacguggugcagcugccccuguacggcgugaucgacacccccugcuggaagcugcacaccagcccccugugcaccaccaacaccaaggagggcagcaacaucugccugaccagaaccgacagaggcugguacugcgacaacgccggcagcgugagcuucuucccccaggccgagaccugcaaggugcagagcaacagaguguucugcgacaccaugaacagccugacccugcccagcgaggugaaccugugcaacaucgacaucuucaaccccaaguacgacugcaagaucaugaccagcaagaccgacgugagcagcagcgugaucaccagccugggcgccaucgugagcugcuacggcaagaccaagugcaccgccagcaacaagaacagaggcaucaucaagaccuucagcaacggcugcgacuacgugagcaacaagggcguggacaccgugagcgugggcaacacccuguacugcgugaacaagcaggagggccagagccuguacgugaagggcgagcccaucaucaacuucuacgacccccugguguuccccagcgacgaguucgacgccagcaucagccaggugaacgagaagaucaaccagagccuggccuucaucagaaagagcgacgagcugcugcacaacgugaacgugggcaagagcaccaccaacaucaugaucaccaccaucaucaucgugaucaucgugauccugcugcugcugaucgccgugggccuguuccuguacugcaaggccagaugaggacuagucccuguucccagagcccacuuuuuuuucuuuuuuugaaauaaaauagccugucuuucagaucuaaaaaaaaaaaaaaaaaaaaaaaaaaaaaaaaaaaaaaaaaaaaaaaaaaaaaaaaaaaaaaaaugcaucccccccccccccccccccccccccccccccaaaggcucuuuucagagccaccagaauu

SEQ ID NO: 15173 - RNA, 1834 nt, Artificial Sequence
  mRNA product Design c-5 comprising derived and/or modified sequence from HRSV(Memphis-37)__AIY60640.1__F-del_DSCav1_mut2 (opt5)
gggagagcggcucggccauuuugucccagucaguccggaggcugcggcugcagaaguaccgccugcggaguaacugcaaagaagcuuaccauggagcugcccauccucaagaccaacgccauuacaacgauccuggcugccgugacccuuugcuucgcgagcucccagaauauuacagaagaguuuuaccaaucuaccuguagcgcugucuccaaaggcuaucugggggcccucagaacaggaugguacaccucuguuaucacaauugaacugagcaacaucaaggagaauaaaugcaacggcaccgacgccaaggugaaacuuaucaagcaggaacuggauaaguauaaaaaugcugugacggaccuccagcugcugaugcaguccaccccugccgcugggucuggaagcgccauuuguuccggcaucgcggucugcaaggugcuccaccuggagggggagguuaacaaaauuaagaaugcccuucugagcacaaacaaagcuguggucucucucuccaauggagugagcguucugaccuucaaggugcuugaucugaagaacuacaucgacaaacaacuccugccgauucugaauaagcagucuuguuccauccccaacauugaaacagucaucgaguuucagcagaaaaauaaccggcuccuggaaaucacccgcgaguucagcgugaaugccggcgugacgacaccugucucuaccuauaugcuuacaaacuccgagcugcucagccugauuaacgauaugcccaucaccaaugaccaaaagaaacuuauguccaacaauguucagauugugagacagcagucuuacagcaucaugugcauuaucaaggaagaggugcuggcuuaugucgugcaacucccucuguacggcguuaucgauacccccuguuggaaacugcauacauccccucucugcacgaccaacacaaaggaagggagcaauauuugucugacccggacagaccgcggaugguacugcgauaacgccggcucuguguccuuuuucccgcaggcggagaccuguaagguccagagcaauagaguguuuugcgacacgaugaacucucuuacacugcccagcgaaguuaaucucugcaacaucgauauuuucaauccuaaauaugacuguaagaucaugaccuccaaaaccgaugugucuagcuccgucauuacaagccugggggccaucgugucuugcuacggaaagaccaaauguacagcuuccaacaagaaucggggcaucauuaagacguuuagcaacgggugcgacuaugucucuaauaaaggaguggacaccguuuccgugggcaacacacuuuacugugucaacaagcaagagggccagagccuguaugugaaaggggagcccaucauuaauuucuacgauccucucguuuuucccuccgacgaguucgaugccucuaucagccaggugaacgaaaagauuaaucagucccuggcuuuuauccgcaaaucugacgaacugcuccacaacgucaaugugggaaagagcaccacaaacauuaugaucaccacgaucauuaucgugauuaucguuauucugcuucugcucaucgccgucggccuguuccuguauugcaaggccagaugaggacuagucccuguucccagagcccacuuuuuuuucuuuuuuugaaauaaaauagccugucuuucagaucuaaaaaaaaaaaaaaaaaaaaaaaaaaaaaaaaaaaaaaaaaaaaaaaaaaaaaaaaaaaaaaaaugcaucccccccccccccccccccccccccccccccaaaggcucuuuucagagccaccagaauu

SEQ ID NO: 15174 - RNA, 1834 nt, Artificial Sequence
  mRNA product Design c-5 comprising derived and/or modified sequence from HRSV(Memphis-37)__AIY60640.1__F-del_DSCav1_mut2 (opt6)
gggagagcggcucggccauuuugucccagucaguccggaggcugcggcugcagaaguaccgccugcggaguaacugcaaagaagcuuaccauggaacuaccaauacucaaaacaaacgcaauaacaacaauuuuagcugcaguaacacuuuguuucgcauccucccaaaauauaacagaagaauuuuaucaaucaaccugcucagccgucuccaaaggauaucuaggugcacuacgcacuggaugguacacaagugucaucacaauagaacuuuccaacaucaaagaaaauaaauguaauggaacugacgcaaaaguaaaacucauaaaacaagaacuagacaaauacaaaaacgcaguaacagaccuacaacuauuaaugcaaucaacaccagcagcaggauccggcagugccauaugcucuggaauagcagucugcaaaguuuuacacuuagaaggcgaaguaaacaaaaucaaaaacgcccuacuaucuacaaauaaagccgucguaucucucucaaauggaguaucaguacuaacauucaaaguauuagacuuaaaaaacuacaucgauaaacaauuauugccaauauuaaacaaacaaucuugcucaauaccaaauauagaaacagucauagaauuucaacaaaaaaauaaccgauuauuagaaauaacacgagaauuuucaguaaaugccggagucaccacaccaguaucaacauacaugcuaacaaauucagaacuauuaucauuaauaaacgacaugccuauuacaaaugaucaaaaaaaacuaauguccaacaauguacaaauaguccgacaacaaagcuacucaaucauguguauaauaaaagaagaaguacuugcauacguaguacaauuaccacuauacggaguuaucgacacaccaugcuggaaacuccacacuucaccacucugcaccacaaacacaaaagaaggcucaaacauaugccuaacaagaacagaccgaggaugguacugcgacaacgcaggaucaguaucauucuucccacaagcagaaacuugcaaaguacaaucuaacagaguuuucugugacaccaugaauagccuaacacuccccuccgaaguuaaccuauguaacauagauauauuuaaucccaaauaugauugcaaaaucaugacaucuaaaaccgacguaucaucaucuguaaucacaucacuaggugccauagucucaugcuacggcaaaacaaaaugcaccgccucaaacaaaaaccgagguauaauaaaaaccuucaguaauggaugugacuacguaucaaacaaagguguugauaccguaagcgucggcaacacccuauacugcguaaauaaacaagaaggccaaucacuauacgucaaaggcgaaccaauuauuaacuucuaugacccacucgucuuucccuccgacgaauuugacgcaagcauaucacaaguaaacgaaaaaauaaaccaaucacuagcauucauacgcaaaucagaugaacuacuacauaacguaaacguaggaaaauccacuacaaauauaaugaucacaacaauaauaaucguaauuauagucauauuauuacuacuaauagcaguaggacuuuuccuauacuguaaagcaagauaaggacuagucccuguucccagagcccacuuuuuuuucuuuuuuugaaauaaaauagccugucuuucagaucuaaaaaaaaaaaaaaaaaaaaaaaaaaaaaaaaaaaaaaaaaaaaaaaaaaaaaaaaaaaaaaaaugcaucccccccccccccccccccccccccccccccaaaggcucuuuucagagccaccagaauu

SEQ ID NO: 15175 - RNA, 1834 nt, Artificial Sequence
  mRNA product Design c-5 comprising derived and/or modified sequence from HRSV(Memphis-37)__AIY60640.1__F-del_DSCav1_mut2 (opt11)
gggagagcggcucggccauuuugucccagucaguccggaggcugcggcugcagaaguaccgccugcggaguaacugcaaagaagcuuaccauggaacuucccauccucaagaccaacgcuauuacgaccauccucgccgcagucacccucugcuucgcgucaucccaaaacaucaccgaagaauuuuaccaauccacaugcuccgcagucucaaaaggcuaccuaggagcccuacgcaccggaugguacacauccgucaucacaaucgaacucuccaacauaaaagaaaacaaaugcaacggcaccgaugccaaaguaaaacugauuaaacaagaacucgacaaauacaagaacgccgucacagaccuacagcuccucaugcaaucaacucccgccgccggcagcggauccgcuaucugcucaggcaucgccguaugcaaaguccuccaccuagaaggcgaaguaaacaaaaucaagaacgcacuacucucaacaaacaaagccgucgucucccucuccaacggcgucuccguccuuaccuucaaaguccucgaccuuaagaacuacauugacaaacaacuccuacccauccucaacaaacaauccugcucuauaccuaauauagaaaccguaaucgaauuucaacagaaaaacaaccgccuccucgaaauuacccgcgaguucucaguaaacgccggcguaaccacccccgucuccaccuacaugcucacaaauucagaacuccucagccucaucaacgacaugcccauaaccaacgaccaaaagaaacucaugucaaacaacguccaaaucgucaggcaacaaagcuacagcaucaugugcaucauuaaagaagaaguacucgccuacgucgugcaacuaccccucuacggcgucauagacacacccugcuggaaacuucacacaucaccgcucugcaccacaaacaccaaagaaggcaguaacauaugccucacccgaaccgaccgcggaugguacugcgacaacgccggauccgucagcuucuucccacaagccgaaaccugcaaaguacaauccaaccgagucuucugcgacaccaugaacucucuuacgcuccccucagaagucaaccuaugcaacaucgacaucuucaaccccaaauacgacugcaaaaucaugaccuccaaaacagacgucuccuccucagugauaaccucccucggcgccauugucuccugcuacggcaaaaccaaaugcaccgccuccaacaaaaaccgugggaucaucaaaaccuucucaaacggcugcgacuacguauccaauaagggugucgacacagucuccguaggcaauacccucuauugcgucaacaaacaagaaggccaaucccucuacgucaaaggcgaaccuaucaucaacuucuacgacccgcuagucuuccccucagacgaguucgacgcauccaucucacaagucaacgaaaagaucaaccagucccucgcauucauccgaaaauccgacgaacuucuccacaacguuaacgucggcaaauccaccacuaacauaaugaucaccacgaucaucauaguaauuaucgucauacuccuccuccuaaucgcugucggacucuuccucuacugcaaggcccgcuaaggacuagucccuguucccagagcccacuuuuuuuucuuuuuuugaaauaaaauagccugucuuucagaucuaaaaaaaaaaaaaaaaaaaaaaaaaaaaaaaaaaaaaaaaaaaaaaaaaaaaaaaaaaaaaaaaugcaucccccccccccccccccccccccccccccccaaaggcucuuuucagagccaccagaauu

SEQ ID NO: 15176 - RNA, 1843 nt, Artificial Sequence
  mRNA product Design d-1 comprising derived and/or modified sequence from HRSV(Memphis-37)__AIY60640.1__F-del_DSCav1_mut2 (opt1)
gggagacccgugacccggaaguuguacggcuacgcgacuuucccucccacaaacccucgcgcccuuccuuuccuacuugggcccggcagaaagcuuaccauggagcugcccauccucaagaccaacgccaucaccacgauccuggccgcggugacccugugcuucgccagcucccagaacaucaccgaggaguucuaccagagcacgugcuccgccgucagcaagggcuaccucggcgcccugcgcaccgggugguacaccagcgugaucaccaucgagcuguccaacaucaaggagaacaagugcaacggcaccgacgccaaggugaagcucaucaagcaggagcuggacaaguacaagaacgcggucacggaccugcagcuccugaugcagagcaccccggccgccggcuccgggagcgcgaucugcuccggcaucgccgucugcaaggugcugcaccucgagggcgaggugaacaagaucaagaacgcccugcuguccaccaacaaggccgucgugagccucuccaacggggugagcguccugaccuucaaggugcuggaccucaagaacuacaucgacaagcagcugcugcccauccugaacaagcagagcugcuccauccccaacaucgagaccgucaucgaguuccagcagaagaacaaccgccuccuggagaucacgcgggaguucagcgugaacgcgggcgugaccacccccgucuccaccuacaugcugacgaacagcgagcuccugucccugaucaacgacaugccgaucaccaacgaccagaagaagcucaugagcaacaacgugcagaucgugcgccagcaguccuacagcaucaugugcaucaucaaggaggagguccuggccuacguggugcagcugccccucuacggggucaucgacacccccugcuggaagcugcacaccagcccccugugcacgaccaacaccaaggagggcuccaacaucugccucacccggacggaccgcgggugguacugcgacaacgccggcagcguguccuucuucccgcaggccgagaccugcaagguccagagcaaccggguguucugcgacaccaugaacucccugacccugcccagcgaggugaaccucugcaacaucgacaucuucaaccccaaguacgacugcaagaucaugacguccaagaccgacgucagcuccagcgugaucaccucccugggcgccaucgugagcugcuacgggaagaccaagugcacggcgagcaacaagaaccgcggcaucaucaagaccuucuccaacgggugcgacuacgucagcaacaagggcguggacaccguguccgucggcaacacccuguacugcgugaacaagcaggagggccagagccucuacgugaagggggagcccaucaucaacuucuacgacccgcuggucuuccccuccgacgaguucgacgccagcaucucccaggugaacgagaagaucaaccagagccuggccuucauccggaaguccgacgagcuccugcacaacgugaacgucggcaagagcaccacgaacaucaugaucaccaccaucaucaucgugaucaucgugauccugcugcuccugaucgccgucgggcuguuccucuacugcaaggcccgcugaggacuagucccuguucccagagcccacuuuuuuuucuuuuuuugaaauaaaauagccugucuuucagaucuaaaaaaaaaaaaaaaaaaaaaaaaaaaaaaaaaaaaaaaaaaaaaaaaaaaaaaaaaaaaaaaaugcaucccccccccccccccccccccccccccccccaaaggcucuuuucagagccaccagaauu

SEQ ID NO: 15177 - RNA, 1843 nt, Artificial Sequence
  mRNA product Design d-1 comprising derived and/or modified sequence from HRSV(Memphis-37)__AIY60640.1__F-del_DSCav1_mut2 (opt1)
gggagacccgugacccggaaguuguacggcuacgcgacuuucccucccacaaacccucgcgcccuuccuuuccuacuugggcccggcagaaagcuuaccauggagcugcccauccucaagaccaacgccaucaccacgauccuggccgcggugacccugugcuucgccagcucccagaacaucaccgaggaguucuaccagagcacgugcuccgccgucagcaagggcuaccucggggcccugcgcaccggcugguacaccuccgugaucaccaucgagcugagcaacaucaaggagaacaagugcaacgggaccgacgccaaggugaagcucaucaagcaggagcuggacaaguacaagaacgcggucacggaccugcagcuccugaugcaguccaccccggccgccggcagcggguccgccaucugcagcggcaucgcggugugcaaggugcugcaccucgagggcgaggucaacaagaucaagaacgcccugcuguccaccaacaaggccguggugagccucuccaacggggucagcgugcugaccuucaaggugcuggaccucaagaacuacaucgacaagcagcugcugcccauccucaacaagcaguccugcagcauccccaacaucgagacggucaucgaguuccagcagaagaacaaccggcugcuggagaucacccgcgaguucuccgugaacgccggcgugaccacccccgucagcacguacaugcucaccaacuccgagcugcugagccucaucaacgacaugccgaucaccaacgaccagaagaagcugaugagcaacaacgugcagaucgugcggcagcaguccuacagcaucaugugcaucaucaaggaggagguccuggccuacguggugcagcucccccuguacggggucaucgacacccccugcuggaagcugcacacgagcccccucugcaccaccaacaccaaggagggcuccaacaucugccugacgcgcaccgaccgggggugguacugcgacaacgcgggcuccgugagcuucuucccgcaggccgagaccugcaaggugcaguccaaccgcgucuucugcgacaccaugaacagccugacgcuccccuccgaggugaaccugugcaacaucgacaucuucaaccccaaguacgacugcaagaucaugaccagcaagaccgacgucuccagcuccgugaucaccagccugggcgccaucguguccugcuacgggaagacgaagugcaccgccagcaacaagaaccggggcaucaucaagaccuucuccaacgggugcgacuacgucagcaacaagggcguggacaccguguccgucggcaacacgcucuacugcgugaacaagcaggaggggcagagccuguacgugaagggcgagcccaucaucaacuucuacgacccgcuggucuuccccagcgacgaguucgacgccuccaucagccaggugaacgagaagaucaaccagucccucgcguucauccgcaagagcgacgagcugcugcacaacgugaacgucgggaaguccaccaccaacaucaugaucaccaccaucaucaucgugaucaucgugauccuccugcugcucaucgccgucggccuguuccuguacugcaaggcccggugaggacuagucccuguucccagagcccacuuuuuuuucuuuuuuugaaauaaaauagccugucuuucagaucuaaaaaaaaaaaaaaaaaaaaaaaaaaaaaaaaaaaaaaaaaaaaaaaaaaaaaaaaaaaaaaaaugcaucccccccccccccccccccccccccccccccaaaggcucuuuucagagccaccagaauu

SEQ ID NO: 15178 - RNA, 1843 nt, Artificial Sequence
  mRNA product Design d-1 comprising derived and/or modified sequence from HRSV(Memphis-37)__AIY60640.1__F-del_DSCav1_mut2 (opt2)
gggagacccgugacccggaaguuguacggcuacgcgacuuucccucccacaaacccucgcgcccuuccuuuccuacuugggcccggcagaaagcuuaccauggagcuccccauccucaagaccaacgccaucaccaccauccucgccgccgucacccucugcuucgccuccucccagaacaucaccgaggaguucuaccaguccaccugcuccgccgucuccaagggcuaccucggcgcccuccgcaccggcugguacaccuccgucaucaccaucgagcucuccaacaucaaggagaacaagugcaacggcaccgacgccaaggucaagcucaucaagcaggagcucgacaaguacaagaacgccgucaccgaccuccagcuccucaugcaguccacccccgccgccggcuccggcuccgccaucugcuccggcaucgccgucugcaagguccuccaccucgagggcgaggucaacaagaucaagaacgcccuccucuccaccaacaaggccgucgucucccucuccaacggcgucuccguccucaccuucaagguccucgaccucaagaacuacaucgacaagcagcuccuccccauccucaacaagcaguccugcuccauccccaacaucgagaccgucaucgaguuccagcagaagaacaaccgccuccucgagaucacccgcgaguucuccgucaacgccggcgucaccacccccgucuccaccuacaugcucaccaacuccgagcuccucucccucaucaacgacaugcccaucaccaacgaccagaagaagcucauguccaacaacguccagaucguccgccagcaguccuacuccaucaugugcaucaucaaggaggagguccucgccuacgucguccagcucccccucuacggcgucaucgacacccccugcuggaagcuccacaccuccccccucugcaccaccaacaccaaggagggcuccaacaucugccucacccgcaccgaccgcggcugguacugcgacaacgccggcuccgucuccuucuucccccaggccgagaccugcaagguccaguccaaccgcgucuucugcgacaccaugaacucccucacccuccccuccgaggucaaccucugcaacaucgacaucuucaaccccaaguacgacugcaagaucaugaccuccaagaccgacgucuccuccuccgucaucaccucccucggcgccaucgucuccugcuacggcaagaccaagugcaccgccuccaacaagaaccgcggcaucaucaagaccuucuccaacggcugcgacuacgucuccaacaagggcgucgacaccgucuccgucggcaacacccucuacugcgucaacaagcaggagggccagucccucuacgucaagggcgagcccaucaucaacuucuacgacccccucgucuuccccuccgacgaguucgacgccuccaucucccaggucaacgagaagaucaaccagucccucgccuucauccgcaaguccgacgagcuccuccacaacgucaacgucggcaaguccaccaccaacaucaugaucaccaccaucaucaucgucaucaucgucauccuccuccuccucaucgccgucggccucuuccucuacugcaaggcccgcugaggacuagucccuguucccagagcccacuuuuuuuucuuuuuuugaaauaaaauagccugucuuucagaucuaaaaaaaaaaaaaaaaaaaaaaaaaaaaaaaaaaaaaaaaaaaaaaaaaaaaaaaaaaaaaaaaugcaucccccccccccccccccccccccccccccccaaaggcucuuuucagagccaccagaauu

SEQ ID NO: 15179 - RNA, 1843 nt, Artificial Sequence
  mRNA product Design d-1 comprising derived and/or modified sequence from HRSV(Memphis-37)__AIY60640.1__F-del_DSCav1_mut2 (opt3)
gggagacccgugacccggaaguuguacggcuacgcgacuuucccucccacaaacccucgcgcccuuccuuuccuacuugggcccggcagaaagcuuaccauggagcugcccauccucaagaccaacgccauuacaacuauacuugcugcagugacgcugugcuucgccagcucccagaauaucaccgaagaguuuuaccaaucuacauguucagcggucaguaaaggcuauuugggggcuuuaagaacuggaugguacaccagcguuauuacaaucgaacuguccaacauuaaggagaauaaaugcaacgguaccgacgccaaggugaaacuaaucaagcaggaacucgauaaguauaaaaaugcaguaacugaccugcagcuucugaugcagucuacuccugccgcuggcucggggucagcaauauguagcggaaucgccgugugcaaggucuugcaccucgagggcgaggugaacaaaauuaagaaugcucugcugaguaccaacaaagccguugugucccucucuaauggugucagcguguuaacguucaagguacuggaucuuaagaacuacaucgacaaacaauugcugccaauucuaaauaagcaguccuguucaaucccgaacauagaaacuguuauugaguuucagcagaaaaauaacaggcuccuggaaaucacccgggaguucagugugaaugcgggggucacaacucccgugagcaccuauaugcuuacaaacucugagcuguugucccucauuaacgauaugccuaucaccaaugaccaaaagaaacugaugucaaacaaugugcagaucguccgccagcagagcuacaguauuaugugcauaaucaaggaagagguuuuagcauaugugguacaacugccacucuacggagugauugauacgcccuguuggaaacuucauacuucuccucugugcacaaccaacacuaaggaaggcuccaauaucuguuugacacgaaccgaccguggcugguacugcgauaacgccgggagcgucucguuuuucccacaggcugagacguguaaggugcagucuaauagaguuuucugcgacaccaugaacucccuaacacugcccucagaagugaaucucugcaacauagauauuuucaauccuaaauaugacuguaagaucaugacaaguaaaaccgaugucagcuccucugugaucacaagccugggagccauuguaucaugcuacgguaagacuaaauguaccgcaaguaacaagaauaggggcaucauuaagacauuuuccaacgggugcgacuauguuagcaauaaaggaguggacaccgucucugugggcaacacucuuuacugugucaacaagcaagagggucagucacuguaugugaaaggggagccaauaaucaauuucuacgauccguugguuuuucccagugacgaauuugaugcuagcauuucccaggugaacgagaagaucaaucagucucucgccuuuauccggaaaucggacgaacuguuacacaacguaaaugucggaaagagcacgacaaacauuaugauaaccacuaucauuaucgugauuaucguuauacugcuacuccugaucgcggugggccuuuucuuguauugcaaggcccgcugaggacuagucccuguucccagagcccacuuuuuuuucuuuuuuugaaauaaaauagccugucuuucagaucuaaaaaaaaaaaaaaaaaaaaaaaaaaaaaaaaaaaaaaaaaaaaaaaaaaaaaaaaaaaaaaaaugcaucccccccccccccccccccccccccccccccaaaggcucuuuucagagccaccagaauu

SEQ ID NO: 15180 - RNA, 1843 nt, Artificial Sequence
  mRNA product Design d-1 comprising derived and/or modified sequence from HRSV(Memphis-37)__AIY60640.1__F-del_DSCav1_mut2 (opt4)
gggagacccgugacccggaaguuguacggcuacgcgacuuucccucccacaaacccucgcgcccuuccuuuccuacuugggcccggcagaaagcuuaccauggagcugcccauccugaagaccaacgccaucaccaccauccuggccgccgugacccugugcuucgccagcagccagaacaucaccgaggaguucuaccagagcaccugcagcgccgugagcaagggcuaccugggcgcccugagaaccggcugguacaccagcgugaucaccaucgagcugagcaacaucaaggagaacaagugcaacggcaccgacgccaaggugaagcugaucaagcaggagcuggacaaguacaagaacgccgugaccgaccugcagcugcugaugcagagcacccccgccgccggcagcggcagcgccaucugcagcggcaucgccgugugcaaggugcugcaccuggagggcgaggugaacaagaucaagaacgcccugcugagcaccaacaaggccguggugagccugagcaacggcgugagcgugcugaccuucaaggugcuggaccugaagaacuacaucgacaagcagcugcugcccauccugaacaagcagagcugcagcauccccaacaucgagaccgugaucgaguuccagcagaagaacaacagacugcuggagaucaccagagaguucagcgugaacgccggcgugaccacccccgugagcaccuacaugcugaccaacagcgagcugcugagccugaucaacgacaugcccaucaccaacgaccagaagaagcugaugagcaacaacgugcagaucgugagacagcagagcuacagcaucaugugcaucaucaaggaggaggugcuggccuacguggugcagcugccccuguacggcgugaucgacacccccugcuggaagcugcacaccagcccccugugcaccaccaacaccaaggagggcagcaacaucugccugaccagaaccgacagaggcugguacugcgacaacgccggcagcgugagcuucuucccccaggccgagaccugcaaggugcagagcaacagaguguucugcgacaccaugaacagccugacccugcccagcgaggugaaccugugcaacaucgacaucuucaaccccaaguacgacugcaagaucaugaccagcaagaccgacgugagcagcagcgugaucaccagccugggcgccaucgugagcugcuacggcaagaccaagugcaccgccagcaacaagaacagaggcaucaucaagaccuucagcaacggcugcgacuacgugagcaacaagggcguggacaccgugagcgugggcaacacccuguacugcgugaacaagcaggagggccagagccuguacgugaagggcgagcccaucaucaacuucuacgacccccugguguuccccagcgacgaguucgacgccagcaucagccaggugaacgagaagaucaaccagagccuggccuucaucagaaagagcgacgagcugcugcacaacgugaacgugggcaagagcaccaccaacaucaugaucaccaccaucaucaucgugaucaucgugauccugcugcugcugaucgccgugggccuguuccuguacugcaaggccagaugaggacuagucccuguucccagagcccacuuuuuuuucuuuuuuugaaauaaaauagccugucuuucagaucuaaaaaaaaaaaaaaaaaaaaaaaaaaaaaaaaaaaaaaaaaaaaaaaaaaaaaaaaaaaaaaaaugcaucccccccccccccccccccccccccccccccaaaggcucuuuucagagccaccagaauu

SEQ ID NO: 15181 - RNA, 1843 nt, Artificial Sequence
  mRNA product Design d-1 comprising derived and/or modified sequence from HRSV(Memphis-37)__AIY60640.1__F-del_DSCav1_mut2 (opt5)
gggagacccgugacccggaaguuguacggcuacgcgacuuucccucccacaaacccucgcgcccuuccuuuccuacuugggcccggcagaaagcuuaccauggagcugcccauccucaagaccaacgccauuacaacgauccuggcugccgugacccuuugcuucgcgagcucccagaauauuacagaagaguuuuaccaaucuaccuguagcgcugucuccaaaggcuaucugggggcccucagaacaggaugguacaccucuguuaucacaauugaacugagcaacaucaaggagaauaaaugcaacggcaccgacgccaaggugaaacuuaucaagcaggaacuggauaaguauaaaaaugcugugacggaccuccagcugcugaugcaguccaccccugccgcugggucuggaagcgccauuuguuccggcaucgcggucugcaaggugcuccaccuggagggggagguuaacaaaauuaagaaugcccuucugagcacaaacaaagcuguggucucucucuccaauggagugagcguucugaccuucaaggugcuugaucugaagaacuacaucgacaaacaacuccugccgauucugaauaagcagucuuguuccauccccaacauugaaacagucaucgaguuucagcagaaaaauaaccggcuccuggaaaucacccgcgaguucagcgugaaugccggcgugacgacaccugucucuaccuauaugcuuacaaacuccgagcugcucagccugauuaacgauaugcccaucaccaaugaccaaaagaaacuuauguccaacaauguucagauugugagacagcagucuuacagcaucaugugcauuaucaaggaagaggugcuggcuuaugucgugcaacucccucuguacggcguuaucgauacccccuguuggaaacugcauacauccccucucugcacgaccaacacaaaggaagggagcaauauuugucugacccggacagaccgcggaugguacugcgauaacgccggcucuguguccuuuuucccgcaggcggagaccuguaagguccagagcaauagaguguuuugcgacacgaugaacucucuuacacugcccagcgaaguuaaucucugcaacaucgauauuuucaauccuaaauaugacuguaagaucaugaccuccaaaaccgaugugucuagcuccgucauuacaagccugggggccaucgugucuugcuacggaaagaccaaauguacagcuuccaacaagaaucggggcaucauuaagacguuuagcaacgggugcgacuaugucucuaauaaaggaguggacaccguuuccgugggcaacacacuuuacugugucaacaagcaagagggccagagccuguaugugaaaggggagcccaucauuaauuucuacgauccucucguuuuucccuccgacgaguucgaugccucuaucagccaggugaacgaaaagauuaaucagucccuggcuuuuauccgcaaaucugacgaacugcuccacaacgucaaugugggaaagagcaccacaaacauuaugaucaccacgaucauuaucgugauuaucguuauucugcuucugcucaucgccgucggccuguuccuguauugcaaggccagaugaggacuagucccuguucccagagcccacuuuuuuuucuuuuuuugaaauaaaauagccugucuuucagaucuaaaaaaaaaaaaaaaaaaaaaaaaaaaaaaaaaaaaaaaaaaaaaaaaaaaaaaaaaaaaaaaaugcaucccccccccccccccccccccccccccccccaaaggcucuuuucagagccaccagaauu

SEQ ID NO: 15182 - RNA, 1843 nt, Artificial Sequence
  mRNA product Design d-1 comprising derived and/or modified sequence from HRSV(Memphis-37)__AIY60640.1__F-del_DSCav1_mut2 (opt6)
gggagacccgugacccggaaguuguacggcuacgcgacuuucccucccacaaacccucgcgcccuuccuuuccuacuugggcccggcagaaagcuuaccauggaacuaccaauacucaaaacaaacgcaauaacaacaauuuuagcugcaguaacacuuuguuucgcauccucccaaaauauaacagaagaauuuuaucaaucaaccugcucagccgucuccaaaggauaucuaggugcacuacgcacuggaugguacacaagugucaucacaauagaacuuuccaacaucaaagaaaauaaauguaauggaacugacgcaaaaguaaaacucauaaaacaagaacuagacaaauacaaaaacgcaguaacagaccuacaacuauuaaugcaaucaacaccagcagcaggauccggcagugccauaugcucuggaauagcagucugcaaaguuuuacacuuagaaggcgaaguaaacaaaaucaaaaacgcccuacuaucuacaaauaaagccgucguaucucucucaaauggaguaucaguacuaacauucaaaguauuagacuuaaaaaacuacaucgauaaacaauuauugccaauauuaaacaaacaaucuugcucaauaccaaauauagaaacagucauagaauuucaacaaaaaaauaaccgauuauuagaaauaacacgagaauuuucaguaaaugccggagucaccacaccaguaucaacauacaugcuaacaaauucagaacuauuaucauuaauaaacgacaugccuauuacaaaugaucaaaaaaaacuaauguccaacaauguacaaauaguccgacaacaaagcuacucaaucauguguauaauaaaagaagaaguacuugcauacguaguacaauuaccacuauacggaguuaucgacacaccaugcuggaaacuccacacuucaccacucugcaccacaaacacaaaagaaggcucaaacauaugccuaacaagaacagaccgaggaugguacugcgacaacgcaggaucaguaucauucuucccacaagcagaaacuugcaaaguacaaucuaacagaguuuucugugacaccaugaauagccuaacacuccccuccgaaguuaaccuauguaacauagauauauuuaaucccaaauaugauugcaaaaucaugacaucuaaaaccgacguaucaucaucuguaaucacaucacuaggugccauagucucaugcuacggcaaaacaaaaugcaccgccucaaacaaaaaccgagguauaauaaaaaccuucaguaauggaugugacuacguaucaaacaaagguguugauaccguaagcgucggcaacacccuauacugcguaaauaaacaagaaggccaaucacuauacgucaaaggcgaaccaauuauuaacuucuaugacccacucgucuuucccuccgacgaauuugacgcaagcauaucacaaguaaacgaaaaaauaaaccaaucacuagcauucauacgcaaaucagaugaacuacuacauaacguaaacguaggaaaauccacuacaaauauaaugaucacaacaauaauaaucguaauuauagucauauuauuacuacuaauagcaguaggacuuuuccuauacuguaaagcaagauaaggacuagucccuguucccagagcccacuuuuuuuucuuuuuuugaaauaaaauagccugucuuucagaucuaaaaaaaaaaaaaaaaaaaaaaaaaaaaaaaaaaaaaaaaaaaaaaaaaaaaaaaaaaaaaaaaugcaucccccccccccccccccccccccccccccccaaaggcucuuuucagagccaccagaauu

SEQ ID NO: 15183 - RNA, 1843 nt, Artificial Sequence
  mRNA product Design d-1 comprising derived and/or modified sequence from HRSV(Memphis-37)__AIY60640.1__F-del_DSCav1_mut2 (opt11)
gggagacccgugacccggaaguuguacggcuacgcgacuuucccucccacaaacccucgcgcccuuccuuuccuacuugggcccggcagaaagcuuaccauggaacuucccauccucaagaccaacgcuauuacgaccauccucgccgcagucacccucugcuucgcgucaucccaaaacaucaccgaagaauuuuaccaauccacaugcuccgcagucucaaaaggcuaccuaggagcccuacgcaccggaugguacacauccgucaucacaaucgaacucuccaacauaaaagaaaacaaaugcaacggcaccgaugccaaaguaaaacugauuaaacaagaacucgacaaauacaagaacgccgucacagaccuacagcuccucaugcaaucaacucccgccgccggcagcggauccgcuaucugcucaggcaucgccguaugcaaaguccuccaccuagaaggcgaaguaaacaaaaucaagaacgcacuacucucaacaaacaaagccgucgucucccucuccaacggcgucuccguccuuaccuucaaaguccucgaccuuaagaacuacauugacaaacaacuccuacccauccucaacaaacaauccugcucuauaccuaauauagaaaccguaaucgaauuucaacagaaaaacaaccgccuccucgaaauuacccgcgaguucucaguaaacgccggcguaaccacccccgucuccaccuacaugcucacaaauucagaacuccucagccucaucaacgacaugcccauaaccaacgaccaaaagaaacucaugucaaacaacguccaaaucgucaggcaacaaagcuacagcaucaugugcaucauuaaagaagaaguacucgccuacgucgugcaacuaccccucuacggcgucauagacacacccugcuggaaacuucacacaucaccgcucugcaccacaaacaccaaagaaggcaguaacauaugccucacccgaaccgaccgcggaugguacugcgacaacgccggauccgucagcuucuucccacaagccgaaaccugcaaaguacaauccaaccgagucuucugcgacaccaugaacucucuuacgcuccccucagaagucaaccuaugcaacaucgacaucuucaaccccaaauacgacugcaaaaucaugaccuccaaaacagacgucuccuccucagugauaaccucccucggcgccauugucuccugcuacggcaaaaccaaaugcaccgccuccaacaaaaaccgugggaucaucaaaaccuucucaaacggcugcgacuacguauccaauaagggugucgacacagucuccguaggcaauacccucuauugcgucaacaaacaagaaggccaaucccucuacgucaaaggcgaaccuaucaucaacuucuacgacccgcuagucuuccccucagacgaguucgacgcauccaucucacaagucaacgaaaagaucaaccagucccucgcauucauccgaaaauccgacgaacuucuccacaacguuaacgucggcaaauccaccacuaacauaaugaucaccacgaucaucauaguaauuaucgucauacuccuccuccuaaucgcugucggacucuuccucuacugcaaggcccgcuaaggacuagucccuguucccagagcccacuuuuuuuucuuuuuuugaaauaaaauagccugucuuucagaucuaaaaaaaaaaaaaaaaaaaaaaaaaaaaaaaaaaaaaaaaaaaaaaaaaaaaaaaaaaaaaaaaugcaucccccccccccccccccccccccccccccccaaaggcucuuuucagagccaccagaauu

SEQ ID NO: 15184 - RNA, 1898 nt, Artificial Sequence
  mRNA product Design d-2 comprising derived and/or modified sequence from HRSV(Memphis-37)__AIY60640.1__F-del_DSCav1_mut2 (opt1)
gggagagcggcucggccauuuugucccagucaguccggaggcugcggcugcagaaguaccgccugcggaguaacugcaaagaagcuuaccauggagcugcccauccucaagaccaacgccaucaccacgauccuggccgcggugacccugugcuucgccagcucccagaacaucaccgaggaguucuaccagagcacgugcuccgccgucagcaagggcuaccucggcgcccugcgcaccgggugguacaccagcgugaucaccaucgagcuguccaacaucaaggagaacaagugcaacggcaccgacgccaaggugaagcucaucaagcaggagcuggacaaguacaagaacgcggucacggaccugcagcuccugaugcagagcaccccggccgccggcuccgggagcgcgaucugcuccggcaucgccgucugcaaggugcugcaccucgagggcgaggugaacaagaucaagaacgcccugcuguccaccaacaaggccgucgugagccucuccaacggggugagcguccugaccuucaaggugcuggaccucaagaacuacaucgacaagcagcugcugcccauccugaacaagcagagcugcuccauccccaacaucgagaccgucaucgaguuccagcagaagaacaaccgccuccuggagaucacgcgggaguucagcgugaacgcgggcgugaccacccccgucuccaccuacaugcugacgaacagcgagcuccugucccugaucaacgacaugccgaucaccaacgaccagaagaagcucaugagcaacaacgugcagaucgugcgccagcaguccuacagcaucaugugcaucaucaaggaggagguccuggccuacguggugcagcugccccucuacggggucaucgacacccccugcuggaagcugcacaccagcccccugugcacgaccaacaccaaggagggcuccaacaucugccucacccggacggaccgcgggugguacugcgacaacgccggcagcguguccuucuucccgcaggccgagaccugcaagguccagagcaaccggguguucugcgacaccaugaacucccugacccugcccagcgaggugaaccucugcaacaucgacaucuucaaccccaaguacgacugcaagaucaugacguccaagaccgacgucagcuccagcgugaucaccucccugggcgccaucgugagcugcuacgggaagaccaagugcacggcgagcaacaagaaccgcggcaucaucaagaccuucuccaacgggugcgacuacgucagcaacaagggcguggacaccguguccgucggcaacacccuguacugcgugaacaagcaggagggccagagccucuacgugaagggggagcccaucaucaacuucuacgacccgcuggucuuccccuccgacgaguucgacgccagcaucucccaggugaacgagaagaucaaccagagccuggccuucauccggaaguccgacgagcuccugcacaacgugaacgucggcaagagcaccacgaacaucaugaucaccaccaucaucaucgugaucaucgugauccugcugcuccugaucgccgucgggcuguuccucuacugcaaggcccgcugaggacuaguaauaaggaaacuguaugaaugucugugggcaggaagugaagagauccuucuguaaagguuuuuggaauuaugucugcugaauaauaaacuuuuuugaaauaauaaaucugguagaaaaaugagaucuaaaaaaaaaaaaaaaaaaaaaaaaaaaaaaaaaaaaaaaaaaaaaaaaaaaaaaaaaaaaaaaaugcaucccccccccccccccccccccccccccccccaaaggcucuuuucagagccaccagaauu

SEQ ID NO: 15185 - RNA, 1898 nt, Artificial Sequence
  mRNA product Design d-2 comprising derived and/or modified sequence from HRSV(Memphis-37)__AIY60640.1__F-del_DSCav1_mut2 (opt1)
gggagagcggcucggccauuuugucccagucaguccggaggcugcggcugcagaaguaccgccugcggaguaacugcaaagaagcuuaccauggagcugcccauccucaagaccaacgccaucaccacgauccuggccgcggugacccugugcuucgccagcucccagaacaucaccgaggaguucuaccagagcacgugcuccgccgucagcaagggcuaccucggggcccugcgcaccggcugguacaccuccgugaucaccaucgagcugagcaacaucaaggagaacaagugcaacgggaccgacgccaaggugaagcucaucaagcaggagcuggacaaguacaagaacgcggucacggaccugcagcuccugaugcaguccaccccggccgccggcagcggguccgccaucugcagcggcaucgcggugugcaaggugcugcaccucgagggcgaggucaacaagaucaagaacgcccugcuguccaccaacaaggccguggugagccucuccaacggggucagcgugcugaccuucaaggugcuggaccucaagaacuacaucgacaagcagcugcugcccauccucaacaagcaguccugcagcauccccaacaucgagacggucaucgaguuccagcagaagaacaaccggcugcuggagaucacccgcgaguucuccgugaacgccggcgugaccacccccgucagcacguacaugcucaccaacuccgagcugcugagccucaucaacgacaugccgaucaccaacgaccagaagaagcugaugagcaacaacgugcagaucgugcggcagcaguccuacagcaucaugugcaucaucaaggaggagguccuggccuacguggugcagcucccccuguacggggucaucgacacccccugcuggaagcugcacacgagcccccucugcaccaccaacaccaaggagggcuccaacaucugccugacgcgcaccgaccgggggugguacugcgacaacgcgggcuccgugagcuucuucccgcaggccgagaccugcaaggugcaguccaaccgcgucuucugcgacaccaugaacagccugacgcuccccuccgaggugaaccugugcaacaucgacaucuucaaccccaaguacgacugcaagaucaugaccagcaagaccgacgucuccagcuccgugaucaccagccugggcgccaucguguccugcuacgggaagacgaagugcaccgccagcaacaagaaccggggcaucaucaagaccuucuccaacgggugcgacuacgucagcaacaagggcguggacaccguguccgucggcaacacgcucuacugcgugaacaagcaggaggggcagagccuguacgugaagggcgagcccaucaucaacuucuacgacccgcuggucuuccccagcgacgaguucgacgccuccaucagccaggugaacgagaagaucaaccagucccucgcguucauccgcaagagcgacgagcugcugcacaacgugaacgucgggaaguccaccaccaacaucaugaucaccaccaucaucaucgugaucaucgugauccuccugcugcucaucgccgucggccuguuccuguacugcaaggcccggugaggacuaguaauaaggaaacuguaugaaugucugugggcaggaagugaagagauccuucuguaaagguuuuuggaauuaugucugcugaauaauaaacuuuuuugaaauaauaaaucugguagaaaaaugagaucuaaaaaaaaaaaaaaaaaaaaaaaaaaaaaaaaaaaaaaaaaaaaaaaaaaaaaaaaaaaaaaaaugcaucccccccccccccccccccccccccccccccaaaggcucuuuucagagccaccagaauu

SEQ ID NO: 15186 - RNA, 1898 nt, Artificial Sequence
  mRNA product Design d-2 comprising derived and/or modified sequence from HRSV(Memphis-37)__AIY60640.1__F-del_DSCav1_mut2 (opt2)
gggagagcggcucggccauuuugucccagucaguccggaggcugcggcugcagaaguaccgccugcggaguaacugcaaagaagcuuaccauggagcuccccauccucaagaccaacgccaucaccaccauccucgccgccgucacccucugcuucgccuccucccagaacaucaccgaggaguucuaccaguccaccugcuccgccgucuccaagggcuaccucggcgcccuccgcaccggcugguacaccuccgucaucaccaucgagcucuccaacaucaaggagaacaagugcaacggcaccgacgccaaggucaagcucaucaagcaggagcucgacaaguacaagaacgccgucaccgaccuccagcuccucaugcaguccacccccgccgccggcuccggcuccgccaucugcuccggcaucgccgucugcaagguccuccaccucgagggcgaggucaacaagaucaagaacgcccuccucuccaccaacaaggccgucgucucccucuccaacggcgucuccguccucaccuucaagguccucgaccucaagaacuacaucgacaagcagcuccuccccauccucaacaagcaguccugcuccauccccaacaucgagaccgucaucgaguuccagcagaagaacaaccgccuccucgagaucacccgcgaguucuccgucaacgccggcgucaccacccccgucuccaccuacaugcucaccaacuccgagcuccucucccucaucaacgacaugcccaucaccaacgaccagaagaagcucauguccaacaacguccagaucguccgccagcaguccuacuccaucaugugcaucaucaaggaggagguccucgccuacgucguccagcucccccucuacggcgucaucgacacccccugcuggaagcuccacaccuccccccucugcaccaccaacaccaaggagggcuccaacaucugccucacccgcaccgaccgcggcugguacugcgacaacgccggcuccgucuccuucuucccccaggccgagaccugcaagguccaguccaaccgcgucuucugcgacaccaugaacucccucacccuccccuccgaggucaaccucugcaacaucgacaucuucaaccccaaguacgacugcaagaucaugaccuccaagaccgacgucuccuccuccgucaucaccucccucggcgccaucgucuccugcuacggcaagaccaagugcaccgccuccaacaagaaccgcggcaucaucaagaccuucuccaacggcugcgacuacgucuccaacaagggcgucgacaccgucuccgucggcaacacccucuacugcgucaacaagcaggagggccagucccucuacgucaagggcgagcccaucaucaacuucuacgacccccucgucuuccccuccgacgaguucgacgccuccaucucccaggucaacgagaagaucaaccagucccucgccuucauccgcaaguccgacgagcuccuccacaacgucaacgucggcaaguccaccaccaacaucaugaucaccaccaucaucaucgucaucaucgucauccuccuccuccucaucgccgucggccucuuccucuacugcaaggcccgcugaggacuaguaauaaggaaacuguaugaaugucugugggcaggaagugaagagauccuucuguaaagguuuuuggaauuaugucugcugaauaauaaacuuuuuugaaauaauaaaucugguagaaaaaugagaucuaaaaaaaaaaaaaaaaaaaaaaaaaaaaaaaaaaaaaaaaaaaaaaaaaaaaaaaaaaaaaaaaugcaucccccccccccccccccccccccccccccccaaaggcucuuuucagagccaccagaauu

SEQ ID NO: 15187 - RNA, 1898 nt, Artificial Sequence
  mRNA product Design d-2 comprising derived and/or modified sequence from HRSV(Memphis-37)__AIY60640.1__F-del_DSCav1_mut2 (opt3)
gggagagcggcucggccauuuugucccagucaguccggaggcugcggcugcagaaguaccgccugcggaguaacugcaaagaagcuuaccauggagcugcccauccucaagaccaacgccauuacaacuauacuugcugcagugacgcugugcuucgccagcucccagaauaucaccgaagaguuuuaccaaucuacauguucagcggucaguaaaggcuauuugggggcuuuaagaacuggaugguacaccagcguuauuacaaucgaacuguccaacauuaaggagaauaaaugcaacgguaccgacgccaaggugaaacuaaucaagcaggaacucgauaaguauaaaaaugcaguaacugaccugcagcuucugaugcagucuacuccugccgcuggcucggggucagcaauauguagcggaaucgccgugugcaaggucuugcaccucgagggcgaggugaacaaaauuaagaaugcucugcugaguaccaacaaagccguugugucccucucuaauggugucagcguguuaacguucaagguacuggaucuuaagaacuacaucgacaaacaauugcugccaauucuaaauaagcaguccuguucaaucccgaacauagaaacuguuauugaguuucagcagaaaaauaacaggcuccuggaaaucacccgggaguucagugugaaugcgggggucacaacucccgugagcaccuauaugcuuacaaacucugagcuguugucccucauuaacgauaugccuaucaccaaugaccaaaagaaacugaugucaaacaaugugcagaucguccgccagcagagcuacaguauuaugugcauaaucaaggaagagguuuuagcauaugugguacaacugccacucuacggagugauugauacgcccuguuggaaacuucauacuucuccucugugcacaaccaacacuaaggaaggcuccaauaucuguuugacacgaaccgaccguggcugguacugcgauaacgccgggagcgucucguuuuucccacaggcugagacguguaaggugcagucuaauagaguuuucugcgacaccaugaacucccuaacacugcccucagaagugaaucucugcaacauagauauuuucaauccuaaauaugacuguaagaucaugacaaguaaaaccgaugucagcuccucugugaucacaagccugggagccauuguaucaugcuacgguaagacuaaauguaccgcaaguaacaagaauaggggcaucauuaagacauuuuccaacgggugcgacuauguuagcaauaaaggaguggacaccgucucugugggcaacacucuuuacugugucaacaagcaagagggucagucacuguaugugaaaggggagccaauaaucaauuucuacgauccguugguuuuucccagugacgaauuugaugcuagcauuucccaggugaacgagaagaucaaucagucucucgccuuuauccggaaaucggacgaacuguuacacaacguaaaugucggaaagagcacgacaaacauuaugauaaccacuaucauuaucgugauuaucguuauacugcuacuccugaucgcggugggccuuuucuuguauugcaaggcccgcugaggacuaguaauaaggaaacuguaugaaugucugugggcaggaagugaagagauccuucuguaaagguuuuuggaauuaugucugcugaauaauaaacuuuuuugaaauaauaaaucugguagaaaaaugagaucuaaaaaaaaaaaaaaaaaaaaaaaaaaaaaaaaaaaaaaaaaaaaaaaaaaaaaaaaaaaaaaaaugcaucccccccccccccccccccccccccccccccaaaggcucuuuucagagccaccagaauu

SEQ ID NO: 15188 - RNA, 1898 nt, Artificial Sequence
  mRNA product Design d-2 comprising derived and/or modified sequence from HRSV(Memphis-37)__AIY60640.1__F-del_DSCav1_mut2 (opt4)
gggagagcggcucggccauuuugucccagucaguccggaggcugcggcugcagaaguaccgccugcggaguaacugcaaagaagcuuaccauggagcugcccauccugaagaccaacgccaucaccaccauccuggccgccgugacccugugcuucgccagcagccagaacaucaccgaggaguucuaccagagcaccugcagcgccgugagcaagggcuaccugggcgcccugagaaccggcugguacaccagcgugaucaccaucgagcugagcaacaucaaggagaacaagugcaacggcaccgacgccaaggugaagcugaucaagcaggagcuggacaaguacaagaacgccgugaccgaccugcagcugcugaugcagagcacccccgccgccggcagcggcagcgccaucugcagcggcaucgccgugugcaaggugcugcaccuggagggcgaggugaacaagaucaagaacgcccugcugagcaccaacaaggccguggugagccugagcaacggcgugagcgugcugaccuucaaggugcuggaccugaagaacuacaucgacaagcagcugcugcccauccugaacaagcagagcugcagcauccccaacaucgagaccgugaucgaguuccagcagaagaacaacagacugcuggagaucaccagagaguucagcgugaacgccggcgugaccacccccgugagcaccuacaugcugaccaacagcgagcugcugagccugaucaacgacaugcccaucaccaacgaccagaagaagcugaugagcaacaacgugcagaucgugagacagcagagcuacagcaucaugugcaucaucaaggaggaggugcuggccuacguggugcagcugccccuguacggcgugaucgacacccccugcuggaagcugcacaccagcccccugugcaccaccaacaccaaggagggcagcaacaucugccugaccagaaccgacagaggcugguacugcgacaacgccggcagcgugagcuucuucccccaggccgagaccugcaaggugcagagcaacagaguguucugcgacaccaugaacagccugacccugcccagcgaggugaaccugugcaacaucgacaucuucaaccccaaguacgacugcaagaucaugaccagcaagaccgacgugagcagcagcgugaucaccagccugggcgccaucgugagcugcuacggcaagaccaagugcaccgccagcaacaagaacagaggcaucaucaagaccuucagcaacggcugcgacuacgugagcaacaagggcguggacaccgugagcgugggcaacacccuguacugcgugaacaagcaggagggccagagccuguacgugaagggcgagcccaucaucaacuucuacgacccccugguguuccccagcgacgaguucgacgccagcaucagccaggugaacgagaagaucaaccagagccuggccuucaucagaaagagcgacgagcugcugcacaacgugaacgugggcaagagcaccaccaacaucaugaucaccaccaucaucaucgugaucaucgugauccugcugcugcugaucgccgugggccuguuccuguacugcaaggccagaugaggacuaguaauaaggaaacuguaugaaugucugugggcaggaagugaagagauccuucuguaaagguuuuuggaauuaugucugcugaauaauaaacuuuuuugaaauaauaaaucugguagaaaaaugagaucuaaaaaaaaaaaaaaaaaaaaaaaaaaaaaaaaaaaaaaaaaaaaaaaaaaaaaaaaaaaaaaaaugcaucccccccccccccccccccccccccccccccaaaggcucuuuucagagccaccagaauu

SEQ ID NO: 15189 - RNA, 1898 nt, Artificial Sequence
  mRNA product Design d-2 comprising derived and/or modified sequence from HRSV(Memphis-37)__AIY60640.1__F-del_DSCav1_mut2 (opt5)
gggagagcggcucggccauuuugucccagucaguccggaggcugcggcugcagaaguaccgccugcggaguaacugcaaagaagcuuaccauggagcugcccauccucaagaccaacgccauuacaacgauccuggcugccgugacccuuugcuucgcgagcucccagaauauuacagaagaguuuuaccaaucuaccuguagcgcugucuccaaaggcuaucugggggcccucagaacaggaugguacaccucuguuaucacaauugaacugagcaacaucaaggagaauaaaugcaacggcaccgacgccaaggugaaacuuaucaagcaggaacuggauaaguauaaaaaugcugugacggaccuccagcugcugaugcaguccaccccugccgcugggucuggaagcgccauuuguuccggcaucgcggucugcaaggugcuccaccuggagggggagguuaacaaaauuaagaaugcccuucugagcacaaacaaagcuguggucucucucuccaauggagugagcguucugaccuucaaggugcuugaucugaagaacuacaucgacaaacaacuccugccgauucugaauaagcagucuuguuccauccccaacauugaaacagucaucgaguuucagcagaaaaauaaccggcuccuggaaaucacccgcgaguucagcgugaaugccggcgugacgacaccugucucuaccuauaugcuuacaaacuccgagcugcucagccugauuaacgauaugcccaucaccaaugaccaaaagaaacuuauguccaacaauguucagauugugagacagcagucuuacagcaucaugugcauuaucaaggaagaggugcuggcuuaugucgugcaacucccucuguacggcguuaucgauacccccuguuggaaacugcauacauccccucucugcacgaccaacacaaaggaagggagcaauauuugucugacccggacagaccgcggaugguacugcgauaacgccggcucuguguccuuuuucccgcaggcggagaccuguaagguccagagcaauagaguguuuugcgacacgaugaacucucuuacacugcccagcgaaguuaaucucugcaacaucgauauuuucaauccuaaauaugacuguaagaucaugaccuccaaaaccgaugugucuagcuccgucauuacaagccugggggccaucgugucuugcuacggaaagaccaaauguacagcuuccaacaagaaucggggcaucauuaagacguuuagcaacgggugcgacuaugucucuaauaaaggaguggacaccguuuccgugggcaacacacuuuacugugucaacaagcaagagggccagagccuguaugugaaaggggagcccaucauuaauuucuacgauccucucguuuuucccuccgacgaguucgaugccucuaucagccaggugaacgaaaagauuaaucagucccuggcuuuuauccgcaaaucugacgaacugcuccacaacgucaaugugggaaagagcaccacaaacauuaugaucaccacgaucauuaucgugauuaucguuauucugcuucugcucaucgccgucggccuguuccuguauugcaaggccagaugaggacuaguaauaaggaaacuguaugaaugucugugggcaggaagugaagagauccuucuguaaagguuuuuggaauuaugucugcugaauaauaaacuuuuuugaaauaauaaaucugguagaaaaaugagaucuaaaaaaaaaaaaaaaaaaaaaaaaaaaaaaaaaaaaaaaaaaaaaaaaaaaaaaaaaaaaaaaaugcaucccccccccccccccccccccccccccccccaaaggcucuuuucagagccaccagaauu

SEQ ID NO: 15190 - RNA, 1898 nt, Artificial Sequence
  mRNA product Design d-2 comprising derived and/or modified sequence from HRSV(Memphis-37)__AIY60640.1__F-del_DSCav1_mut2 (opt6)
gggagagcggcucggccauuuugucccagucaguccggaggcugcggcugcagaaguaccgccugcggaguaacugcaaagaagcuuaccauggaacuaccaauacucaaaacaaacgcaauaacaacaauuuuagcugcaguaacacuuuguuucgcauccucccaaaauauaacagaagaauuuuaucaaucaaccugcucagccgucuccaaaggauaucuaggugcacuacgcacuggaugguacacaagugucaucacaauagaacuuuccaacaucaaagaaaauaaauguaauggaacugacgcaaaaguaaaacucauaaaacaagaacuagacaaauacaaaaacgcaguaacagaccuacaacuauuaaugcaaucaacaccagcagcaggauccggcagugccauaugcucuggaauagcagucugcaaaguuuuacacuuagaaggcgaaguaaacaaaaucaaaaacgcccuacuaucuacaaauaaagccgucguaucucucucaaauggaguaucaguacuaacauucaaaguauuagacuuaaaaaacuacaucgauaaacaauuauugccaauauuaaacaaacaaucuugcucaauaccaaauauagaaacagucauagaauuucaacaaaaaaauaaccgauuauuagaaauaacacgagaauuuucaguaaaugccggagucaccacaccaguaucaacauacaugcuaacaaauucagaacuauuaucauuaauaaacgacaugccuauuacaaaugaucaaaaaaaacuaauguccaacaauguacaaauaguccgacaacaaagcuacucaaucauguguauaauaaaagaagaaguacuugcauacguaguacaauuaccacuauacggaguuaucgacacaccaugcuggaaacuccacacuucaccacucugcaccacaaacacaaaagaaggcucaaacauaugccuaacaagaacagaccgaggaugguacugcgacaacgcaggaucaguaucauucuucccacaagcagaaacuugcaaaguacaaucuaacagaguuuucugugacaccaugaauagccuaacacuccccuccgaaguuaaccuauguaacauagauauauuuaaucccaaauaugauugcaaaaucaugacaucuaaaaccgacguaucaucaucuguaaucacaucacuaggugccauagucucaugcuacggcaaaacaaaaugcaccgccucaaacaaaaaccgagguauaauaaaaaccuucaguaauggaugugacuacguaucaaacaaagguguugauaccguaagcgucggcaacacccuauacugcguaaauaaacaagaaggccaaucacuauacgucaaaggcgaaccaauuauuaacuucuaugacccacucgucuuucccuccgacgaauuugacgcaagcauaucacaaguaaacgaaaaaauaaaccaaucacuagcauucauacgcaaaucagaugaacuacuacauaacguaaacguaggaaaauccacuacaaauauaaugaucacaacaauaauaaucguaauuauagucauauuauuacuacuaauagcaguaggacuuuuccuauacuguaaagcaagauaaggacuaguaauaaggaaacuguaugaaugucugugggcaggaagugaagagauccuucuguaaagguuuuuggaauuaugucugcugaauaauaaacuuuuuugaaauaauaaaucugguagaaaaaugagaucuaaaaaaaaaaaaaaaaaaaaaaaaaaaaaaaaaaaaaaaaaaaaaaaaaaaaaaaaaaaaaaaaugcaucccccccccccccccccccccccccccccccaaaggcucuuuucagagccaccagaauu

SEQ ID NO: 15191 - RNA, 1898 nt, Artificial Sequence
  mRNA product Design d-2 comprising derived and/or modified sequence from HRSV(Memphis-37)__AIY60640.1__F-del_DSCav1_mut2 (opt11)
gggagagcggcucggccauuuugucccagucaguccggaggcugcggcugcagaaguaccgccugcggaguaacugcaaagaagcuuaccauggaacuucccauccucaagaccaacgcuauuacgaccauccucgccgcagucacccucugcuucgcgucaucccaaaacaucaccgaagaauuuuaccaauccacaugcuccgcagucucaaaaggcuaccuaggagcccuacgcaccggaugguacacauccgucaucacaaucgaacucuccaacauaaaagaaaacaaaugcaacggcaccgaugccaaaguaaaacugauuaaacaagaacucgacaaauacaagaacgccgucacagaccuacagcuccucaugcaaucaacucccgccgccggcagcggauccgcuaucugcucaggcaucgccguaugcaaaguccuccaccuagaaggcgaaguaaacaaaaucaagaacgcacuacucucaacaaacaaagccgucgucucccucuccaacggcgucuccguccuuaccuucaaaguccucgaccuuaagaacuacauugacaaacaacuccuacccauccucaacaaacaauccugcucuauaccuaauauagaaaccguaaucgaauuucaacagaaaaacaaccgccuccucgaaauuacccgcgaguucucaguaaacgccggcguaaccacccccgucuccaccuacaugcucacaaauucagaacuccucagccucaucaacgacaugcccauaaccaacgaccaaaagaaacucaugucaaacaacguccaaaucgucaggcaacaaagcuacagcaucaugugcaucauuaaagaagaaguacucgccuacgucgugcaacuaccccucuacggcgucauagacacacccugcuggaaacuucacacaucaccgcucugcaccacaaacaccaaagaaggcaguaacauaugccucacccgaaccgaccgcggaugguacugcgacaacgccggauccgucagcuucuucccacaagccgaaaccugcaaaguacaauccaaccgagucuucugcgacaccaugaacucucuuacgcuccccucagaagucaaccuaugcaacaucgacaucuucaaccccaaauacgacugcaaaaucaugaccuccaaaacagacgucuccuccucagugauaaccucccucggcgccauugucuccugcuacggcaaaaccaaaugcaccgccuccaacaaaaaccgugggaucaucaaaaccuucucaaacggcugcgacuacguauccaauaagggugucgacacagucuccguaggcaauacccucuauugcgucaacaaacaagaaggccaaucccucuacgucaaaggcgaaccuaucaucaacuucuacgacccgcuagucuuccccucagacgaguucgacgcauccaucucacaagucaacgaaaagaucaaccagucccucgcauucauccgaaaauccgacgaacuucuccacaacguuaacgucggcaaauccaccacuaacauaaugaucaccacgaucaucauaguaauuaucgucauacuccuccuccuaaucgcugucggacucuuccucuacugcaaggcccgcuaaggacuaguaauaaggaaacuguaugaaugucugugggcaggaagugaagagauccuucuguaaagguuuuuggaauuaugucugcugaauaauaaacuuuuuugaaauaauaaaucugguagaaaaaugagaucuaaaaaaaaaaaaaaaaaaaaaaaaaaaaaaaaaaaaaaaaaaaaaaaaaaaaaaaaaaaaaaaaugcaucccccccccccccccccccccccccccccccaaaggcucuuuucagagccaccagaauu

SEQ ID NO: 15192 - RNA, 2214 nt, Artificial Sequence
  mRNA product Design d-3 comprising derived and/or modified sequence from HRSV(Memphis-37)__AIY60640.1__F-del_DSCav1_mut2 (opt1)
gggagagggcgcuuggcuugcaaggacccugagcugcggcauugaagcacacccaacccaacucgacugaagucagccucacugaaccggaucugagaaucuucucucucugggcuugccagggcucuccgaaccuagcuagcauccucuucaauuccaacuagaaagcuuaccauggagcugcccauccucaagaccaacgccaucaccacgauccuggccgcggugacccugugcuucgccagcucccagaacaucaccgaggaguucuaccagagcacgugcuccgccgucagcaagggcuaccucggcgcccugcgcaccgggugguacaccagcgugaucaccaucgagcuguccaacaucaaggagaacaagugcaacggcaccgacgccaaggugaagcucaucaagcaggagcuggacaaguacaagaacgcggucacggaccugcagcuccugaugcagagcaccccggccgccggcuccgggagcgcgaucugcuccggcaucgccgucugcaaggugcugcaccucgagggcgaggugaacaagaucaagaacgcccugcuguccaccaacaaggccgucgugagccucuccaacggggugagcguccugaccuucaaggugcuggaccucaagaacuacaucgacaagcagcugcugcccauccugaacaagcagagcugcuccauccccaacaucgagaccgucaucgaguuccagcagaagaacaaccgccuccuggagaucacgcgggaguucagcgugaacgcgggcgugaccacccccgucuccaccuacaugcugacgaacagcgagcuccugucccugaucaacgacaugccgaucaccaacgaccagaagaagcucaugagcaacaacgugcagaucgugcgccagcaguccuacagcaucaugugcaucaucaaggaggagguccuggccuacguggugcagcugccccucuacggggucaucgacacccccugcuggaagcugcacaccagcccccugugcacgaccaacaccaaggagggcuccaacaucugccucacccggacggaccgcgggugguacugcgacaacgccggcagcguguccuucuucccgcaggccgagaccugcaagguccagagcaaccggguguucugcgacaccaugaacucccugacccugcccagcgaggugaaccucugcaacaucgacaucuucaaccccaaguacgacugcaagaucaugacguccaagaccgacgucagcuccagcgugaucaccucccugggcgccaucgugagcugcuacgggaagaccaagugcacggcgagcaacaagaaccgcggcaucaucaagaccuucuccaacgggugcgacuacgucagcaacaagggcguggacaccguguccgucggcaacacccuguacugcgugaacaagcaggagggccagagccucuacgugaagggggagcccaucaucaacuucuacgacccgcuggucuuccccuccgacgaguucgacgccagcaucucccaggugaacgagaagaucaaccagagccuggccuucauccggaaguccgacgagcuccugcacaacgugaacgucggcaagagcaccacgaacaucaugaucaccaccaucaucaucgugaucaucgugauccugcugcuccugaucgccgucgggcuguuccucuacugcaaggcccgcugaggacuagugaagggaacacccaaauuuaauucagccuuaagcacaauuaauuaagagugaaacguaauuguacaagcaguuggucacccaccauagggcaugaucaacaccgcaaccuuuccuuuuucccccagugauucugaaaaaccccucuucccuucagcuugcuuagauguuccaaauuuaguaagcuuaaggcggccuacagaagaaaaagaaaaaaaaggccacaaaaguucccucucacuuucaguaaauaaaauaaaagcagcaacagaaauaaagaaauaaaugaaauucaaaaugaaauaaauauuguguugugcagcauuaaaaaaucaauaaaaauuaaaaaugagcaagaucuaaaaaaaaaaaaaaaaaaaaaaaaaaaaaaaaaaaaaaaaaaaaaaaaaaaaaaaaaaaaaaaaugcaucccccccccccccccccccccccccccccccaaaggcucuuuucagagccaccagaauu

SEQ ID NO: 15193 - RNA, 2214 nt, Artificial Sequence
  mRNA product Design d-3 comprising derived and/or modified sequence from HRSV(Memphis-37)__AIY60640.1__F-del_DSCav1_mut2 (opt1)
gggagagggcgcuuggcuugcaaggacccugagcugcggcauugaagcacacccaacccaacucgacugaagucagccucacugaaccggaucugagaaucuucucucucugggcuugccagggcucuccgaaccuagcuagcauccucuucaauuccaacuagaaagcuuaccauggagcugcccauccucaagaccaacgccaucaccacgauccuggccgcggugacccugugcuucgccagcucccagaacaucaccgaggaguucuaccagagcacgugcuccgccgucagcaagggcuaccucggggcccugcgcaccggcugguacaccuccgugaucaccaucgagcugagcaacaucaaggagaacaagugcaacgggaccgacgccaaggugaagcucaucaagcaggagcuggacaaguacaagaacgcggucacggaccugcagcuccugaugcaguccaccccggccgccggcagcggguccgccaucugcagcggcaucgcggugugcaaggugcugcaccucgagggcgaggucaacaagaucaagaacgcccugcuguccaccaacaaggccguggugagccucuccaacggggucagcgugcugaccuucaaggugcuggaccucaagaacuacaucgacaagcagcugcugcccauccucaacaagcaguccugcagcauccccaacaucgagacggucaucgaguuccagcagaagaacaaccggcugcuggagaucacccgcgaguucuccgugaacgccggcgugaccacccccgucagcacguacaugcucaccaacuccgagcugcugagccucaucaacgacaugccgaucaccaacgaccagaagaagcugaugagcaacaacgugcagaucgugcggcagcaguccuacagcaucaugugcaucaucaaggaggagguccuggccuacguggugcagcucccccuguacggggucaucgacacccccugcuggaagcugcacacgagcccccucugcaccaccaacaccaaggagggcuccaacaucugccugacgcgcaccgaccgggggugguacugcgacaacgcgggcuccgugagcuucuucccgcaggccgagaccugcaaggugcaguccaaccgcgucuucugcgacaccaugaacagccugacgcuccccuccgaggugaaccugugcaacaucgacaucuucaaccccaaguacgacugcaagaucaugaccagcaagaccgacgucuccagcuccgugaucaccagccugggcgccaucguguccugcuacgggaagacgaagugcaccgccagcaacaagaaccggggcaucaucaagaccuucuccaacgggugcgacuacgucagcaacaagggcguggacaccguguccgucggcaacacgcucuacugcgugaacaagcaggaggggcagagccuguacgugaagggcgagcccaucaucaacuucuacgacccgcuggucuuccccagcgacgaguucgacgccuccaucagccaggugaacgagaagaucaaccagucccucgcguucauccgcaagagcgacgagcugcugcacaacgugaacgucgggaaguccaccaccaacaucaugaucaccaccaucaucaucgugaucaucgugauccuccugcugcucaucgccgucggccuguuccuguacugcaaggcccggugaggacuagugaagggaacacccaaauuuaauucagccuuaagcacaauuaauuaagagugaaacguaauuguacaagcaguuggucacccaccauagggcaugaucaacaccgcaaccuuuccuuuuucccccagugauucugaaaaaccccucuucccuucagcuugcuuagauguuccaaauuuaguaagcuuaaggcggccuacagaagaaaaagaaaaaaaaggccacaaaaguucccucucacuuucaguaaauaaaauaaaagcagcaacagaaauaaagaaauaaaugaaauucaaaaugaaauaaauauuguguugugcagcauuaaaaaaucaauaaaaauuaaaaaugagcaagaucuaaaaaaaaaaaaaaaaaaaaaaaaaaaaaaaaaaaaaaaaaaaaaaaaaaaaaaaaaaaaaaaaugcaucccccccccccccccccccccccccccccccaaaggcucuuuucagagccaccagaauu

SEQ ID NO: 15194 - RNA, 2214 nt, Artificial Sequence
  mRNA product Design d-3 comprising derived and/or modified sequence from HRSV(Memphis-37)__AIY60640.1__F-del_DSCav1_mut2 (opt2)
gggagagggcgcuuggcuugcaaggacccugagcugcggcauugaagcacacccaacccaacucgacugaagucagccucacugaaccggaucugagaaucuucucucucugggcuugccagggcucuccgaaccuagcuagcauccucuucaauuccaacuagaaagcuuaccauggagcuccccauccucaagaccaacgccaucaccaccauccucgccgccgucacccucugcuucgccuccucccagaacaucaccgaggaguucuaccaguccaccugcuccgccgucuccaagggcuaccucggcgcccuccgcaccggcugguacaccuccgucaucaccaucgagcucuccaacaucaaggagaacaagugcaacggcaccgacgccaaggucaagcucaucaagcaggagcucgacaaguacaagaacgccgucaccgaccuccagcuccucaugcaguccacccccgccgccggcuccggcuccgccaucugcuccggcaucgccgucugcaagguccuccaccucgagggcgaggucaacaagaucaagaacgcccuccucuccaccaacaaggccgucgucucccucuccaacggcgucuccguccucaccuucaagguccucgaccucaagaacuacaucgacaagcagcuccuccccauccucaacaagcaguccugcuccauccccaacaucgagaccgucaucgaguuccagcagaagaacaaccgccuccucgagaucacccgcgaguucuccgucaacgccggcgucaccacccccgucuccaccuacaugcucaccaacuccgagcuccucucccucaucaacgacaugcccaucaccaacgaccagaagaagcucauguccaacaacguccagaucguccgccagcaguccuacuccaucaugugcaucaucaaggaggagguccucgccuacgucguccagcucccccucuacggcgucaucgacacccccugcuggaagcuccacaccuccccccucugcaccaccaacaccaaggagggcuccaacaucugccucacccgcaccgaccgcggcugguacugcgacaacgccggcuccgucuccuucuucccccaggccgagaccugcaagguccaguccaaccgcgucuucugcgacaccaugaacucccucacccuccccuccgaggucaaccucugcaacaucgacaucuucaaccccaaguacgacugcaagaucaugaccuccaagaccgacgucuccuccuccgucaucaccucccucggcgccaucgucuccugcuacggcaagaccaagugcaccgccuccaacaagaaccgcggcaucaucaagaccuucuccaacggcugcgacuacgucuccaacaagggcgucgacaccgucuccgucggcaacacccucuacugcgucaacaagcaggagggccagucccucuacgucaagggcgagcccaucaucaacuucuacgacccccucgucuuccccuccgacgaguucgacgccuccaucucccaggucaacgagaagaucaaccagucccucgccuucauccgcaaguccgacgagcuccuccacaacgucaacgucggcaaguccaccaccaacaucaugaucaccaccaucaucaucgucaucaucgucauccuccuccuccucaucgccgucggccucuuccucuacugcaaggcccgcugaggacuagugaagggaacacccaaauuuaauucagccuuaagcacaauuaauuaagagugaaacguaauuguacaagcaguuggucacccaccauagggcaugaucaacaccgcaaccuuuccuuuuucccccagugauucugaaaaaccccucuucccuucagcuugcuuagauguuccaaauuuaguaagcuuaaggcggccuacagaagaaaaagaaaaaaaaggccacaaaaguucccucucacuuucaguaaauaaaauaaaagcagcaacagaaauaaagaaauaaaugaaauucaaaaugaaauaaauauuguguugugcagcauuaaaaaaucaauaaaaauuaaaaaugagcaagaucuaaaaaaaaaaaaaaaaaaaaaaaaaaaaaaaaaaaaaaaaaaaaaaaaaaaaaaaaaaaaaaaaugcaucccccccccccccccccccccccccccccccaaaggcucuuuucagagccaccagaauu

SEQ ID NO: 15195 - RNA, 2214 nt, Artificial Sequence
  mRNA product Design d-3 comprising derived and/or modified sequence from HRSV(Memphis-37)__AIY60640.1__F-del_DSCav1_mut2 (opt3)
gggagagggcgcuuggcuugcaaggacccugagcugcggcauugaagcacacccaacccaacucgacugaagucagccucacugaaccggaucugagaaucuucucucucugggcuugccagggcucuccgaaccuagcuagcauccucuucaauuccaacuagaaagcuuaccauggagcugcccauccucaagaccaacgccauuacaacuauacuugcugcagugacgcugugcuucgccagcucccagaauaucaccgaagaguuuuaccaaucuacauguucagcggucaguaaaggcuauuugggggcuuuaagaacuggaugguacaccagcguuauuacaaucgaacuguccaacauuaaggagaauaaaugcaacgguaccgacgccaaggugaaacuaaucaagcaggaacucgauaaguauaaaaaugcaguaacugaccugcagcuucugaugcagucuacuccugccgcuggcucggggucagcaauauguagcggaaucgccgugugcaaggucuugcaccucgagggcgaggugaacaaaauuaagaaugcucugcugaguaccaacaaagccguugugucccucucuaauggugucagcguguuaacguucaagguacuggaucuuaagaacuacaucgacaaacaauugcugccaauucuaaauaagcaguccuguucaaucccgaacauagaaacuguuauugaguuucagcagaaaaauaacaggcuccuggaaaucacccgggaguucagugugaaugcgggggucacaacucccgugagcaccuauaugcuuacaaacucugagcuguugucccucauuaacgauaugccuaucaccaaugaccaaaagaaacugaugucaaacaaugugcagaucguccgccagcagagcuacaguauuaugugcauaaucaaggaagagguuuuagcauaugugguacaacugccacucuacggagugauugauacgcccuguuggaaacuucauacuucuccucugugcacaaccaacacuaaggaaggcuccaauaucuguuugacacgaaccgaccguggcugguacugcgauaacgccgggagcgucucguuuuucccacaggcugagacguguaaggugcagucuaauagaguuuucugcgacaccaugaacucccuaacacugcccucagaagugaaucucugcaacauagauauuuucaauccuaaauaugacuguaagaucaugacaaguaaaaccgaugucagcuccucugugaucacaagccugggagccauuguaucaugcuacgguaagacuaaauguaccgcaaguaacaagaauaggggcaucauuaagacauuuuccaacgggugcgacuauguuagcaauaaaggaguggacaccgucucugugggcaacacucuuuacugugucaacaagcaagagggucagucacuguaugugaaaggggagccaauaaucaauuucuacgauccguugguuuuucccagugacgaauuugaugcuagcauuucccaggugaacgagaagaucaaucagucucucgccuuuauccggaaaucggacgaacuguuacacaacguaaaugucggaaagagcacgacaaacauuaugauaaccacuaucauuaucgugauuaucguuauacugcuacuccugaucgcggugggccuuuucuuguauugcaaggcccgcugaggacuagugaagggaacacccaaauuuaauucagccuuaagcacaauuaauuaagagugaaacguaauuguacaagcaguuggucacccaccauagggcaugaucaacaccgcaaccuuuccuuuuucccccagugauucugaaaaaccccucuucccuucagcuugcuuagauguuccaaauuuaguaagcuuaaggcggccuacagaagaaaaagaaaaaaaaggccacaaaaguucccucucacuuucaguaaauaaaauaaaagcagcaacagaaauaaagaaauaaaugaaauucaaaaugaaauaaauauuguguugugcagcauuaaaaaaucaauaaaaauuaaaaaugagcaagaucuaaaaaaaaaaaaaaaaaaaaaaaaaaaaaaaaaaaaaaaaaaaaaaaaaaaaaaaaaaaaaaaaugcaucccccccccccccccccccccccccccccccaaaggcucuuuucagagccaccagaauu

SEQ ID NO: 15196 - RNA, 2214 nt, Artificial Sequence
  mRNA product Design d-3 comprising derived and/or modified sequence from HRSV(Memphis-37)__AIY60640.1__F-del_DSCav1_mut2 (opt4)
gggagagggcgcuuggcuugcaaggacccugagcugcggcauugaagcacacccaacccaacucgacugaagucagccucacugaaccggaucugagaaucuucucucucugggcuugccagggcucuccgaaccuagcuagcauccucuucaauuccaacuagaaagcuuaccauggagcugcccauccugaagaccaacgccaucaccaccauccuggccgccgugacccugugcuucgccagcagccagaacaucaccgaggaguucuaccagagcaccugcagcgccgugagcaagggcuaccugggcgcccugagaaccggcugguacaccagcgugaucaccaucgagcugagcaacaucaaggagaacaagugcaacggcaccgacgccaaggugaagcugaucaagcaggagcuggacaaguacaagaacgccgugaccgaccugcagcugcugaugcagagcacccccgccgccggcagcggcagcgccaucugcagcggcaucgccgugugcaaggugcugcaccuggagggcgaggugaacaagaucaagaacgcccugcugagcaccaacaaggccguggugagccugagcaacggcgugagcgugcugaccuucaaggugcuggaccugaagaacuacaucgacaagcagcugcugcccauccugaacaagcagagcugcagcauccccaacaucgagaccgugaucgaguuccagcagaagaacaacagacugcuggagaucaccagagaguucagcgugaacgccggcgugaccacccccgugagcaccuacaugcugaccaacagcgagcugcugagccugaucaacgacaugcccaucaccaacgaccagaagaagcugaugagcaacaacgugcagaucgugagacagcagagcuacagcaucaugugcaucaucaaggaggaggugcuggccuacguggugcagcugccccuguacggcgugaucgacacccccugcuggaagcugcacaccagcccccugugcaccaccaacaccaaggagggcagcaacaucugccugaccagaaccgacagaggcugguacugcgacaacgccggcagcgugagcuucuucccccaggccgagaccugcaaggugcagagcaacagaguguucugcgacaccaugaacagccugacccugcccagcgaggugaaccugugcaacaucgacaucuucaaccccaaguacgacugcaagaucaugaccagcaagaccgacgugagcagcagcgugaucaccagccugggcgccaucgugagcugcuacggcaagaccaagugcaccgccagcaacaagaacagaggcaucaucaagaccuucagcaacggcugcgacuacgugagcaacaagggcguggacaccgugagcgugggcaacacccuguacugcgugaacaagcaggagggccagagccuguacgugaagggcgagcccaucaucaacuucuacgacccccugguguuccccagcgacgaguucgacgccagcaucagccaggugaacgagaagaucaaccagagccuggccuucaucagaaagagcgacgagcugcugcacaacgugaacgugggcaagagcaccaccaacaucaugaucaccaccaucaucaucgugaucaucgugauccugcugcugcugaucgccgugggccuguuccuguacugcaaggccagaugaggacuagugaagggaacacccaaauuuaauucagccuuaagcacaauuaauuaagagugaaacguaauuguacaagcaguuggucacccaccauagggcaugaucaacaccgcaaccuuuccuuuuucccccagugauucugaaaaaccccucuucccuucagcuugcuuagauguuccaaauuuaguaagcuuaaggcggccuacagaagaaaaagaaaaaaaaggccacaaaaguucccucucacuuucaguaaauaaaauaaaagcagcaacagaaauaaagaaauaaaugaaauucaaaaugaaauaaauauuguguugugcagcauuaaaaaaucaauaaaaauuaaaaaugagcaagaucuaaaaaaaaaaaaaaaaaaaaaaaaaaaaaaaaaaaaaaaaaaaaaaaaaaaaaaaaaaaaaaaaugcaucccccccccccccccccccccccccccccccaaaggcucuuuucagagccaccagaauu

SEQ ID NO: 15197 - RNA, 2214 nt, Artificial Sequence
  mRNA product Design d-3 comprising derived and/or modified sequence from HRSV(Memphis-37)__AIY60640.1__F-del_DSCav1_mut2 (opt5)
gggagagggcgcuuggcuugcaaggacccugagcugcggcauugaagcacacccaacccaacucgacugaagucagccucacugaaccggaucugagaaucuucucucucugggcuugccagggcucuccgaaccuagcuagcauccucuucaauuccaacuagaaagcuuaccauggagcugcccauccucaagaccaacgccauuacaacgauccuggcugccgugacccuuugcuucgcgagcucccagaauauuacagaagaguuuuaccaaucuaccuguagcgcugucuccaaaggcuaucugggggcccucagaacaggaugguacaccucuguuaucacaauugaacugagcaacaucaaggagaauaaaugcaacggcaccgacgccaaggugaaacuuaucaagcaggaacuggauaaguauaaaaaugcugugacggaccuccagcugcugaugcaguccaccccugccgcugggucuggaagcgccauuuguuccggcaucgcggucugcaaggugcuccaccuggagggggagguuaacaaaauuaagaaugcccuucugagcacaaacaaagcuguggucucucucuccaauggagugagcguucugaccuucaaggugcuugaucugaagaacuacaucgacaaacaacuccugccgauucugaauaagcagucuuguuccauccccaacauugaaacagucaucgaguuucagcagaaaaauaaccggcuccuggaaaucacccgcgaguucagcgugaaugccggcgugacgacaccugucucuaccuauaugcuuacaaacuccgagcugcucagccugauuaacgauaugcccaucaccaaugaccaaaagaaacuuauguccaacaauguucagauugugagacagcagucuuacagcaucaugugcauuaucaaggaagaggugcuggcuuaugucgugcaacucccucuguacggcguuaucgauacccccuguuggaaacugcauacauccccucucugcacgaccaacacaaaggaagggagcaauauuugucugacccggacagaccgcggaugguacugcgauaacgccggcucuguguccuuuuucccgcaggcggagaccuguaagguccagagcaauagaguguuuugcgacacgaugaacucucuuacacugcccagcgaaguuaaucucugcaacaucgauauuuucaauccuaaauaugacuguaagaucaugaccuccaaaaccgaugugucuagcuccgucauuacaagccugggggccaucgugucuugcuacggaaagaccaaauguacagcuuccaacaagaaucggggcaucauuaagacguuuagcaacgggugcgacuaugucucuaauaaaggaguggacaccguuuccgugggcaacacacuuuacugugucaacaagcaagagggccagagccuguaugugaaaggggagcccaucauuaauuucuacgauccucucguuuuucccuccgacgaguucgaugccucuaucagccaggugaacgaaaagauuaaucagucccuggcuuuuauccgcaaaucugacgaacugcuccacaacgucaaugugggaaagagcaccacaaacauuaugaucaccacgaucauuaucgugauuaucguuauucugcuucugcucaucgccgucggccuguuccuguauugcaaggccagaugaggacuagugaagggaacacccaaauuuaauucagccuuaagcacaauuaauuaagagugaaacguaauuguacaagcaguuggucacccaccauagggcaugaucaacaccgcaaccuuuccuuuuucccccagugauucugaaaaaccccucuucccuucagcuugcuuagauguuccaaauuuaguaagcuuaaggcggccuacagaagaaaaagaaaaaaaaggccacaaaaguucccucucacuuucaguaaauaaaauaaaagcagcaacagaaauaaagaaauaaaugaaauucaaaaugaaauaaauauuguguugugcagcauuaaaaaaucaauaaaaauuaaaaaugagcaagaucuaaaaaaaaaaaaaaaaaaaaaaaaaaaaaaaaaaaaaaaaaaaaaaaaaaaaaaaaaaaaaaaaugcaucccccccccccccccccccccccccccccccaaaggcucuuuucagagccaccagaauu

SEQ ID NO: 15198 - RNA, 2214 nt, Artificial Sequence
  mRNA product Design d-3 comprising derived and/or modified sequence from HRSV(Memphis-37)__AIY60640.1__F-del_DSCav1_mut2 (opt6)
gggagagggcgcuuggcuugcaaggacccugagcugcggcauugaagcacacccaacccaacucgacugaagucagccucacugaaccggaucugagaaucuucucucucugggcuugccagggcucuccgaaccuagcuagcauccucuucaauuccaacuagaaagcuuaccauggaacuaccaauacucaaaacaaacgcaauaacaacaauuuuagcugcaguaacacuuuguuucgcauccucccaaaauauaacagaagaauuuuaucaaucaaccugcucagccgucuccaaaggauaucuaggugcacuacgcacuggaugguacacaagugucaucacaauagaacuuuccaacaucaaagaaaauaaauguaauggaacugacgcaaaaguaaaacucauaaaacaagaacuagacaaauacaaaaacgcaguaacagaccuacaacuauuaaugcaaucaacaccagcagcaggauccggcagugccauaugcucuggaauagcagucugcaaaguuuuacacuuagaaggcgaaguaaacaaaaucaaaaacgcccuacuaucuacaaauaaagccgucguaucucucucaaauggaguaucaguacuaacauucaaaguauuagacuuaaaaaacuacaucgauaaacaauuauugccaauauuaaacaaacaaucuugcucaauaccaaauauagaaacagucauagaauuucaacaaaaaaauaaccgauuauuagaaauaacacgagaauuuucaguaaaugccggagucaccacaccaguaucaacauacaugcuaacaaauucagaacuauuaucauuaauaaacgacaugccuauuacaaaugaucaaaaaaaacuaauguccaacaauguacaaauaguccgacaacaaagcuacucaaucauguguauaauaaaagaagaaguacuugcauacguaguacaauuaccacuauacggaguuaucgacacaccaugcuggaaacuccacacuucaccacucugcaccacaaacacaaaagaaggcucaaacauaugccuaacaagaacagaccgaggaugguacugcgacaacgcaggaucaguaucauucuucccacaagcagaaacuugcaaaguacaaucuaacagaguuuucugugacaccaugaauagccuaacacuccccuccgaaguuaaccuauguaacauagauauauuuaaucccaaauaugauugcaaaaucaugacaucuaaaaccgacguaucaucaucuguaaucacaucacuaggugccauagucucaugcuacggcaaaacaaaaugcaccgccucaaacaaaaaccgagguauaauaaaaaccuucaguaauggaugugacuacguaucaaacaaagguguugauaccguaagcgucggcaacacccuauacugcguaaauaaacaagaaggccaaucacuauacgucaaaggcgaaccaauuauuaacuucuaugacccacucgucuuucccuccgacgaauuugacgcaagcauaucacaaguaaacgaaaaaauaaaccaaucacuagcauucauacgcaaaucagaugaacuacuacauaacguaaacguaggaaaauccacuacaaauauaaugaucacaacaauaauaaucguaauuauagucauauuauuacuacuaauagcaguaggacuuuuccuauacuguaaagcaagauaaggacuagugaagggaacacccaaauuuaauucagccuuaagcacaauuaauuaagagugaaacguaauuguacaagcaguuggucacccaccauagggcaugaucaacaccgcaaccuuuccuuuuucccccagugauucugaaaaaccccucuucccuucagcuugcuuagauguuccaaauuuaguaagcuuaaggcggccuacagaagaaaaagaaaaaaaaggccacaaaaguucccucucacuuucaguaaauaaaauaaaagcagcaacagaaauaaagaaauaaaugaaauucaaaaugaaauaaauauuguguugugcagcauuaaaaaaucaauaaaaauuaaaaaugagcaagaucuaaaaaaaaaaaaaaaaaaaaaaaaaaaaaaaaaaaaaaaaaaaaaaaaaaaaaaaaaaaaaaaaugcaucccccccccccccccccccccccccccccccaaaggcucuuuucagagccaccagaauu

SEQ ID NO: 15199 - RNA, 2214 nt, Artificial Sequence
  mRNA product Design d-3 comprising derived and/or modified sequence from HRSV(Memphis-37)__AIY60640.1__F-del_DSCav1_mut2 (opt11)
gggagagggcgcuuggcuugcaaggacccugagcugcggcauugaagcacacccaacccaacucgacugaagucagccucacugaaccggaucugagaaucuucucucucugggcuugccagggcucuccgaaccuagcuagcauccucuucaauuccaacuagaaagcuuaccauggaacuucccauccucaagaccaacgcuauuacgaccauccucgccgcagucacccucugcuucgcgucaucccaaaacaucaccgaagaauuuuaccaauccacaugcuccgcagucucaaaaggcuaccuaggagcccuacgcaccggaugguacacauccgucaucacaaucgaacucuccaacauaaaagaaaacaaaugcaacggcaccgaugccaaaguaaaacugauuaaacaagaacucgacaaauacaagaacgccgucacagaccuacagcuccucaugcaaucaacucccgccgccggcagcggauccgcuaucugcucaggcaucgccguaugcaaaguccuccaccuagaaggcgaaguaaacaaaaucaagaacgcacuacucucaacaaacaaagccgucgucucccucuccaacggcgucuccguccuuaccuucaaaguccucgaccuuaagaacuacauugacaaacaacuccuacccauccucaacaaacaauccugcucuauaccuaauauagaaaccguaaucgaauuucaacagaaaaacaaccgccuccucgaaauuacccgcgaguucucaguaaacgccggcguaaccacccccgucuccaccuacaugcucacaaauucagaacuccucagccucaucaacgacaugcccauaaccaacgaccaaaagaaacucaugucaaacaacguccaaaucgucaggcaacaaagcuacagcaucaugugcaucauuaaagaagaaguacucgccuacgucgugcaacuaccccucuacggcgucauagacacacccugcuggaaacuucacacaucaccgcucugcaccacaaacaccaaagaaggcaguaacauaugccucacccgaaccgaccgcggaugguacugcgacaacgccggauccgucagcuucuucccacaagccgaaaccugcaaaguacaauccaaccgagucuucugcgacaccaugaacucucuuacgcuccccucagaagucaaccuaugcaacaucgacaucuucaaccccaaauacgacugcaaaaucaugaccuccaaaacagacgucuccuccucagugauaaccucccucggcgccauugucuccugcuacggcaaaaccaaaugcaccgccuccaacaaaaaccgugggaucaucaaaaccuucucaaacggcugcgacuacguauccaauaagggugucgacacagucuccguaggcaauacccucuauugcgucaacaaacaagaaggccaaucccucuacgucaaaggcgaaccuaucaucaacuucuacgacccgcuagucuuccccucagacgaguucgacgcauccaucucacaagucaacgaaaagaucaaccagucccucgcauucauccgaaaauccgacgaacuucuccacaacguuaacgucggcaaauccaccacuaacauaaugaucaccacgaucaucauaguaauuaucgucauacuccuccuccuaaucgcugucggacucuuccucuacugcaaggcccgcuaaggacuagugaagggaacacccaaauuuaauucagccuuaagcacaauuaauuaagagugaaacguaauuguacaagcaguuggucacccaccauagggcaugaucaacaccgcaaccuuuccuuuuucccccagugauucugaaaaaccccucuucccuucagcuugcuuagauguuccaaauuuaguaagcuuaaggcggccuacagaagaaaaagaaaaaaaaggccacaaaaguucccucucacuuucaguaaauaaaauaaaagcagcaacagaaauaaagaaauaaaugaaauucaaaaugaaauaaauauuguguugugcagcauuaaaaaaucaauaaaaauuaaaaaugagcaagaucuaaaaaaaaaaaaaaaaaaaaaaaaaaaaaaaaaaaaaaaaaaaaaaaaaaaaaaaaaaaaaaaaugcaucccccccccccccccccccccccccccccccaaaggcucuuuucagagccaccagaauu

SEQ ID NO: 15200 - RNA, 1897 nt, Artificial Sequence
  mRNA product Design d-4 comprising derived and/or modified sequence from HRSV(Memphis-37)__AIY60640.1__F-del_DSCav1_mut2 (opt1)
gggagagucccgcagucggcguccagcggcucugcuuguucgugugugugucguugcaggccuuauucaagcuuaccauggagcugcccauccucaagaccaacgccaucaccacgauccuggccgcggugacccugugcuucgccagcucccagaacaucaccgaggaguucuaccagagcacgugcuccgccgucagcaagggcuaccucggcgcccugcgcaccgggugguacaccagcgugaucaccaucgagcuguccaacaucaaggagaacaagugcaacggcaccgacgccaaggugaagcucaucaagcaggagcuggacaaguacaagaacgcggucacggaccugcagcuccugaugcagagcaccccggccgccggcuccgggagcgcgaucugcuccggcaucgccgucugcaaggugcugcaccucgagggcgaggugaacaagaucaagaacgcccugcuguccaccaacaaggccgucgugagccucuccaacggggugagcguccugaccuucaaggugcuggaccucaagaacuacaucgacaagcagcugcugcccauccugaacaagcagagcugcuccauccccaacaucgagaccgucaucgaguuccagcagaagaacaaccgccuccuggagaucacgcgggaguucagcgugaacgcgggcgugaccacccccgucuccaccuacaugcugacgaacagcgagcuccugucccugaucaacgacaugccgaucaccaacgaccagaagaagcucaugagcaacaacgugcagaucgugcgccagcaguccuacagcaucaugugcaucaucaaggaggagguccuggccuacguggugcagcugccccucuacggggucaucgacacccccugcuggaagcugcacaccagcccccugugcacgaccaacaccaaggagggcuccaacaucugccucacccggacggaccgcgggugguacugcgacaacgccggcagcguguccuucuucccgcaggccgagaccugcaagguccagagcaaccggguguucugcgacaccaugaacucccugacccugcccagcgaggugaaccucugcaacaucgacaucuucaaccccaaguacgacugcaagaucaugacguccaagaccgacgucagcuccagcgugaucaccucccugggcgccaucgugagcugcuacgggaagaccaagugcacggcgagcaacaagaaccgcggcaucaucaagaccuucuccaacgggugcgacuacgucagcaacaagggcguggacaccguguccgucggcaacacccuguacugcgugaacaagcaggagggccagagccucuacgugaagggggagcccaucaucaacuucuacgacccgcuggucuuccccuccgacgaguucgacgccagcaucucccaggugaacgagaagaucaaccagagccuggccuucauccggaaguccgacgagcuccugcacaacgugaacgucggcaagagcaccacgaacaucaugaucaccaccaucaucaucgugaucaucgugauccugcugcuccugaucgccgucgggcuguuccucuacugcaaggcccgcugaggacuaguggaagcauuuuccuggcugauuaaaagaaauuacucagcuauggucaucuguuccuguuagaaggcuaugcagcauauuauauacuaugcgcauguuaugaaaugcauaauaaaaaauuuuaaaaaaucuaaaagaucuaaaaaaaaaaaaaaaaaaaaaaaaaaaaaaaaaaaaaaaaaaaaaaaaaaaaaaaaaaaaaaaaugcaucccccccccccccccccccccccccccccccaaaggcucuuuucagagccaccagaauu

SEQ ID NO: 15201 - RNA, 1897 nt, Artificial Sequence
  mRNA product Design d-4 comprising derived and/or modified sequence from HRSV(Memphis-37)__AIY60640.1__F-del_DSCav1_mut2 (opt1)
gggagagucccgcagucggcguccagcggcucugcuuguucgugugugugucguugcaggccuuauucaagcuuaccauggagcugcccauccucaagaccaacgccaucaccacgauccuggccgcggugacccugugcuucgccagcucccagaacaucaccgaggaguucuaccagagcacgugcuccgccgucagcaagggcuaccucggggcccugcgcaccggcugguacaccuccgugaucaccaucgagcugagcaacaucaaggagaacaagugcaacgggaccgacgccaaggugaagcucaucaagcaggagcuggacaaguacaagaacgcggucacggaccugcagcuccugaugcaguccaccccggccgccggcagcggguccgccaucugcagcggcaucgcggugugcaaggugcugcaccucgagggcgaggucaacaagaucaagaacgcccugcuguccaccaacaaggccguggugagccucuccaacggggucagcgugcugaccuucaaggugcuggaccucaagaacuacaucgacaagcagcugcugcccauccucaacaagcaguccugcagcauccccaacaucgagacggucaucgaguuccagcagaagaacaaccggcugcuggagaucacccgcgaguucuccgugaacgccggcgugaccacccccgucagcacguacaugcucaccaacuccgagcugcugagccucaucaacgacaugccgaucaccaacgaccagaagaagcugaugagcaacaacgugcagaucgugcggcagcaguccuacagcaucaugugcaucaucaaggaggagguccuggccuacguggugcagcucccccuguacggggucaucgacacccccugcuggaagcugcacacgagcccccucugcaccaccaacaccaaggagggcuccaacaucugccugacgcgcaccgaccgggggugguacugcgacaacgcgggcuccgugagcuucuucccgcaggccgagaccugcaaggugcaguccaaccgcgucuucugcgacaccaugaacagccugacgcuccccuccgaggugaaccugugcaacaucgacaucuucaaccccaaguacgacugcaagaucaugaccagcaagaccgacgucuccagcuccgugaucaccagccugggcgccaucguguccugcuacgggaagacgaagugcaccgccagcaacaagaaccggggcaucaucaagaccuucuccaacgggugcgacuacgucagcaacaagggcguggacaccguguccgucggcaacacgcucuacugcgugaacaagcaggaggggcagagccuguacgugaagggcgagcccaucaucaacuucuacgacccgcuggucuuccccagcgacgaguucgacgccuccaucagccaggugaacgagaagaucaaccagucccucgcguucauccgcaagagcgacgagcugcugcacaacgugaacgucgggaaguccaccaccaacaucaugaucaccaccaucaucaucgugaucaucgugauccuccugcugcucaucgccgucggccuguuccuguacugcaaggcccggugaggacuaguggaagcauuuuccuggcugauuaaaagaaauuacucagcuauggucaucuguuccuguuagaaggcuaugcagcauauuauauacuaugcgcauguuaugaaaugcauaauaaaaaauuuuaaaaaaucuaaaagaucuaaaaaaaaaaaaaaaaaaaaaaaaaaaaaaaaaaaaaaaaaaaaaaaaaaaaaaaaaaaaaaaaugcaucccccccccccccccccccccccccccccccaaaggcucuuuucagagccaccagaauu

SEQ ID NO: 15202 - RNA, 1897 nt, Artificial Sequence
  mRNA product Design d-4 comprising derived and/or modified sequence from HRSV(Memphis-37)__AIY60640.1__F-del_DSCav1_mut2 (opt2)
gggagagucccgcagucggcguccagcggcucugcuuguucgugugugugucguugcaggccuuauucaagcuuaccauggagcuccccauccucaagaccaacgccaucaccaccauccucgccgccgucacccucugcuucgccuccucccagaacaucaccgaggaguucuaccaguccaccugcuccgccgucuccaagggcuaccucggcgcccuccgcaccggcugguacaccuccgucaucaccaucgagcucuccaacaucaaggagaacaagugcaacggcaccgacgccaaggucaagcucaucaagcaggagcucgacaaguacaagaacgccgucaccgaccuccagcuccucaugcaguccacccccgccgccggcuccggcuccgccaucugcuccggcaucgccgucugcaagguccuccaccucgagggcgaggucaacaagaucaagaacgcccuccucuccaccaacaaggccgucgucucccucuccaacggcgucuccguccucaccuucaagguccucgaccucaagaacuacaucgacaagcagcuccuccccauccucaacaagcaguccugcuccauccccaacaucgagaccgucaucgaguuccagcagaagaacaaccgccuccucgagaucacccgcgaguucuccgucaacgccggcgucaccacccccgucuccaccuacaugcucaccaacuccgagcuccucucccucaucaacgacaugcccaucaccaacgaccagaagaagcucauguccaacaacguccagaucguccgccagcaguccuacuccaucaugugcaucaucaaggaggagguccucgccuacgucguccagcucccccucuacggcgucaucgacacccccugcuggaagcuccacaccuccccccucugcaccaccaacaccaaggagggcuccaacaucugccucacccgcaccgaccgcggcugguacugcgacaacgccggcuccgucuccuucuucccccaggccgagaccugcaagguccaguccaaccgcgucuucugcgacaccaugaacucccucacccuccccuccgaggucaaccucugcaacaucgacaucuucaaccccaaguacgacugcaagaucaugaccuccaagaccgacgucuccuccuccgucaucaccucccucggcgccaucgucuccugcuacggcaagaccaagugcaccgccuccaacaagaaccgcggcaucaucaagaccuucuccaacggcugcgacuacgucuccaacaagggcgucgacaccgucuccgucggcaacacccucuacugcgucaacaagcaggagggccagucccucuacgucaagggcgagcccaucaucaacuucuacgacccccucgucuuccccuccgacgaguucgacgccuccaucucccaggucaacgagaagaucaaccagucccucgccuucauccgcaaguccgacgagcuccuccacaacgucaacgucggcaaguccaccaccaacaucaugaucaccaccaucaucaucgucaucaucgucauccuccuccuccucaucgccgucggccucuuccucuacugcaaggcccgcugaggacuaguggaagcauuuuccuggcugauuaaaagaaauuacucagcuauggucaucuguuccuguuagaaggcuaugcagcauauuauauacuaugcgcauguuaugaaaugcauaauaaaaaauuuuaaaaaaucuaaaagaucuaaaaaaaaaaaaaaaaaaaaaaaaaaaaaaaaaaaaaaaaaaaaaaaaaaaaaaaaaaaaaaaaugcaucccccccccccccccccccccccccccccccaaaggcucuuuucagagccaccagaauu

SEQ ID NO: 15203 - RNA, 1897 nt, Artificial Sequence
  mRNA product Design d-4 comprising derived and/or modified sequence from HRSV(Memphis-37)__AIY60640.1__F-del_DSCav1_mut2 (opt3)
gggagagucccgcagucggcguccagcggcucugcuuguucgugugugugucguugcaggccuuauucaagcuuaccauggagcugcccauccucaagaccaacgccauuacaacuauacuugcugcagugacgcugugcuucgccagcucccagaauaucaccgaagaguuuuaccaaucuacauguucagcggucaguaaaggcuauuugggggcuuuaagaacuggaugguacaccagcguuauuacaaucgaacuguccaacauuaaggagaauaaaugcaacgguaccgacgccaaggugaaacuaaucaagcaggaacucgauaaguauaaaaaugcaguaacugaccugcagcuucugaugcagucuacuccugccgcuggcucggggucagcaauauguagcggaaucgccgugugcaaggucuugcaccucgagggcgaggugaacaaaauuaagaaugcucugcugaguaccaacaaagccguugugucccucucuaauggugucagcguguuaacguucaagguacuggaucuuaagaacuacaucgacaaacaauugcugccaauucuaaauaagcaguccuguucaaucccgaacauagaaacuguuauugaguuucagcagaaaaauaacaggcuccuggaaaucacccgggaguucagugugaaugcgggggucacaacucccgugagcaccuauaugcuuacaaacucugagcuguugucccucauuaacgauaugccuaucaccaaugaccaaaagaaacugaugucaaacaaugugcagaucguccgccagcagagcuacaguauuaugugcauaaucaaggaagagguuuuagcauaugugguacaacugccacucuacggagugauugauacgcccuguuggaaacuucauacuucuccucugugcacaaccaacacuaaggaaggcuccaauaucuguuugacacgaaccgaccguggcugguacugcgauaacgccgggagcgucucguuuuucccacaggcugagacguguaaggugcagucuaauagaguuuucugcgacaccaugaacucccuaacacugcccucagaagugaaucucugcaacauagauauuuucaauccuaaauaugacuguaagaucaugacaaguaaaaccgaugucagcuccucugugaucacaagccugggagccauuguaucaugcuacgguaagacuaaauguaccgcaaguaacaagaauaggggcaucauuaagacauuuuccaacgggugcgacuauguuagcaauaaaggaguggacaccgucucugugggcaacacucuuuacugugucaacaagcaagagggucagucacuguaugugaaaggggagccaauaaucaauuucuacgauccguugguuuuucccagugacgaauuugaugcuagcauuucccaggugaacgagaagaucaaucagucucucgccuuuauccggaaaucggacgaacuguuacacaacguaaaugucggaaagagcacgacaaacauuaugauaaccacuaucauuaucgugauuaucguuauacugcuacuccugaucgcggugggccuuuucuuguauugcaaggcccgcugaggacuaguggaagcauuuuccuggcugauuaaaagaaauuacucagcuauggucaucuguuccuguuagaaggcuaugcagcauauuauauacuaugcgcauguuaugaaaugcauaauaaaaaauuuuaaaaaaucuaaaagaucuaaaaaaaaaaaaaaaaaaaaaaaaaaaaaaaaaaaaaaaaaaaaaaaaaaaaaaaaaaaaaaaaugcaucccccccccccccccccccccccccccccccaaaggcucuuuucagagccaccagaauu

SEQ ID NO: 15204 - RNA, 1897 nt, Artificial Sequence
  mRNA product Design d-4 comprising derived and/or modified sequence from HRSV(Memphis-37)__AIY60640.1__F-del_DSCav1_mut2 (opt4)
gggagagucccgcagucggcguccagcggcucugcuuguucgugugugugucguugcaggccuuauucaagcuuaccauggagcugcccauccugaagaccaacgccaucaccaccauccuggccgccgugacccugugcuucgccagcagccagaacaucaccgaggaguucuaccagagcaccugcagcgccgugagcaagggcuaccugggcgcccugagaaccggcugguacaccagcgugaucaccaucgagcugagcaacaucaaggagaacaagugcaacggcaccgacgccaaggugaagcugaucaagcaggagcuggacaaguacaagaacgccgugaccgaccugcagcugcugaugcagagcacccccgccgccggcagcggcagcgccaucugcagcggcaucgccgugugcaaggugcugcaccuggagggcgaggugaacaagaucaagaacgcccugcugagcaccaacaaggccguggugagccugagcaacggcgugagcgugcugaccuucaaggugcuggaccugaagaacuacaucgacaagcagcugcugcccauccugaacaagcagagcugcagcauccccaacaucgagaccgugaucgaguuccagcagaagaacaacagacugcuggagaucaccagagaguucagcgugaacgccggcgugaccacccccgugagcaccuacaugcugaccaacagcgagcugcugagccugaucaacgacaugcccaucaccaacgaccagaagaagcugaugagcaacaacgugcagaucgugagacagcagagcuacagcaucaugugcaucaucaaggaggaggugcuggccuacguggugcagcugccccuguacggcgugaucgacacccccugcuggaagcugcacaccagcccccugugcaccaccaacaccaaggagggcagcaacaucugccugaccagaaccgacagaggcugguacugcgacaacgccggcagcgugagcuucuucccccaggccgagaccugcaaggugcagagcaacagaguguucugcgacaccaugaacagccugacccugcccagcgaggugaaccugugcaacaucgacaucuucaaccccaaguacgacugcaagaucaugaccagcaagaccgacgugagcagcagcgugaucaccagccugggcgccaucgugagcugcuacggcaagaccaagugcaccgccagcaacaagaacagaggcaucaucaagaccuucagcaacggcugcgacuacgugagcaacaagggcguggacaccgugagcgugggcaacacccuguacugcgugaacaagcaggagggccagagccuguacgugaagggcgagcccaucaucaacuucuacgacccccugguguuccccagcgacgaguucgacgccagcaucagccaggugaacgagaagaucaaccagagccuggccuucaucagaaagagcgacgagcugcugcacaacgugaacgugggcaagagcaccaccaacaucaugaucaccaccaucaucaucgugaucaucgugauccugcugcugcugaucgccgugggccuguuccuguacugcaaggccagaugaggacuaguggaagcauuuuccuggcugauuaaaagaaauuacucagcuauggucaucuguuccuguuagaaggcuaugcagcauauuauauacuaugcgcauguuaugaaaugcauaauaaaaaauuuuaaaaaaucuaaaagaucuaaaaaaaaaaaaaaaaaaaaaaaaaaaaaaaaaaaaaaaaaaaaaaaaaaaaaaaaaaaaaaaaugcaucccccccccccccccccccccccccccccccaaaggcucuuuucagagccaccagaauu

SEQ ID NO: 15205 - RNA, 1897 nt, Artificial Sequence
  mRNA product Design d-4 comprising derived and/or modified sequence from HRSV(Memphis-37)__AIY60640.1__F-del_DSCav1_mut2 (opt5)
gggagagucccgcagucggcguccagcggcucugcuuguucgugugugugucguugcaggccuuauucaagcuuaccauggagcugcccauccucaagaccaacgccauuacaacgauccuggcugccgugacccuuugcuucgcgagcucccagaauauuacagaagaguuuuaccaaucuaccuguagcgcugucuccaaaggcuaucugggggcccucagaacaggaugguacaccucuguuaucacaauugaacugagcaacaucaaggagaauaaaugcaacggcaccgacgccaaggugaaacuuaucaagcaggaacuggauaaguauaaaaaugcugugacggaccuccagcugcugaugcaguccaccccugccgcugggucuggaagcgccauuuguuccggcaucgcggucugcaaggugcuccaccuggagggggagguuaacaaaauuaagaaugcccuucugagcacaaacaaagcuguggucucucucuccaauggagugagcguucugaccuucaaggugcuugaucugaagaacuacaucgacaaacaacuccugccgauucugaauaagcagucuuguuccauccccaacauugaaacagucaucgaguuucagcagaaaaauaaccggcuccuggaaaucacccgcgaguucagcgugaaugccggcgugacgacaccugucucuaccuauaugcuuacaaacuccgagcugcucagccugauuaacgauaugcccaucaccaaugaccaaaagaaacuuauguccaacaauguucagauugugagacagcagucuuacagcaucaugugcauuaucaaggaagaggugcuggcuuaugucgugcaacucccucuguacggcguuaucgauacccccuguuggaaacugcauacauccccucucugcacgaccaacacaaaggaagggagcaauauuugucugacccggacagaccgcggaugguacugcgauaacgccggcucuguguccuuuuucccgcaggcggagaccuguaagguccagagcaauagaguguuuugcgacacgaugaacucucuuacacugcccagcgaaguuaaucucugcaacaucgauauuuucaauccuaaauaugacuguaagaucaugaccuccaaaaccgaugugucuagcuccgucauuacaagccugggggccaucgugucuugcuacggaaagaccaaauguacagcuuccaacaagaaucggggcaucauuaagacguuuagcaacgggugcgacuaugucucuaauaaaggaguggacaccguuuccgugggcaacacacuuuacugugucaacaagcaagagggccagagccuguaugugaaaggggagcccaucauuaauuucuacgauccucucguuuuucccuccgacgaguucgaugccucuaucagccaggugaacgaaaagauuaaucagucccuggcuuuuauccgcaaaucugacgaacugcuccacaacgucaaugugggaaagagcaccacaaacauuaugaucaccacgaucauuaucgugauuaucguuauucugcuucugcucaucgccgucggccuguuccuguauugcaaggccagaugaggacuaguggaagcauuuuccuggcugauuaaaagaaauuacucagcuauggucaucuguuccuguuagaaggcuaugcagcauauuauauacuaugcgcauguuaugaaaugcauaauaaaaaauuuuaaaaaaucuaaaagaucuaaaaaaaaaaaaaaaaaaaaaaaaaaaaaaaaaaaaaaaaaaaaaaaaaaaaaaaaaaaaaaaaugcaucccccccccccccccccccccccccccccccaaaggcucuuuucagagccaccagaauu

SEQ ID NO: 15206 - RNA, 1897 nt, Artificial Sequence
  mRNA product Design d-4 comprising derived and/or modified sequence from HRSV(Memphis-37)__AIY60640.1__F-del_DSCav1_mut2 (opt6)
gggagagucccgcagucggcguccagcggcucugcuuguucgugugugugucguugcaggccuuauucaagcuuaccauggaacuaccaauacucaaaacaaacgcaauaacaacaauuuuagcugcaguaacacuuuguuucgcauccucccaaaauauaacagaagaauuuuaucaaucaaccugcucagccgucuccaaaggauaucuaggugcacuacgcacuggaugguacacaagugucaucacaauagaacuuuccaacaucaaagaaaauaaauguaauggaacugacgcaaaaguaaaacucauaaaacaagaacuagacaaauacaaaaacgcaguaacagaccuacaacuauuaaugcaaucaacaccagcagcaggauccggcagugccauaugcucuggaauagcagucugcaaaguuuuacacuuagaaggcgaaguaaacaaaaucaaaaacgcccuacuaucuacaaauaaagccgucguaucucucucaaauggaguaucaguacuaacauucaaaguauuagacuuaaaaaacuacaucgauaaacaauuauugccaauauuaaacaaacaaucuugcucaauaccaaauauagaaacagucauagaauuucaacaaaaaaauaaccgauuauuagaaauaacacgagaauuuucaguaaaugccggagucaccacaccaguaucaacauacaugcuaacaaauucagaacuauuaucauuaauaaacgacaugccuauuacaaaugaucaaaaaaaacuaauguccaacaauguacaaauaguccgacaacaaagcuacucaaucauguguauaauaaaagaagaaguacuugcauacguaguacaauuaccacuauacggaguuaucgacacaccaugcuggaaacuccacacuucaccacucugcaccacaaacacaaaagaaggcucaaacauaugccuaacaagaacagaccgaggaugguacugcgacaacgcaggaucaguaucauucuucccacaagcagaaacuugcaaaguacaaucuaacagaguuuucugugacaccaugaauagccuaacacuccccuccgaaguuaaccuauguaacauagauauauuuaaucccaaauaugauugcaaaaucaugacaucuaaaaccgacguaucaucaucuguaaucacaucacuaggugccauagucucaugcuacggcaaaacaaaaugcaccgccucaaacaaaaaccgagguauaauaaaaaccuucaguaauggaugugacuacguaucaaacaaagguguugauaccguaagcgucggcaacacccuauacugcguaaauaaacaagaaggccaaucacuauacgucaaaggcgaaccaauuauuaacuucuaugacccacucgucuuucccuccgacgaauuugacgcaagcauaucacaaguaaacgaaaaaauaaaccaaucacuagcauucauacgcaaaucagaugaacuacuacauaacguaaacguaggaaaauccacuacaaauauaaugaucacaacaauaauaaucguaauuauagucauauuauuacuacuaauagcaguaggacuuuuccuauacuguaaagcaagauaaggacuaguggaagcauuuuccuggcugauuaaaagaaauuacucagcuauggucaucuguuccuguuagaaggcuaugcagcauauuauauacuaugcgcauguuaugaaaugcauaauaaaaaauuuuaaaaaaucuaaaagaucuaaaaaaaaaaaaaaaaaaaaaaaaaaaaaaaaaaaaaaaaaaaaaaaaaaaaaaaaaaaaaaaaugcaucccccccccccccccccccccccccccccccaaaggcucuuuucagagccaccagaauu

SEQ ID NO: 15207 - RNA, 1897 nt, Artificial Sequence
  mRNA product Design d-4 comprising derived and/or modified sequence from HRSV(Memphis-37)__AIY60640.1__F-del_DSCav1_mut2 (opt11)
gggagagucccgcagucggcguccagcggcucugcuuguucgugugugugucguugcaggccuuauucaagcuuaccauggaacuucccauccucaagaccaacgcuauuacgaccauccucgccgcagucacccucugcuucgcgucaucccaaaacaucaccgaagaauuuuaccaauccacaugcuccgcagucucaaaaggcuaccuaggagcccuacgcaccggaugguacacauccgucaucacaaucgaacucuccaacauaaaagaaaacaaaugcaacggcaccgaugccaaaguaaaacugauuaaacaagaacucgacaaauacaagaacgccgucacagaccuacagcuccucaugcaaucaacucccgccgccggcagcggauccgcuaucugcucaggcaucgccguaugcaaaguccuccaccuagaaggcgaaguaaacaaaaucaagaacgcacuacucucaacaaacaaagccgucgucucccucuccaacggcgucuccguccuuaccuucaaaguccucgaccuuaagaacuacauugacaaacaacuccuacccauccucaacaaacaauccugcucuauaccuaauauagaaaccguaaucgaauuucaacagaaaaacaaccgccuccucgaaauuacccgcgaguucucaguaaacgccggcguaaccacccccgucuccaccuacaugcucacaaauucagaacuccucagccucaucaacgacaugcccauaaccaacgaccaaaagaaacucaugucaaacaacguccaaaucgucaggcaacaaagcuacagcaucaugugcaucauuaaagaagaaguacucgccuacgucgugcaacuaccccucuacggcgucauagacacacccugcuggaaacuucacacaucaccgcucugcaccacaaacaccaaagaaggcaguaacauaugccucacccgaaccgaccgcggaugguacugcgacaacgccggauccgucagcuucuucccacaagccgaaaccugcaaaguacaauccaaccgagucuucugcgacaccaugaacucucuuacgcuccccucagaagucaaccuaugcaacaucgacaucuucaaccccaaauacgacugcaaaaucaugaccuccaaaacagacgucuccuccucagugauaaccucccucggcgccauugucuccugcuacggcaaaaccaaaugcaccgccuccaacaaaaaccgugggaucaucaaaaccuucucaaacggcugcgacuacguauccaauaagggugucgacacagucuccguaggcaauacccucuauugcgucaacaaacaagaaggccaaucccucuacgucaaaggcgaaccuaucaucaacuucuacgacccgcuagucuuccccucagacgaguucgacgcauccaucucacaagucaacgaaaagaucaaccagucccucgcauucauccgaaaauccgacgaacuucuccacaacguuaacgucggcaaauccaccacuaacauaaugaucaccacgaucaucauaguaauuaucgucauacuccuccuccuaaucgcugucggacucuuccucuacugcaaggcccgcuaaggacuaguggaagcauuuuccuggcugauuaaaagaaauuacucagcuauggucaucuguuccuguuagaaggcuaugcagcauauuauauacuaugcgcauguuaugaaaugcauaauaaaaaauuuuaaaaaaucuaaaagaucuaaaaaaaaaaaaaaaaaaaaaaaaaaaaaaaaaaaaaaaaaaaaaaaaaaaaaaaaaaaaaaaaugcaucccccccccccccccccccccccccccccccaaaggcucuuuucagagccaccagaauu

SEQ ID NO: 15208 - RNA, 1994 nt, Artificial Sequence
  mRNA product Design d-5 comprising derived and/or modified sequence from HRSV(Memphis-37)__AIY60640.1__F-del_DSCav1_mut2 (opt1)
gggagagggcgcuuggcuugcaaggacccugagcugcggcauugaagcacacccaacccaacucgacugaagucagccucacugaaccggaucugagaaucuucucucucugggcuugccagggcucuccgaaccuagcuagcauccucuucaauuccaacuagaaagcuuaccauggagcugcccauccucaagaccaacgccaucaccacgauccuggccgcggugacccugugcuucgccagcucccagaacaucaccgaggaguucuaccagagcacgugcuccgccgucagcaagggcuaccucggcgcccugcgcaccgggugguacaccagcgugaucaccaucgagcuguccaacaucaaggagaacaagugcaacggcaccgacgccaaggugaagcucaucaagcaggagcuggacaaguacaagaacgcggucacggaccugcagcuccugaugcagagcaccccggccgccggcuccgggagcgcgaucugcuccggcaucgccgucugcaaggugcugcaccucgagggcgaggugaacaagaucaagaacgcccugcuguccaccaacaaggccgucgugagccucuccaacggggugagcguccugaccuucaaggugcuggaccucaagaacuacaucgacaagcagcugcugcccauccugaacaagcagagcugcuccauccccaacaucgagaccgucaucgaguuccagcagaagaacaaccgccuccuggagaucacgcgggaguucagcgugaacgcgggcgugaccacccccgucuccaccuacaugcugacgaacagcgagcuccugucccugaucaacgacaugccgaucaccaacgaccagaagaagcucaugagcaacaacgugcagaucgugcgccagcaguccuacagcaucaugugcaucaucaaggaggagguccuggccuacguggugcagcugccccucuacggggucaucgacacccccugcuggaagcugcacaccagcccccugugcacgaccaacaccaaggagggcuccaacaucugccucacccggacggaccgcgggugguacugcgacaacgccggcagcguguccuucuucccgcaggccgagaccugcaagguccagagcaaccggguguucugcgacaccaugaacucccugacccugcccagcgaggugaaccucugcaacaucgacaucuucaaccccaaguacgacugcaagaucaugacguccaagaccgacgucagcuccagcgugaucaccucccugggcgccaucgugagcugcuacgggaagaccaagugcacggcgagcaacaagaaccgcggcaucaucaagaccuucuccaacgggugcgacuacgucagcaacaagggcguggacaccguguccgucggcaacacccuguacugcgugaacaagcaggagggccagagccucuacgugaagggggagcccaucaucaacuucuacgacccgcuggucuuccccuccgacgaguucgacgccagcaucucccaggugaacgagaagaucaaccagagccuggccuucauccggaaguccgacgagcuccugcacaacgugaacgucggcaagagcaccacgaacaucaugaucaccaccaucaucaucgugaucaucgugauccugcugcuccugaucgccgucgggcuguuccucuacugcaaggcccgcugaggacuaguggaagcauuuuccuggcugauuaaaagaaauuacucagcuauggucaucuguuccuguuagaaggcuaugcagcauauuauauacuaugcgcauguuaugaaaugcauaauaaaaaauuuuaaaaaaucuaaaagaucuaaaaaaaaaaaaaaaaaaaaaaaaaaaaaaaaaaaaaaaaaaaaaaaaaaaaaaaaaaaaaaaaugcaucccccccccccccccccccccccccccccccaaaggcucuuuucagagccaccagaauu

SEQ ID NO: 15209 - RNA, 1994 nt, Artificial Sequence
  mRNA product Design d-5 comprising derived and/or modified sequence from HRSV(Memphis-37)__AIY60640.1__F-del_DSCav1_mut2 (opt1)
gggagagggcgcuuggcuugcaaggacccugagcugcggcauugaagcacacccaacccaacucgacugaagucagccucacugaaccggaucugagaaucuucucucucugggcuugccagggcucuccgaaccuagcuagcauccucuucaauuccaacuagaaagcuuaccauggagcugcccauccucaagaccaacgccaucaccacgauccuggccgcggugacccugugcuucgccagcucccagaacaucaccgaggaguucuaccagagcacgugcuccgccgucagcaagggcuaccucggggcccugcgcaccggcugguacaccuccgugaucaccaucgagcugagcaacaucaaggagaacaagugcaacgggaccgacgccaaggugaagcucaucaagcaggagcuggacaaguacaagaacgcggucacggaccugcagcuccugaugcaguccaccccggccgccggcagcggguccgccaucugcagcggcaucgcggugugcaaggugcugcaccucgagggcgaggucaacaagaucaagaacgcccugcuguccaccaacaaggccguggugagccucuccaacggggucagcgugcugaccuucaaggugcuggaccucaagaacuacaucgacaagcagcugcugcccauccucaacaagcaguccugcagcauccccaacaucgagacggucaucgaguuccagcagaagaacaaccggcugcuggagaucacccgcgaguucuccgugaacgccggcgugaccacccccgucagcacguacaugcucaccaacuccgagcugcugagccucaucaacgacaugccgaucaccaacgaccagaagaagcugaugagcaacaacgugcagaucgugcggcagcaguccuacagcaucaugugcaucaucaaggaggagguccuggccuacguggugcagcucccccuguacggggucaucgacacccccugcuggaagcugcacacgagcccccucugcaccaccaacaccaaggagggcuccaacaucugccugacgcgcaccgaccgggggugguacugcgacaacgcgggcuccgugagcuucuucccgcaggccgagaccugcaaggugcaguccaaccgcgucuucugcgacaccaugaacagccugacgcuccccuccgaggugaaccugugcaacaucgacaucuucaaccccaaguacgacugcaagaucaugaccagcaagaccgacgucuccagcuccgugaucaccagccugggcgccaucguguccugcuacgggaagacgaagugcaccgccagcaacaagaaccggggcaucaucaagaccuucuccaacgggugcgacuacgucagcaacaagggcguggacaccguguccgucggcaacacgcucuacugcgugaacaagcaggaggggcagagccuguacgugaagggcgagcccaucaucaacuucuacgacccgcuggucuuccccagcgacgaguucgacgccuccaucagccaggugaacgagaagaucaaccagucccucgcguucauccgcaagagcgacgagcugcugcacaacgugaacgucgggaaguccaccaccaacaucaugaucaccaccaucaucaucgugaucaucgugauccuccugcugcucaucgccgucggccuguuccuguacugcaaggcccggugaggacuaguggaagcauuuuccuggcugauuaaaagaaauuacucagcuauggucaucuguuccuguuagaaggcuaugcagcauauuauauacuaugcgcauguuaugaaaugcauaauaaaaaauuuuaaaaaaucuaaaagaucuaaaaaaaaaaaaaaaaaaaaaaaaaaaaaaaaaaaaaaaaaaaaaaaaaaaaaaaaaaaaaaaaugcaucccccccccccccccccccccccccccccccaaaggcucuuuucagagccaccagaauu

SEQ ID NO: 15210 - RNA, 1994 nt, Artificial Sequence
  mRNA product Design d-5 comprising derived and/or modified sequence from HRSV(Memphis-37)__AIY60640.1__F-del_DSCav1_mut2 (opt2)
gggagagggcgcuuggcuugcaaggacccugagcugcggcauugaagcacacccaacccaacucgacugaagucagccucacugaaccggaucugagaaucuucucucucugggcuugccagggcucuccgaaccuagcuagcauccucuucaauuccaacuagaaagcuuaccauggagcuccccauccucaagaccaacgccaucaccaccauccucgccgccgucacccucugcuucgccuccucccagaacaucaccgaggaguucuaccaguccaccugcuccgccgucuccaagggcuaccucggcgcccuccgcaccggcugguacaccuccgucaucaccaucgagcucuccaacaucaaggagaacaagugcaacggcaccgacgccaaggucaagcucaucaagcaggagcucgacaaguacaagaacgccgucaccgaccuccagcuccucaugcaguccacccccgccgccggcuccggcuccgccaucugcuccggcaucgccgucugcaagguccuccaccucgagggcgaggucaacaagaucaagaacgcccuccucuccaccaacaaggccgucgucucccucuccaacggcgucuccguccucaccuucaagguccucgaccucaagaacuacaucgacaagcagcuccuccccauccucaacaagcaguccugcuccauccccaacaucgagaccgucaucgaguuccagcagaagaacaaccgccuccucgagaucacccgcgaguucuccgucaacgccggcgucaccacccccgucuccaccuacaugcucaccaacuccgagcuccucucccucaucaacgacaugcccaucaccaacgaccagaagaagcucauguccaacaacguccagaucguccgccagcaguccuacuccaucaugugcaucaucaaggaggagguccucgccuacgucguccagcucccccucuacggcgucaucgacacccccugcuggaagcuccacaccuccccccucugcaccaccaacaccaaggagggcuccaacaucugccucacccgcaccgaccgcggcugguacugcgacaacgccggcuccgucuccuucuucccccaggccgagaccugcaagguccaguccaaccgcgucuucugcgacaccaugaacucccucacccuccccuccgaggucaaccucugcaacaucgacaucuucaaccccaaguacgacugcaagaucaugaccuccaagaccgacgucuccuccuccgucaucaccucccucggcgccaucgucuccugcuacggcaagaccaagugcaccgccuccaacaagaaccgcggcaucaucaagaccuucuccaacggcugcgacuacgucuccaacaagggcgucgacaccgucuccgucggcaacacccucuacugcgucaacaagcaggagggccagucccucuacgucaagggcgagcccaucaucaacuucuacgacccccucgucuuccccuccgacgaguucgacgccuccaucucccaggucaacgagaagaucaaccagucccucgccuucauccgcaaguccgacgagcuccuccacaacgucaacgucggcaaguccaccaccaacaucaugaucaccaccaucaucaucgucaucaucgucauccuccuccuccucaucgccgucggccucuuccucuacugcaaggcccgcugaggacuaguggaagcauuuuccuggcugauuaaaagaaauuacucagcuauggucaucuguuccuguuagaaggcuaugcagcauauuauauacuaugcgcauguuaugaaaugcauaauaaaaaauuuuaaaaaaucuaaaagaucuaaaaaaaaaaaaaaaaaaaaaaaaaaaaaaaaaaaaaaaaaaaaaaaaaaaaaaaaaaaaaaaaugcaucccccccccccccccccccccccccccccccaaaggcucuuuucagagccaccagaauu

SEQ ID NO: 15211 - RNA, 1994 nt, Artificial Sequence
  mRNA product Design d-5 comprising derived and/or modified sequence from HRSV(Memphis-37)__AIY60640.1__F-del_DSCav1_mut2 (opt3)
gggagagggcgcuuggcuugcaaggacccugagcugcggcauugaagcacacccaacccaacucgacugaagucagccucacugaaccggaucugagaaucuucucucucugggcuugccagggcucuccgaaccuagcuagcauccucuucaauuccaacuagaaagcuuaccauggagcugcccauccucaagaccaacgccauuacaacuauacuugcugcagugacgcugugcuucgccagcucccagaauaucaccgaagaguuuuaccaaucuacauguucagcggucaguaaaggcuauuugggggcuuuaagaacuggaugguacaccagcguuauuacaaucgaacuguccaacauuaaggagaauaaaugcaacgguaccgacgccaaggugaaacuaaucaagcaggaacucgauaaguauaaaaaugcaguaacugaccugcagcuucugaugcagucuacuccugccgcuggcucggggucagcaauauguagcggaaucgccgugugcaaggucuugcaccucgagggcgaggugaacaaaauuaagaaugcucugcugaguaccaacaaagccguugugucccucucuaauggugucagcguguuaacguucaagguacuggaucuuaagaacuacaucgacaaacaauugcugccaauucuaaauaagcaguccuguucaaucccgaacauagaaacuguuauugaguuucagcagaaaaauaacaggcuccuggaaaucacccgggaguucagugugaaugcgggggucacaacucccgugagcaccuauaugcuuacaaacucugagcuguugucccucauuaacgauaugccuaucaccaaugaccaaaagaaacugaugucaaacaaugugcagaucguccgccagcagagcuacaguauuaugugcauaaucaaggaagagguuuuagcauaugugguacaacugccacucuacggagugauugauacgcccuguuggaaacuucauacuucuccucugugcacaaccaacacuaaggaaggcuccaauaucuguuugacacgaaccgaccguggcugguacugcgauaacgccgggagcgucucguuuuucccacaggcugagacguguaaggugcagucuaauagaguuuucugcgacaccaugaacucccuaacacugcccucagaagugaaucucugcaacauagauauuuucaauccuaaauaugacuguaagaucaugacaaguaaaaccgaugucagcuccucugugaucacaagccugggagccauuguaucaugcuacgguaagacuaaauguaccgcaaguaacaagaauaggggcaucauuaagacauuuuccaacgggugcgacuauguuagcaauaaaggaguggacaccgucucugugggcaacacucuuuacugugucaacaagcaagagggucagucacuguaugugaaaggggagccaauaaucaauuucuacgauccguugguuuuucccagugacgaauuugaugcuagcauuucccaggugaacgagaagaucaaucagucucucgccuuuauccggaaaucggacgaacuguuacacaacguaaaugucggaaagagcacgacaaacauuaugauaaccacuaucauuaucgugauuaucguuauacugcuacuccugaucgcggugggccuuuucuuguauugcaaggcccgcugaggacuaguggaagcauuuuccuggcugauuaaaagaaauuacucagcuauggucaucuguuccuguuagaaggcuaugcagcauauuauauacuaugcgcauguuaugaaaugcauaauaaaaaauuuuaaaaaaucuaaaagaucuaaaaaaaaaaaaaaaaaaaaaaaaaaaaaaaaaaaaaaaaaaaaaaaaaaaaaaaaaaaaaaaaugcaucccccccccccccccccccccccccccccccaaaggcucuuuucagagccaccagaauu

SEQ ID NO: 15212 - RNA, 1994 nt, Artificial Sequence
  mRNA product Design d-5 comprising derived and/or modified sequence from HRSV(Memphis-37)__AIY60640.1__F-del_DSCav1_mut2 (opt4)
gggagagggcgcuuggcuugcaaggacccugagcugcggcauugaagcacacccaacccaacucgacugaagucagccucacugaaccggaucugagaaucuucucucucugggcuugccagggcucuccgaaccuagcuagcauccucuucaauuccaacuagaaagcuuaccauggagcugcccauccugaagaccaacgccaucaccaccauccuggccgccgugacccugugcuucgccagcagccagaacaucaccgaggaguucuaccagagcaccugcagcgccgugagcaagggcuaccugggcgcccugagaaccggcugguacaccagcgugaucaccaucgagcugagcaacaucaaggagaacaagugcaacggcaccgacgccaaggugaagcugaucaagcaggagcuggacaaguacaagaacgccgugaccgaccugcagcugcugaugcagagcacccccgccgccggcagcggcagcgccaucugcagcggcaucgccgugugcaaggugcugcaccuggagggcgaggugaacaagaucaagaacgcccugcugagcaccaacaaggccguggugagccugagcaacggcgugagcgugcugaccuucaaggugcuggaccugaagaacuacaucgacaagcagcugcugcccauccugaacaagcagagcugcagcauccccaacaucgagaccgugaucgaguuccagcagaagaacaacagacugcuggagaucaccagagaguucagcgugaacgccggcgugaccacccccgugagcaccuacaugcugaccaacagcgagcugcugagccugaucaacgacaugcccaucaccaacgaccagaagaagcugaugagcaacaacgugcagaucgugagacagcagagcuacagcaucaugugcaucaucaaggaggaggugcuggccuacguggugcagcugccccuguacggcgugaucgacacccccugcuggaagcugcacaccagcccccugugcaccaccaacaccaaggagggcagcaacaucugccugaccagaaccgacagaggcugguacugcgacaacgccggcagcgugagcuucuucccccaggccgagaccugcaaggugcagagcaacagaguguucugcgacaccaugaacagccugacccugcccagcgaggugaaccugugcaacaucgacaucuucaaccccaaguacgacugcaagaucaugaccagcaagaccgacgugagcagcagcgugaucaccagccugggcgccaucgugagcugcuacggcaagaccaagugcaccgccagcaacaagaacagaggcaucaucaagaccuucagcaacggcugcgacuacgugagcaacaagggcguggacaccgugagcgugggcaacacccuguacugcgugaacaagcaggagggccagagccuguacgugaagggcgagcccaucaucaacuucuacgacccccugguguuccccagcgacgaguucgacgccagcaucagccaggugaacgagaagaucaaccagagccuggccuucaucagaaagagcgacgagcugcugcacaacgugaacgugggcaagagcaccaccaacaucaugaucaccaccaucaucaucgugaucaucgugauccugcugcugcugaucgccgugggccuguuccuguacugcaaggccagaugaggacuaguggaagcauuuuccuggcugauuaaaagaaauuacucagcuauggucaucuguuccuguuagaaggcuaugcagcauauuauauacuaugcgcauguuaugaaaugcauaauaaaaaauuuuaaaaaaucuaaaagaucuaaaaaaaaaaaaaaaaaaaaaaaaaaaaaaaaaaaaaaaaaaaaaaaaaaaaaaaaaaaaaaaaugcaucccccccccccccccccccccccccccccccaaaggcucuuuucagagccaccagaauu

SEQ ID NO: 15213 - RNA, 1994 nt, Artificial Sequence
  mRNA product Design d-5 comprising derived and/or modified sequence from HRSV(Memphis-37)__AIY60640.1__F-del_DSCav1_mut2 (opt5)
gggagagggcgcuuggcuugcaaggacccugagcugcggcauugaagcacacccaacccaacucgacugaagucagccucacugaaccggaucugagaaucuucucucucugggcuugccagggcucuccgaaccuagcuagcauccucuucaauuccaacuagaaagcuuaccauggagcugcccauccucaagaccaacgccauuacaacgauccuggcugccgugacccuuugcuucgcgagcucccagaauauuacagaagaguuuuaccaaucuaccuguagcgcugucuccaaaggcuaucugggggcccucagaacaggaugguacaccucuguuaucacaauugaacugagcaacaucaaggagaauaaaugcaacggcaccgacgccaaggugaaacuuaucaagcaggaacuggauaaguauaaaaaugcugugacggaccuccagcugcugaugcaguccaccccugccgcugggucuggaagcgccauuuguuccggcaucgcggucugcaaggugcuccaccuggagggggagguuaacaaaauuaagaaugcccuucugagcacaaacaaagcuguggucucucucuccaauggagugagcguucugaccuucaaggugcuugaucugaagaacuacaucgacaaacaacuccugccgauucugaauaagcagucuuguuccauccccaacauugaaacagucaucgaguuucagcagaaaaauaaccggcuccuggaaaucacccgcgaguucagcgugaaugccggcgugacgacaccugucucuaccuauaugcuuacaaacuccgagcugcucagccugauuaacgauaugcccaucaccaaugaccaaaagaaacuuauguccaacaauguucagauugugagacagcagucuuacagcaucaugugcauuaucaaggaagaggugcuggcuuaugucgugcaacucccucuguacggcguuaucgauacccccuguuggaaacugcauacauccccucucugcacgaccaacacaaaggaagggagcaauauuugucugacccggacagaccgcggaugguacugcgauaacgccggcucuguguccuuuuucccgcaggcggagaccuguaagguccagagcaauagaguguuuugcgacacgaugaacucucuuacacugcccagcgaaguuaaucucugcaacaucgauauuuucaauccuaaauaugacuguaagaucaugaccuccaaaaccgaugugucuagcuccgucauuacaagccugggggccaucgugucuugcuacggaaagaccaaauguacagcuuccaacaagaaucggggcaucauuaagacguuuagcaacgggugcgacuaugucucuaauaaaggaguggacaccguuuccgugggcaacacacuuuacugugucaacaagcaagagggccagagccuguaugugaaaggggagcccaucauuaauuucuacgauccucucguuuuucccuccgacgaguucgaugccucuaucagccaggugaacgaaaagauuaaucagucccuggcuuuuauccgcaaaucugacgaacugcuccacaacgucaaugugggaaagagcaccacaaacauuaugaucaccacgaucauuaucgugauuaucguuauucugcuucugcucaucgccgucggccuguuccuguauugcaaggccagaugaggacuaguggaagcauuuuccuggcugauuaaaagaaauuacucagcuauggucaucuguuccuguuagaaggcuaugcagcauauuauauacuaugcgcauguuaugaaaugcauaauaaaaaauuuuaaaaaaucuaaaagaucuaaaaaaaaaaaaaaaaaaaaaaaaaaaaaaaaaaaaaaaaaaaaaaaaaaaaaaaaaaaaaaaaugcaucccccccccccccccccccccccccccccccaaaggcucuuuucagagccaccagaauu

SEQ ID NO: 15214 - RNA, 1994 nt, Artificial Sequence
  mRNA product Design d-5 comprising derived and/or modified sequence from HRSV(Memphis-37)__AIY60640.1__F-del_DSCav1_mut2 (opt6)
gggagagggcgcuuggcuugcaaggacccugagcugcggcauugaagcacacccaacccaacucgacugaagucagccucacugaaccggaucugagaaucuucucucucugggcuugccagggcucuccgaaccuagcuagcauccucuucaauuccaacuagaaagcuuaccauggaacuaccaauacucaaaacaaacgcaauaacaacaauuuuagcugcaguaacacuuuguuucgcauccucccaaaauauaacagaagaauuuuaucaaucaaccugcucagccgucuccaaaggauaucuaggugcacuacgcacuggaugguacacaagugucaucacaauagaacuuuccaacaucaaagaaaauaaauguaauggaacugacgcaaaaguaaaacucauaaaacaagaacuagacaaauacaaaaacgcaguaacagaccuacaacuauuaaugcaaucaacaccagcagcaggauccggcagugccauaugcucuggaauagcagucugcaaaguuuuacacuuagaaggcgaaguaaacaaaaucaaaaacgcccuacuaucuacaaauaaagccgucguaucucucucaaauggaguaucaguacuaacauucaaaguauuagacuuaaaaaacuacaucgauaaacaauuauugccaauauuaaacaaacaaucuugcucaauaccaaauauagaaacagucauagaauuucaacaaaaaaauaaccgauuauuagaaauaacacgagaauuuucaguaaaugccggagucaccacaccaguaucaacauacaugcuaacaaauucagaacuauuaucauuaauaaacgacaugccuauuacaaaugaucaaaaaaaacuaauguccaacaauguacaaauaguccgacaacaaagcuacucaaucauguguauaauaaaagaagaaguacuugcauacguaguacaauuaccacuauacggaguuaucgacacaccaugcuggaaacuccacacuucaccacucugcaccacaaacacaaaagaaggcucaaacauaugccuaacaagaacagaccgaggaugguacugcgacaacgcaggaucaguaucauucuucccacaagcagaaacuugcaaaguacaaucuaacagaguuuucugugacaccaugaauagccuaacacuccccuccgaaguuaaccuauguaacauagauauauuuaaucccaaauaugauugcaaaaucaugacaucuaaaaccgacguaucaucaucuguaaucacaucacuaggugccauagucucaugcuacggcaaaacaaaaugcaccgccucaaacaaaaaccgagguauaauaaaaaccuucaguaauggaugugacuacguaucaaacaaagguguugauaccguaagcgucggcaacacccuauacugcguaaauaaacaagaaggccaaucacuauacgucaaaggcgaaccaauuauuaacuucuaugacccacucgucuuucccuccgacgaauuugacgcaagcauaucacaaguaaacgaaaaaauaaaccaaucacuagcauucauacgcaaaucagaugaacuacuacauaacguaaacguaggaaaauccacuacaaauauaaugaucacaacaauaauaaucguaauuauagucauauuauuacuacuaauagcaguaggacuuuuccuauacuguaaagcaagauaaggacuaguggaagcauuuuccuggcugauuaaaagaaauuacucagcuauggucaucuguuccuguuagaaggcuaugcagcauauuauauacuaugcgcauguuaugaaaugcauaauaaaaaauuuuaaaaaaucuaaaagaucuaaaaaaaaaaaaaaaaaaaaaaaaaaaaaaaaaaaaaaaaaaaaaaaaaaaaaaaaaaaaaaaaugcaucccccccccccccccccccccccccccccccaaaggcucuuuucagagccaccagaauu

SEQ ID NO: 15215 - RNA, 1994 nt, Artificial Sequence
  mRNA product Design d-5 comprising derived and/or modified sequence from HRSV(Memphis-37)__AIY60640.1__F-del_DSCav1_mut2 (opt11)
gggagagggcgcuuggcuugcaaggacccugagcugcggcauugaagcacacccaacccaacucgacugaagucagccucacugaaccggaucugagaaucuucucucucugggcuugccagggcucuccgaaccuagcuagcauccucuucaauuccaacuagaaagcuuaccauggaacuucccauccucaagaccaacgcuauuacgaccauccucgccgcagucacccucugcuucgcgucaucccaaaacaucaccgaagaauuuuaccaauccacaugcuccgcagucucaaaaggcuaccuaggagcccuacgcaccggaugguacacauccgucaucacaaucgaacucuccaacauaaaagaaaacaaaugcaacggcaccgaugccaaaguaaaacugauuaaacaagaacucgacaaauacaagaacgccgucacagaccuacagcuccucaugcaaucaacucccgccgccggcagcggauccgcuaucugcucaggcaucgccguaugcaaaguccuccaccuagaaggcgaaguaaacaaaaucaagaacgcacuacucucaacaaacaaagccgucgucucccucuccaacggcgucuccguccuuaccuucaaaguccucgaccuuaagaacuacauugacaaacaacuccuacccauccucaacaaacaauccugcucuauaccuaauauagaaaccguaaucgaauuucaacagaaaaacaaccgccuccucgaaauuacccgcgaguucucaguaaacgccggcguaaccacccccgucuccaccuacaugcucacaaauucagaacuccucagccucaucaacgacaugcccauaaccaacgaccaaaagaaacucaugucaaacaacguccaaaucgucaggcaacaaagcuacagcaucaugugcaucauuaaagaagaaguacucgccuacgucgugcaacuaccccucuacggcgucauagacacacccugcuggaaacuucacacaucaccgcucugcaccacaaacaccaaagaaggcaguaacauaugccucacccgaaccgaccgcggaugguacugcgacaacgccggauccgucagcuucuucccacaagccgaaaccugcaaaguacaauccaaccgagucuucugcgacaccaugaacucucuuacgcuccccucagaagucaaccuaugcaacaucgacaucuucaaccccaaauacgacugcaaaaucaugaccuccaaaacagacgucuccuccucagugauaaccucccucggcgccauugucuccugcuacggcaaaaccaaaugcaccgccuccaacaaaaaccgugggaucaucaaaaccuucucaaacggcugcgacuacguauccaauaagggugucgacacagucuccguaggcaauacccucuauugcgucaacaaacaagaaggccaaucccucuacgucaaaggcgaaccuaucaucaacuucuacgacccgcuagucuuccccucagacgaguucgacgcauccaucucacaagucaacgaaaagaucaaccagucccucgcauucauccgaaaauccgacgaacuucuccacaacguuaacgucggcaaauccaccacuaacauaaugaucaccacgaucaucauaguaauuaucgucauacuccuccuccuaaucgcugucggacucuuccucuacugcaaggcccgcuaaggacuaguggaagcauuuuccuggcugauuaaaagaaauuacucagcuauggucaucuguuccuguuagaaggcuaugcagcauauuauauacuaugcgcauguuaugaaaugcauaauaaaaaauuuuaaaaaaucuaaaagaucuaaaaaaaaaaaaaaaaaaaaaaaaaaaaaaaaaaaaaaaaaaaaaaaaaaaaaaaaaaaaaaaaugcaucccccccccccccccccccccccccccccccaaaggcucuuuucagagccaccagaauu

SEQ ID NO: 15216 - RNA, 1874 nt, Artificial Sequence
  mRNA product Design e-1 comprising derived and/or modified sequence from HRSV(Memphis-37)__AIY60640.1__F-del_DSCav1_mut2 (opt1)
gggagaauauaagcguuggcggagcgucgguuguagcacucugcgcgcccgcucuucugcugcuguuugucuacuuccuccugcuuccccgccgccgccgccgccaucaagcuuaccauggagcugcccauccucaagaccaacgccaucaccacgauccuggccgcggugacccugugcuucgccagcucccagaacaucaccgaggaguucuaccagagcacgugcuccgccgucagcaagggcuaccucggcgcccugcgcaccgggugguacaccagcgugaucaccaucgagcuguccaacaucaaggagaacaagugcaacggcaccgacgccaaggugaagcucaucaagcaggagcuggacaaguacaagaacgcggucacggaccugcagcuccugaugcagagcaccccggccgccggcuccgggagcgcgaucugcuccggcaucgccgucugcaaggugcugcaccucgagggcgaggugaacaagaucaagaacgcccugcuguccaccaacaaggccgucgugagccucuccaacggggugagcguccugaccuucaaggugcuggaccucaagaacuacaucgacaagcagcugcugcccauccugaacaagcagagcugcuccauccccaacaucgagaccgucaucgaguuccagcagaagaacaaccgccuccuggagaucacgcgggaguucagcgugaacgcgggcgugaccacccccgucuccaccuacaugcugacgaacagcgagcuccugucccugaucaacgacaugccgaucaccaacgaccagaagaagcucaugagcaacaacgugcagaucgugcgccagcaguccuacagcaucaugugcaucaucaaggaggagguccuggccuacguggugcagcugccccucuacggggucaucgacacccccugcuggaagcugcacaccagcccccugugcacgaccaacaccaaggagggcuccaacaucugccucacccggacggaccgcgggugguacugcgacaacgccggcagcguguccuucuucccgcaggccgagaccugcaagguccagagcaaccggguguucugcgacaccaugaacucccugacccugcccagcgaggugaaccucugcaacaucgacaucuucaaccccaaguacgacugcaagaucaugacguccaagaccgacgucagcuccagcgugaucaccucccugggcgccaucgugagcugcuacgggaagaccaagugcacggcgagcaacaagaaccgcggcaucaucaagaccuucuccaacgggugcgacuacgucagcaacaagggcguggacaccguguccgucggcaacacccuguacugcgugaacaagcaggagggccagagccucuacgugaagggggagcccaucaucaacuucuacgacccgcuggucuuccccuccgacgaguucgacgccagcaucucccaggugaacgagaagaucaaccagagccuggccuucauccggaaguccgacgagcuccugcacaacgugaacgucggcaagagcaccacgaacaucaugaucaccaccaucaucaucgugaucaucgugauccugcugcuccugaucgccgucgggcuguuccucuacugcaaggcccgcugaggacuaguguccaccugucccuccugggcugcuggauugucucguuuuccugccaaauaaacaggaucagcgcuuuacagaucuaaaaaaaaaaaaaaaaaaaaaaaaaaaaaaaaaaaaaaaaaaaaaaaaaaaaaaaaaaaaaaaaugcaucccccccccccccccccccccccccccccccaaaggcucuuuucagagccaccagaauu

SEQ ID NO: 15217 - RNA, 1874 nt, Artificial Sequence
  mRNA product Design e-1 comprising derived and/or modified sequence from HRSV(Memphis-37)__AIY60640.1__F-del_DSCav1_mut2 (opt1)
gggagaauauaagcguuggcggagcgucgguuguagcacucugcgcgcccgcucuucugcugcuguuugucuacuuccuccugcuuccccgccgccgccgccgccaucaagcuuaccauggagcugcccauccucaagaccaacgccaucaccacgauccuggccgcggugacccugugcuucgccagcucccagaacaucaccgaggaguucuaccagagcacgugcuccgccgucagcaagggcuaccucggggcccugcgcaccggcugguacaccuccgugaucaccaucgagcugagcaacaucaaggagaacaagugcaacgggaccgacgccaaggugaagcucaucaagcaggagcuggacaaguacaagaacgcggucacggaccugcagcuccugaugcaguccaccccggccgccggcagcggguccgccaucugcagcggcaucgcggugugcaaggugcugcaccucgagggcgaggucaacaagaucaagaacgcccugcuguccaccaacaaggccguggugagccucuccaacggggucagcgugcugaccuucaaggugcuggaccucaagaacuacaucgacaagcagcugcugcccauccucaacaagcaguccugcagcauccccaacaucgagacggucaucgaguuccagcagaagaacaaccggcugcuggagaucacccgcgaguucuccgugaacgccggcgugaccacccccgucagcacguacaugcucaccaacuccgagcugcugagccucaucaacgacaugccgaucaccaacgaccagaagaagcugaugagcaacaacgugcagaucgugcggcagcaguccuacagcaucaugugcaucaucaaggaggagguccuggccuacguggugcagcucccccuguacggggucaucgacacccccugcuggaagcugcacacgagcccccucugcaccaccaacaccaaggagggcuccaacaucugccugacgcgcaccgaccgggggugguacugcgacaacgcgggcuccgugagcuucuucccgcaggccgagaccugcaaggugcaguccaaccgcgucuucugcgacaccaugaacagccugacgcuccccuccgaggugaaccugugcaacaucgacaucuucaaccccaaguacgacugcaagaucaugaccagcaagaccgacgucuccagcuccgugaucaccagccugggcgccaucguguccugcuacgggaagacgaagugcaccgccagcaacaagaaccggggcaucaucaagaccuucuccaacgggugcgacuacgucagcaacaagggcguggacaccguguccgucggcaacacgcucuacugcgugaacaagcaggaggggcagagccuguacgugaagggcgagcccaucaucaacuucuacgacccgcuggucuuccccagcgacgaguucgacgccuccaucagccaggugaacgagaagaucaaccagucccucgcguucauccgcaagagcgacgagcugcugcacaacgugaacgucgggaaguccaccaccaacaucaugaucaccaccaucaucaucgugaucaucgugauccuccugcugcucaucgccgucggccuguuccuguacugcaaggcccggugaggacuaguguccaccugucccuccugggcugcuggauugucucguuuuccugccaaauaaacaggaucagcgcuuuacagaucuaaaaaaaaaaaaaaaaaaaaaaaaaaaaaaaaaaaaaaaaaaaaaaaaaaaaaaaaaaaaaaaaugcaucccccccccccccccccccccccccccccccaaaggcucuuuucagagccaccagaauu

SEQ ID NO: 15218 - RNA, 1874 nt, Artificial Sequence
  mRNA product Design e-1 comprising derived and/or modified sequence from HRSV(Memphis-37)__AIY60640.1__F-del_DSCav1_mut2 (opt2)
gggagaauauaagcguuggcggagcgucgguuguagcacucugcgcgcccgcucuucugcugcuguuugucuacuuccuccugcuuccccgccgccgccgccgccaucaagcuuaccauggagcuccccauccucaagaccaacgccaucaccaccauccucgccgccgucacccucugcuucgccuccucccagaacaucaccgaggaguucuaccaguccaccugcuccgccgucuccaagggcuaccucggcgcccuccgcaccggcugguacaccuccgucaucaccaucgagcucuccaacaucaaggagaacaagugcaacggcaccgacgccaaggucaagcucaucaagcaggagcucgacaaguacaagaacgccgucaccgaccuccagcuccucaugcaguccacccccgccgccggcuccggcuccgccaucugcuccggcaucgccgucugcaagguccuccaccucgagggcgaggucaacaagaucaagaacgcccuccucuccaccaacaaggccgucgucucccucuccaacggcgucuccguccucaccuucaagguccucgaccucaagaacuacaucgacaagcagcuccuccccauccucaacaagcaguccugcuccauccccaacaucgagaccgucaucgaguuccagcagaagaacaaccgccuccucgagaucacccgcgaguucuccgucaacgccggcgucaccacccccgucuccaccuacaugcucaccaacuccgagcuccucucccucaucaacgacaugcccaucaccaacgaccagaagaagcucauguccaacaacguccagaucguccgccagcaguccuacuccaucaugugcaucaucaaggaggagguccucgccuacgucguccagcucccccucuacggcgucaucgacacccccugcuggaagcuccacaccuccccccucugcaccaccaacaccaaggagggcuccaacaucugccucacccgcaccgaccgcggcugguacugcgacaacgccggcuccgucuccuucuucccccaggccgagaccugcaagguccaguccaaccgcgucuucugcgacaccaugaacucccucacccuccccuccgaggucaaccucugcaacaucgacaucuucaaccccaaguacgacugcaagaucaugaccuccaagaccgacgucuccuccuccgucaucaccucccucggcgccaucgucuccugcuacggcaagaccaagugcaccgccuccaacaagaaccgcggcaucaucaagaccuucuccaacggcugcgacuacgucuccaacaagggcgucgacaccgucuccgucggcaacacccucuacugcgucaacaagcaggagggccagucccucuacgucaagggcgagcccaucaucaacuucuacgacccccucgucuuccccuccgacgaguucgacgccuccaucucccaggucaacgagaagaucaaccagucccucgccuucauccgcaaguccgacgagcuccuccacaacgucaacgucggcaaguccaccaccaacaucaugaucaccaccaucaucaucgucaucaucgucauccuccuccuccucaucgccgucggccucuuccucuacugcaaggcccgcugaggacuaguguccaccugucccuccugggcugcuggauugucucguuuuccugccaaauaaacaggaucagcgcuuuacagaucuaaaaaaaaaaaaaaaaaaaaaaaaaaaaaaaaaaaaaaaaaaaaaaaaaaaaaaaaaaaaaaaaugcaucccccccccccccccccccccccccccccccaaaggcucuuuucagagccaccagaauu

SEQ ID NO: 15219 - RNA, 1874 nt, Artificial Sequence
  mRNA product Design e-1 comprising derived and/or modified sequence from HRSV(Memphis-37)__AIY60640.1__F-del_DSCav1_mut2 (opt3)
gggagaauauaagcguuggcggagcgucgguuguagcacucugcgcgcccgcucuucugcugcuguuugucuacuuccuccugcuuccccgccgccgccgccgccaucaagcuuaccauggagcugcccauccucaagaccaacgccauuacaacuauacuugcugcagugacgcugugcuucgccagcucccagaauaucaccgaagaguuuuaccaaucuacauguucagcggucaguaaaggcuauuugggggcuuuaagaacuggaugguacaccagcguuauuacaaucgaacuguccaacauuaaggagaauaaaugcaacgguaccgacgccaaggugaaacuaaucaagcaggaacucgauaaguauaaaaaugcaguaacugaccugcagcuucugaugcagucuacuccugccgcuggcucggggucagcaauauguagcggaaucgccgugugcaaggucuugcaccucgagggcgaggugaacaaaauuaagaaugcucugcugaguaccaacaaagccguugugucccucucuaauggugucagcguguuaacguucaagguacuggaucuuaagaacuacaucgacaaacaauugcugccaauucuaaauaagcaguccuguucaaucccgaacauagaaacuguuauugaguuucagcagaaaaauaacaggcuccuggaaaucacccgggaguucagugugaaugcgggggucacaacucccgugagcaccuauaugcuuacaaacucugagcuguugucccucauuaacgauaugccuaucaccaaugaccaaaagaaacugaugucaaacaaugugcagaucguccgccagcagagcuacaguauuaugugcauaaucaaggaagagguuuuagcauaugugguacaacugccacucuacggagugauugauacgcccuguuggaaacuucauacuucuccucugugcacaaccaacacuaaggaaggcuccaauaucuguuugacacgaaccgaccguggcugguacugcgauaacgccgggagcgucucguuuuucccacaggcugagacguguaaggugcagucuaauagaguuuucugcgacaccaugaacucccuaacacugcccucagaagugaaucucugcaacauagauauuuucaauccuaaauaugacuguaagaucaugacaaguaaaaccgaugucagcuccucugugaucacaagccugggagccauuguaucaugcuacgguaagacuaaauguaccgcaaguaacaagaauaggggcaucauuaagacauuuuccaacgggugcgacuauguuagcaauaaaggaguggacaccgucucugugggcaacacucuuuacugugucaacaagcaagagggucagucacuguaugugaaaggggagccaauaaucaauuucuacgauccguugguuuuucccagugacgaauuugaugcuagcauuucccaggugaacgagaagaucaaucagucucucgccuuuauccggaaaucggacgaacuguuacacaacguaaaugucggaaagagcacgacaaacauuaugauaaccacuaucauuaucgugauuaucguuauacugcuacuccugaucgcggugggccuuuucuuguauugcaaggcccgcugaggacuaguguccaccugucccuccugggcugcuggauugucucguuuuccugccaaauaaacaggaucagcgcuuuacagaucuaaaaaaaaaaaaaaaaaaaaaaaaaaaaaaaaaaaaaaaaaaaaaaaaaaaaaaaaaaaaaaaaugcaucccccccccccccccccccccccccccccccaaaggcucuuuucagagccaccagaauu

SEQ ID NO: 15220 - RNA, 1874 nt, Artificial Sequence
  mRNA product Design e-1 comprising derived and/or modified sequence from HRSV(Memphis-37)__AIY60640.1__F-del_DSCav1_mut2 (opt4)
gggagaauauaagcguuggcggagcgucgguuguagcacucugcgcgcccgcucuucugcugcuguuugucuacuuccuccugcuuccccgccgccgccgccgccaucaagcuuaccauggagcugcccauccugaagaccaacgccaucaccaccauccuggccgccgugacccugugcuucgccagcagccagaacaucaccgaggaguucuaccagagcaccugcagcgccgugagcaagggcuaccugggcgcccugagaaccggcugguacaccagcgugaucaccaucgagcugagcaacaucaaggagaacaagugcaacggcaccgacgccaaggugaagcugaucaagcaggagcuggacaaguacaagaacgccgugaccgaccugcagcugcugaugcagagcacccccgccgccggcagcggcagcgccaucugcagcggcaucgccgugugcaaggugcugcaccuggagggcgaggugaacaagaucaagaacgcccugcugagcaccaacaaggccguggugagccugagcaacggcgugagcgugcugaccuucaaggugcuggaccugaagaacuacaucgacaagcagcugcugcccauccugaacaagcagagcugcagcauccccaacaucgagaccgugaucgaguuccagcagaagaacaacagacugcuggagaucaccagagaguucagcgugaacgccggcgugaccacccccgugagcaccuacaugcugaccaacagcgagcugcugagccugaucaacgacaugcccaucaccaacgaccagaagaagcugaugagcaacaacgugcagaucgugagacagcagagcuacagcaucaugugcaucaucaaggaggaggugcuggccuacguggugcagcugccccuguacggcgugaucgacacccccugcuggaagcugcacaccagcccccugugcaccaccaacaccaaggagggcagcaacaucugccugaccagaaccgacagaggcugguacugcgacaacgccggcagcgugagcuucuucccccaggccgagaccugcaaggugcagagcaacagaguguucugcgacaccaugaacagccugacccugcccagcgaggugaaccugugcaacaucgacaucuucaaccccaaguacgacugcaagaucaugaccagcaagaccgacgugagcagcagcgugaucaccagccugggcgccaucgugagcugcuacggcaagaccaagugcaccgccagcaacaagaacagaggcaucaucaagaccuucagcaacggcugcgacuacgugagcaacaagggcguggacaccgugagcgugggcaacacccuguacugcgugaacaagcaggagggccagagccuguacgugaagggcgagcccaucaucaacuucuacgacccccugguguuccccagcgacgaguucgacgccagcaucagccaggugaacgagaagaucaaccagagccuggccuucaucagaaagagcgacgagcugcugcacaacgugaacgugggcaagagcaccaccaacaucaugaucaccaccaucaucaucgugaucaucgugauccugcugcugcugaucgccgugggccuguuccuguacugcaaggccagaugaggacuaguguccaccugucccuccugggcugcuggauugucucguuuuccugccaaauaaacaggaucagcgcuuuacagaucuaaaaaaaaaaaaaaaaaaaaaaaaaaaaaaaaaaaaaaaaaaaaaaaaaaaaaaaaaaaaaaaaugcaucccccccccccccccccccccccccccccccaaaggcucuuuucagagccaccagaauu

SEQ ID NO: 15221 - RNA, 1874 nt, Artificial Sequence
  mRNA product Design e-1 comprising derived and/or modified sequence from HRSV(Memphis-37)__AIY60640.1__F-del_DSCav1_mut2 (opt5)
gggagaauauaagcguuggcggagcgucgguuguagcacucugcgcgcccgcucuucugcugcuguuugucuacuuccuccugcuuccccgccgccgccgccgccaucaagcuuaccauggagcugcccauccucaagaccaacgccauuacaacgauccuggcugccgugacccuuugcuucgcgagcucccagaauauuacagaagaguuuuaccaaucuaccuguagcgcugucuccaaaggcuaucugggggcccucagaacaggaugguacaccucuguuaucacaauugaacugagcaacaucaaggagaauaaaugcaacggcaccgacgccaaggugaaacuuaucaagcaggaacuggauaaguauaaaaaugcugugacggaccuccagcugcugaugcaguccaccccugccgcugggucuggaagcgccauuuguuccggcaucgcggucugcaaggugcuccaccuggagggggagguuaacaaaauuaagaaugcccuucugagcacaaacaaagcuguggucucucucuccaauggagugagcguucugaccuucaaggugcuugaucugaagaacuacaucgacaaacaacuccugccgauucugaauaagcagucuuguuccauccccaacauugaaacagucaucgaguuucagcagaaaaauaaccggcuccuggaaaucacccgcgaguucagcgugaaugccggcgugacgacaccugucucuaccuauaugcuuacaaacuccgagcugcucagccugauuaacgauaugcccaucaccaaugaccaaaagaaacuuauguccaacaauguucagauugugagacagcagucuuacagcaucaugugcauuaucaaggaagaggugcuggcuuaugucgugcaacucccucuguacggcguuaucgauacccccuguuggaaacugcauacauccccucucugcacgaccaacacaaaggaagggagcaauauuugucugacccggacagaccgcggaugguacugcgauaacgccggcucuguguccuuuuucccgcaggcggagaccuguaagguccagagcaauagaguguuuugcgacacgaugaacucucuuacacugcccagcgaaguuaaucucugcaacaucgauauuuucaauccuaaauaugacuguaagaucaugaccuccaaaaccgaugugucuagcuccgucauuacaagccugggggccaucgugucuugcuacggaaagaccaaauguacagcuuccaacaagaaucggggcaucauuaagacguuuagcaacgggugcgacuaugucucuaauaaaggaguggacaccguuuccgugggcaacacacuuuacugugucaacaagcaagagggccagagccuguaugugaaaggggagcccaucauuaauuucuacgauccucucguuuuucccuccgacgaguucgaugccucuaucagccaggugaacgaaaagauuaaucagucccuggcuuuuauccgcaaaucugacgaacugcuccacaacgucaaugugggaaagagcaccacaaacauuaugaucaccacgaucauuaucgugauuaucguuauucugcuucugcucaucgccgucggccuguuccuguauugcaaggccagaugaggacuaguguccaccugucccuccugggcugcuggauugucucguuuuccugccaaauaaacaggaucagcgcuuuacagaucuaaaaaaaaaaaaaaaaaaaaaaaaaaaaaaaaaaaaaaaaaaaaaaaaaaaaaaaaaaaaaaaaugcaucccccccccccccccccccccccccccccccaaaggcucuuuucagagccaccagaauu

SEQ ID NO: 15222 - RNA, 1874 nt, Artificial Sequence
  mRNA product Design e-1 comprising derived and/or modified sequence from HRSV(Memphis-37)__AIY60640.1__F-del_DSCav1_mut2 (opt6)
gggagaauauaagcguuggcggagcgucgguuguagcacucugcgcgcccgcucuucugcugcuguuugucuacuuccuccugcuuccccgccgccgccgccgccaucaagcuuaccauggaacuaccaauacucaaaacaaacgcaauaacaacaauuuuagcugcaguaacacuuuguuucgcauccucccaaaauauaacagaagaauuuuaucaaucaaccugcucagccgucuccaaaggauaucuaggugcacuacgcacuggaugguacacaagugucaucacaauagaacuuuccaacaucaaagaaaauaaauguaauggaacugacgcaaaaguaaaacucauaaaacaagaacuagacaaauacaaaaacgcaguaacagaccuacaacuauuaaugcaaucaacaccagcagcaggauccggcagugccauaugcucuggaauagcagucugcaaaguuuuacacuuagaaggcgaaguaaacaaaaucaaaaacgcccuacuaucuacaaauaaagccgucguaucucucucaaauggaguaucaguacuaacauucaaaguauuagacuuaaaaaacuacaucgauaaacaauuauugccaauauuaaacaaacaaucuugcucaauaccaaauauagaaacagucauagaauuucaacaaaaaaauaaccgauuauuagaaauaacacgagaauuuucaguaaaugccggagucaccacaccaguaucaacauacaugcuaacaaauucagaacuauuaucauuaauaaacgacaugccuauuacaaaugaucaaaaaaaacuaauguccaacaauguacaaauaguccgacaacaaagcuacucaaucauguguauaauaaaagaagaaguacuugcauacguaguacaauuaccacuauacggaguuaucgacacaccaugcuggaaacuccacacuucaccacucugcaccacaaacacaaaagaaggcucaaacauaugccuaacaagaacagaccgaggaugguacugcgacaacgcaggaucaguaucauucuucccacaagcagaaacuugcaaaguacaaucuaacagaguuuucugugacaccaugaauagccuaacacuccccuccgaaguuaaccuauguaacauagauauauuuaaucccaaauaugauugcaaaaucaugacaucuaaaaccgacguaucaucaucuguaaucacaucacuaggugccauagucucaugcuacggcaaaacaaaaugcaccgccucaaacaaaaaccgagguauaauaaaaaccuucaguaauggaugugacuacguaucaaacaaagguguugauaccguaagcgucggcaacacccuauacugcguaaauaaacaagaaggccaaucacuauacgucaaaggcgaaccaauuauuaacuucuaugacccacucgucuuucccuccgacgaauuugacgcaagcauaucacaaguaaacgaaaaaauaaaccaaucacuagcauucauacgcaaaucagaugaacuacuacauaacguaaacguaggaaaauccacuacaaauauaaugaucacaacaauaauaaucguaauuauagucauauuauuacuacuaauagcaguaggacuuuuccuauacuguaaagcaagauaaggacuaguguccaccugucccuccugggcugcuggauugucucguuuuccugccaaauaaacaggaucagcgcuuuacagaucuaaaaaaaaaaaaaaaaaaaaaaaaaaaaaaaaaaaaaaaaaaaaaaaaaaaaaaaaaaaaaaaaugcaucccccccccccccccccccccccccccccccaaaggcucuuuucagagccaccagaauu

SEQ ID NO: 15223 - RNA, 1874 nt, Artificial Sequence
  mRNA product Design e-1 comprising derived and/or modified sequence from HRSV(Memphis-37)__AIY60640.1__F-del_DSCav1_mut2 (opt11)
gggagaauauaagcguuggcggagcgucgguuguagcacucugcgcgcccgcucuucugcugcuguuugucuacuuccuccugcuuccccgccgccgccgccgccaucaagcuuaccauggaacuucccauccucaagaccaacgcuauuacgaccauccucgccgcagucacccucugcuucgcgucaucccaaaacaucaccgaagaauuuuaccaauccacaugcuccgcagucucaaaaggcuaccuaggagcccuacgcaccggaugguacacauccgucaucacaaucgaacucuccaacauaaaagaaaacaaaugcaacggcaccgaugccaaaguaaaacugauuaaacaagaacucgacaaauacaagaacgccgucacagaccuacagcuccucaugcaaucaacucccgccgccggcagcggauccgcuaucugcucaggcaucgccguaugcaaaguccuccaccuagaaggcgaaguaaacaaaaucaagaacgcacuacucucaacaaacaaagccgucgucucccucuccaacggcgucuccguccuuaccuucaaaguccucgaccuuaagaacuacauugacaaacaacuccuacccauccucaacaaacaauccugcucuauaccuaauauagaaaccguaaucgaauuucaacagaaaaacaaccgccuccucgaaauuacccgcgaguucucaguaaacgccggcguaaccacccccgucuccaccuacaugcucacaaauucagaacuccucagccucaucaacgacaugcccauaaccaacgaccaaaagaaacucaugucaaacaacguccaaaucgucaggcaacaaagcuacagcaucaugugcaucauuaaagaagaaguacucgccuacgucgugcaacuaccccucuacggcgucauagacacacccugcuggaaacuucacacaucaccgcucugcaccacaaacaccaaagaaggcaguaacauaugccucacccgaaccgaccgcggaugguacugcgacaacgccggauccgucagcuucuucccacaagccgaaaccugcaaaguacaauccaaccgagucuucugcgacaccaugaacucucuuacgcuccccucagaagucaaccuaugcaacaucgacaucuucaaccccaaauacgacugcaaaaucaugaccuccaaaacagacgucuccuccucagugauaaccucccucggcgccauugucuccugcuacggcaaaaccaaaugcaccgccuccaacaaaaaccgugggaucaucaaaaccuucucaaacggcugcgacuacguauccaauaagggugucgacacagucuccguaggcaauacccucuauugcgucaacaaacaagaaggccaaucccucuacgucaaaggcgaaccuaucaucaacuucuacgacccgcuagucuuccccucagacgaguucgacgcauccaucucacaagucaacgaaaagaucaaccagucccucgcauucauccgaaaauccgacgaacuucuccacaacguuaacgucggcaaauccaccacuaacauaaugaucaccacgaucaucauaguaauuaucgucauacuccuccuccuaaucgcugucggacucuuccucuacugcaaggcccgcuaaggacuaguguccaccugucccuccugggcugcuggauugucucguuuuccugccaaauaaacaggaucagcgcuuuacagaucuaaaaaaaaaaaaaaaaaaaaaaaaaaaaaaaaaaaaaaaaaaaaaaaaaaaaaaaaaaaaaaaaugcaucccccccccccccccccccccccccccccccaaaggcucuuuucagagccaccagaauu

SEQ ID NO: 15224 - RNA, 1856 nt, Artificial Sequence
  mRNA product Design e-2 comprising derived and/or modified sequence from HRSV(Memphis-37)__AIY60640.1__F-del_DSCav1_mut2 (opt1)
gggagacccgugacccggaaguuguacggcuacgcgacuuucccucccacaaacccucgcgcccuuccuuuccuacuugggcccggcagaaagcuuaccauggagcugcccauccucaagaccaacgccaucaccacgauccuggccgcggugacccugugcuucgccagcucccagaacaucaccgaggaguucuaccagagcacgugcuccgccgucagcaagggcuaccucggcgcccugcgcaccgggugguacaccagcgugaucaccaucgagcuguccaacaucaaggagaacaagugcaacggcaccgacgccaaggugaagcucaucaagcaggagcuggacaaguacaagaacgcggucacggaccugcagcuccugaugcagagcaccccggccgccggcuccgggagcgcgaucugcuccggcaucgccgucugcaaggugcugcaccucgagggcgaggugaacaagaucaagaacgcccugcuguccaccaacaaggccgucgugagccucuccaacggggugagcguccugaccuucaaggugcuggaccucaagaacuacaucgacaagcagcugcugcccauccugaacaagcagagcugcuccauccccaacaucgagaccgucaucgaguuccagcagaagaacaaccgccuccuggagaucacgcgggaguucagcgugaacgcgggcgugaccacccccgucuccaccuacaugcugacgaacagcgagcuccugucccugaucaacgacaugccgaucaccaacgaccagaagaagcucaugagcaacaacgugcagaucgugcgccagcaguccuacagcaucaugugcaucaucaaggaggagguccuggccuacguggugcagcugccccucuacggggucaucgacacccccugcuggaagcugcacaccagcccccugugcacgaccaacaccaaggagggcuccaacaucugccucacccggacggaccgcgggugguacugcgacaacgccggcagcguguccuucuucccgcaggccgagaccugcaagguccagagcaaccggguguucugcgacaccaugaacucccugacccugcccagcgaggugaaccucugcaacaucgacaucuucaaccccaaguacgacugcaagaucaugacguccaagaccgacgucagcuccagcgugaucaccucccugggcgccaucgugagcugcuacgggaagaccaagugcacggcgagcaacaagaaccgcggcaucaucaagaccuucuccaacgggugcgacuacgucagcaacaagggcguggacaccguguccgucggcaacacccuguacugcgugaacaagcaggagggccagagccucuacgugaagggggagcccaucaucaacuucuacgacccgcuggucuuccccuccgacgaguucgacgccagcaucucccaggugaacgagaagaucaaccagagccuggccuucauccggaaguccgacgagcuccugcacaacgugaacgucggcaagagcaccacgaacaucaugaucaccaccaucaucaucgugaucaucgugauccugcugcuccugaucgccgucgggcuguuccucuacugcaaggcccgcugaggacuaguguccaccugucccuccugggcugcuggauugucucguuuuccugccaaauaaacaggaucagcgcuuuacagaucuaaaaaaaaaaaaaaaaaaaaaaaaaaaaaaaaaaaaaaaaaaaaaaaaaaaaaaaaaaaaaaaaugcaucccccccccccccccccccccccccccccccaaaggcucuuuucagagccaccagaauu

SEQ ID NO: 15225 - RNA, 1856 nt, Artificial Sequence
  mRNA product Design e-2 comprising derived and/or modified sequence from HRSV(Memphis-37)__AIY60640.1__F-del_DSCav1_mut2 (opt1)
gggagacccgugacccggaaguuguacggcuacgcgacuuucccucccacaaacccucgcgcccuuccuuuccuacuugggcccggcagaaagcuuaccauggagcugcccauccucaagaccaacgccaucaccacgauccuggccgcggugacccugugcuucgccagcucccagaacaucaccgaggaguucuaccagagcacgugcuccgccgucagcaagggcuaccucggggcccugcgcaccggcugguacaccuccgugaucaccaucgagcugagcaacaucaaggagaacaagugcaacgggaccgacgccaaggugaagcucaucaagcaggagcuggacaaguacaagaacgcggucacggaccugcagcuccugaugcaguccaccccggccgccggcagcggguccgccaucugcagcggcaucgcggugugcaaggugcugcaccucgagggcgaggucaacaagaucaagaacgcccugcuguccaccaacaaggccguggugagccucuccaacggggucagcgugcugaccuucaaggugcuggaccucaagaacuacaucgacaagcagcugcugcccauccucaacaagcaguccugcagcauccccaacaucgagacggucaucgaguuccagcagaagaacaaccggcugcuggagaucacccgcgaguucuccgugaacgccggcgugaccacccccgucagcacguacaugcucaccaacuccgagcugcugagccucaucaacgacaugccgaucaccaacgaccagaagaagcugaugagcaacaacgugcagaucgugcggcagcaguccuacagcaucaugugcaucaucaaggaggagguccuggccuacguggugcagcucccccuguacggggucaucgacacccccugcuggaagcugcacacgagcccccucugcaccaccaacaccaaggagggcuccaacaucugccugacgcgcaccgaccgggggugguacugcgacaacgcgggcuccgugagcuucuucccgcaggccgagaccugcaaggugcaguccaaccgcgucuucugcgacaccaugaacagccugacgcuccccuccgaggugaaccugugcaacaucgacaucuucaaccccaaguacgacugcaagaucaugaccagcaagaccgacgucuccagcuccgugaucaccagccugggcgccaucguguccugcuacgggaagacgaagugcaccgccagcaacaagaaccggggcaucaucaagaccuucuccaacgggugcgacuacgucagcaacaagggcguggacaccguguccgucggcaacacgcucuacugcgugaacaagcaggaggggcagagccuguacgugaagggcgagcccaucaucaacuucuacgacccgcuggucuuccccagcgacgaguucgacgccuccaucagccaggugaacgagaagaucaaccagucccucgcguucauccgcaagagcgacgagcugcugcacaacgugaacgucgggaaguccaccaccaacaucaugaucaccaccaucaucaucgugaucaucgugauccuccugcugcucaucgccgucggccuguuccuguacugcaaggcccggugaggacuaguguccaccugucccuccugggcugcuggauugucucguuuuccugccaaauaaacaggaucagcgcuuuacagaucuaaaaaaaaaaaaaaaaaaaaaaaaaaaaaaaaaaaaaaaaaaaaaaaaaaaaaaaaaaaaaaaaugcaucccccccccccccccccccccccccccccccaaaggcucuuuucagagccaccagaauu

SEQ ID NO: 15226 - RNA, 1856 nt, Artificial Sequence
  mRNA product Design e-2 comprising derived and/or modified sequence from HRSV(Memphis-37)__AIY60640.1__F-del_DSCav1_mut2 (opt2)
gggagacccgugacccggaaguuguacggcuacgcgacuuucccucccacaaacccucgcgcccuuccuuuccuacuugggcccggcagaaagcuuaccauggagcuccccauccucaagaccaacgccaucaccaccauccucgccgccgucacccucugcuucgccuccucccagaacaucaccgaggaguucuaccaguccaccugcuccgccgucuccaagggcuaccucggcgcccuccgcaccggcugguacaccuccgucaucaccaucgagcucuccaacaucaaggagaacaagugcaacggcaccgacgccaaggucaagcucaucaagcaggagcucgacaaguacaagaacgccgucaccgaccuccagcuccucaugcaguccacccccgccgccggcuccggcuccgccaucugcuccggcaucgccgucugcaagguccuccaccucgagggcgaggucaacaagaucaagaacgcccuccucuccaccaacaaggccgucgucucccucuccaacggcgucuccguccucaccuucaagguccucgaccucaagaacuacaucgacaagcagcuccuccccauccucaacaagcaguccugcuccauccccaacaucgagaccgucaucgaguuccagcagaagaacaaccgccuccucgagaucacccgcgaguucuccgucaacgccggcgucaccacccccgucuccaccuacaugcucaccaacuccgagcuccucucccucaucaacgacaugcccaucaccaacgaccagaagaagcucauguccaacaacguccagaucguccgccagcaguccuacuccaucaugugcaucaucaaggaggagguccucgccuacgucguccagcucccccucuacggcgucaucgacacccccugcuggaagcuccacaccuccccccucugcaccaccaacaccaaggagggcuccaacaucugccucacccgcaccgaccgcggcugguacugcgacaacgccggcuccgucuccuucuucccccaggccgagaccugcaagguccaguccaaccgcgucuucugcgacaccaugaacucccucacccuccccuccgaggucaaccucugcaacaucgacaucuucaaccccaaguacgacugcaagaucaugaccuccaagaccgacgucuccuccuccgucaucaccucccucggcgccaucgucuccugcuacggcaagaccaagugcaccgccuccaacaagaaccgcggcaucaucaagaccuucuccaacggcugcgacuacgucuccaacaagggcgucgacaccgucuccgucggcaacacccucuacugcgucaacaagcaggagggccagucccucuacgucaagggcgagcccaucaucaacuucuacgacccccucgucuuccccuccgacgaguucgacgccuccaucucccaggucaacgagaagaucaaccagucccucgccuucauccgcaaguccgacgagcuccuccacaacgucaacgucggcaaguccaccaccaacaucaugaucaccaccaucaucaucgucaucaucgucauccuccuccuccucaucgccgucggccucuuccucuacugcaaggcccgcugaggacuaguguccaccugucccuccugggcugcuggauugucucguuuuccugccaaauaaacaggaucagcgcuuuacagaucuaaaaaaaaaaaaaaaaaaaaaaaaaaaaaaaaaaaaaaaaaaaaaaaaaaaaaaaaaaaaaaaaugcaucccccccccccccccccccccccccccccccaaaggcucuuuucagagccaccagaauu

SEQ ID NO: 15227 - RNA, 1856 nt, Artificial Sequence
  mRNA product Design e-2 comprising derived and/or modified sequence from HRSV(Memphis-37)__AIY60640.1__F-del_DSCav1_mut2 (opt3)
gggagacccgugacccggaaguuguacggcuacgcgacuuucccucccacaaacccucgcgcccuuccuuuccuacuugggcccggcagaaagcuuaccauggagcugcccauccucaagaccaacgccauuacaacuauacuugcugcagugacgcugugcuucgccagcucccagaauaucaccgaagaguuuuaccaaucuacauguucagcggucaguaaaggcuauuugggggcuuuaagaacuggaugguacaccagcguuauuacaaucgaacuguccaacauuaaggagaauaaaugcaacgguaccgacgccaaggugaaacuaaucaagcaggaacucgauaaguauaaaaaugcaguaacugaccugcagcuucugaugcagucuacuccugccgcuggcucggggucagcaauauguagcggaaucgccgugugcaaggucuugcaccucgagggcgaggugaacaaaauuaagaaugcucugcugaguaccaacaaagccguugugucccucucuaauggugucagcguguuaacguucaagguacuggaucuuaagaacuacaucgacaaacaauugcugccaauucuaaauaagcaguccuguucaaucccgaacauagaaacuguuauugaguuucagcagaaaaauaacaggcuccuggaaaucacccgggaguucagugugaaugcgggggucacaacucccgugagcaccuauaugcuuacaaacucugagcuguugucccucauuaacgauaugccuaucaccaaugaccaaaagaaacugaugucaaacaaugugcagaucguccgccagcagagcuacaguauuaugugcauaaucaaggaagagguuuuagcauaugugguacaacugccacucuacggagugauugauacgcccuguuggaaacuucauacuucuccucugugcacaaccaacacuaaggaaggcuccaauaucuguuugacacgaaccgaccguggcugguacugcgauaacgccgggagcgucucguuuuucccacaggcugagacguguaaggugcagucuaauagaguuuucugcgacaccaugaacucccuaacacugcccucagaagugaaucucugcaacauagauauuuucaauccuaaauaugacuguaagaucaugacaaguaaaaccgaugucagcuccucugugaucacaagccugggagccauuguaucaugcuacgguaagacuaaauguaccgcaaguaacaagaauaggggcaucauuaagacauuuuccaacgggugcgacuauguuagcaauaaaggaguggacaccgucucugugggcaacacucuuuacugugucaacaagcaagagggucagucacuguaugugaaaggggagccaauaaucaauuucuacgauccguugguuuuucccagugacgaauuugaugcuagcauuucccaggugaacgagaagaucaaucagucucucgccuuuauccggaaaucggacgaacuguuacacaacguaaaugucggaaagagcacgacaaacauuaugauaaccacuaucauuaucgugauuaucguuauacugcuacuccugaucgcggugggccuuuucuuguauugcaaggcccgcugaggacuaguguccaccugucccuccugggcugcuggauugucucguuuuccugccaaauaaacaggaucagcgcuuuacagaucuaaaaaaaaaaaaaaaaaaaaaaaaaaaaaaaaaaaaaaaaaaaaaaaaaaaaaaaaaaaaaaaaugcaucccccccccccccccccccccccccccccccaaaggcucuuuucagagccaccagaauu

SEQ ID NO: 15228 - RNA, 1856 nt, Artificial Sequence
  mRNA product Design e-2 comprising derived and/or modified sequence from HRSV(Memphis-37)__AIY60640.1__F-del_DSCav1_mut2 (opt4)
gggagacccgugacccggaaguuguacggcuacgcgacuuucccucccacaaacccucgcgcccuuccuuuccuacuugggcccggcagaaagcuuaccauggagcugcccauccugaagaccaacgccaucaccaccauccuggccgccgugacccugugcuucgccagcagccagaacaucaccgaggaguucuaccagagcaccugcagcgccgugagcaagggcuaccugggcgcccugagaaccggcugguacaccagcgugaucaccaucgagcugagcaacaucaaggagaacaagugcaacggcaccgacgccaaggugaagcugaucaagcaggagcuggacaaguacaagaacgccgugaccgaccugcagcugcugaugcagagcacccccgccgccggcagcggcagcgccaucugcagcggcaucgccgugugcaaggugcugcaccuggagggcgaggugaacaagaucaagaacgcccugcugagcaccaacaaggccguggugagccugagcaacggcgugagcgugcugaccuucaaggugcuggaccugaagaacuacaucgacaagcagcugcugcccauccugaacaagcagagcugcagcauccccaacaucgagaccgugaucgaguuccagcagaagaacaacagacugcuggagaucaccagagaguucagcgugaacgccggcgugaccacccccgugagcaccuacaugcugaccaacagcgagcugcugagccugaucaacgacaugcccaucaccaacgaccagaagaagcugaugagcaacaacgugcagaucgugagacagcagagcuacagcaucaugugcaucaucaaggaggaggugcuggccuacguggugcagcugccccuguacggcgugaucgacacccccugcuggaagcugcacaccagcccccugugcaccaccaacaccaaggagggcagcaacaucugccugaccagaaccgacagaggcugguacugcgacaacgccggcagcgugagcuucuucccccaggccgagaccugcaaggugcagagcaacagaguguucugcgacaccaugaacagccugacccugcccagcgaggugaaccugugcaacaucgacaucuucaaccccaaguacgacugcaagaucaugaccagcaagaccgacgugagcagcagcgugaucaccagccugggcgccaucgugagcugcuacggcaagaccaagugcaccgccagcaacaagaacagaggcaucaucaagaccuucagcaacggcugcgacuacgugagcaacaagggcguggacaccgugagcgugggcaacacccuguacugcgugaacaagcaggagggccagagccuguacgugaagggcgagcccaucaucaacuucuacgacccccugguguuccccagcgacgaguucgacgccagcaucagccaggugaacgagaagaucaaccagagccuggccuucaucagaaagagcgacgagcugcugcacaacgugaacgugggcaagagcaccaccaacaucaugaucaccaccaucaucaucgugaucaucgugauccugcugcugcugaucgccgugggccuguuccuguacugcaaggccagaugaggacuaguguccaccugucccuccugggcugcuggauugucucguuuuccugccaaauaaacaggaucagcgcuuuacagaucuaaaaaaaaaaaaaaaaaaaaaaaaaaaaaaaaaaaaaaaaaaaaaaaaaaaaaaaaaaaaaaaaugcaucccccccccccccccccccccccccccccccaaaggcucuuuucagagccaccagaauu

SEQ ID NO: 15229 - RNA, 1856 nt, Artificial Sequence
  mRNA product Design e-2 comprising derived and/or modified sequence from HRSV(Memphis-37)__AIY60640.1__F-del_DSCav1_mut2 (opt5)
gggagacccgugacccggaaguuguacggcuacgcgacuuucccucccacaaacccucgcgcccuuccuuuccuacuugggcccggcagaaagcuuaccauggagcugcccauccucaagaccaacgccauuacaacgauccuggcugccgugacccuuugcuucgcgagcucccagaauauuacagaagaguuuuaccaaucuaccuguagcgcugucuccaaaggcuaucugggggcccucagaacaggaugguacaccucuguuaucacaauugaacugagcaacaucaaggagaauaaaugcaacggcaccgacgccaaggugaaacuuaucaagcaggaacuggauaaguauaaaaaugcugugacggaccuccagcugcugaugcaguccaccccugccgcugggucuggaagcgccauuuguuccggcaucgcggucugcaaggugcuccaccuggagggggagguuaacaaaauuaagaaugcccuucugagcacaaacaaagcuguggucucucucuccaauggagugagcguucugaccuucaaggugcuugaucugaagaacuacaucgacaaacaacuccugccgauucugaauaagcagucuuguuccauccccaacauugaaacagucaucgaguuucagcagaaaaauaaccggcuccuggaaaucacccgcgaguucagcgugaaugccggcgugacgacaccugucucuaccuauaugcuuacaaacuccgagcugcucagccugauuaacgauaugcccaucaccaaugaccaaaagaaacuuauguccaacaauguucagauugugagacagcagucuuacagcaucaugugcauuaucaaggaagaggugcuggcuuaugucgugcaacucccucuguacggcguuaucgauacccccuguuggaaacugcauacauccccucucugcacgaccaacacaaaggaagggagcaauauuugucugacccggacagaccgcggaugguacugcgauaacgccggcucuguguccuuuuucccgcaggcggagaccuguaagguccagagcaauagaguguuuugcgacacgaugaacucucuuacacugcccagcgaaguuaaucucugcaacaucgauauuuucaauccuaaauaugacuguaagaucaugaccuccaaaaccgaugugucuagcuccgucauuacaagccugggggccaucgugucuugcuacggaaagaccaaauguacagcuuccaacaagaaucggggcaucauuaagacguuuagcaacgggugcgacuaugucucuaauaaaggaguggacaccguuuccgugggcaacacacuuuacugugucaacaagcaagagggccagagccuguaugugaaaggggagcccaucauuaauuucuacgauccucucguuuuucccuccgacgaguucgaugccucuaucagccaggugaacgaaaagauuaaucagucccuggcuuuuauccgcaaaucugacgaacugcuccacaacgucaaugugggaaagagcaccacaaacauuaugaucaccacgaucauuaucgugauuaucguuauucugcuucugcucaucgccgucggccuguuccuguauugcaaggccagaugaggacuaguguccaccugucccuccugggcugcuggauugucucguuuuccugccaaauaaacaggaucagcgcuuuacagaucuaaaaaaaaaaaaaaaaaaaaaaaaaaaaaaaaaaaaaaaaaaaaaaaaaaaaaaaaaaaaaaaaugcaucccccccccccccccccccccccccccccccaaaggcucuuuucagagccaccagaauu

SEQ ID NO: 15230 - RNA, 1856 nt, Artificial Sequence
  mRNA product Design e-2 comprising derived and/or modified sequence from HRSV(Memphis-37)__AIY60640.1__F-del_DSCav1_mut2 (opt6)
gggagacccgugacccggaaguuguacggcuacgcgacuuucccucccacaaacccucgcgcccuuccuuuccuacuugggcccggcagaaagcuuaccauggaacuaccaauacucaaaacaaacgcaauaacaacaauuuuagcugcaguaacacuuuguuucgcauccucccaaaauauaacagaagaauuuuaucaaucaaccugcucagccgucuccaaaggauaucuaggugcacuacgcacuggaugguacacaagugucaucacaauagaacuuuccaacaucaaagaaaauaaauguaauggaacugacgcaaaaguaaaacucauaaaacaagaacuagacaaauacaaaaacgcaguaacagaccuacaacuauuaaugcaaucaacaccagcagcaggauccggcagugccauaugcucuggaauagcagucugcaaaguuuuacacuuagaaggcgaaguaaacaaaaucaaaaacgcccuacuaucuacaaauaaagccgucguaucucucucaaauggaguaucaguacuaacauucaaaguauuagacuuaaaaaacuacaucgauaaacaauuauugccaauauuaaacaaacaaucuugcucaauaccaaauauagaaacagucauagaauuucaacaaaaaaauaaccgauuauuagaaauaacacgagaauuuucaguaaaugccggagucaccacaccaguaucaacauacaugcuaacaaauucagaacuauuaucauuaauaaacgacaugccuauuacaaaugaucaaaaaaaacuaauguccaacaauguacaaauaguccgacaacaaagcuacucaaucauguguauaauaaaagaagaaguacuugcauacguaguacaauuaccacuauacggaguuaucgacacaccaugcuggaaacuccacacuucaccacucugcaccacaaacacaaaagaaggcucaaacauaugccuaacaagaacagaccgaggaugguacugcgacaacgcaggaucaguaucauucuucccacaagcagaaacuugcaaaguacaaucuaacagaguuuucugugacaccaugaauagccuaacacuccccuccgaaguuaaccuauguaacauagauauauuuaaucccaaauaugauugcaaaaucaugacaucuaaaaccgacguaucaucaucuguaaucacaucacuaggugccauagucucaugcuacggcaaaacaaaaugcaccgccucaaacaaaaaccgagguauaauaaaaaccuucaguaauggaugugacuacguaucaaacaaagguguugauaccguaagcgucggcaacacccuauacugcguaaauaaacaagaaggccaaucacuauacgucaaaggcgaaccaauuauuaacuucuaugacccacucgucuuucccuccgacgaauuugacgcaagcauaucacaaguaaacgaaaaaauaaaccaaucacuagcauucauacgcaaaucagaugaacuacuacauaacguaaacguaggaaaauccacuacaaauauaaugaucacaacaauaauaaucguaauuauagucauauuauuacuacuaauagcaguaggacuuuuccuauacuguaaagcaagauaaggacuaguguccaccugucccuccugggcugcuggauugucucguuuuccugccaaauaaacaggaucagcgcuuuacagaucuaaaaaaaaaaaaaaaaaaaaaaaaaaaaaaaaaaaaaaaaaaaaaaaaaaaaaaaaaaaaaaaaugcaucccccccccccccccccccccccccccccccaaaggcucuuuucagagccaccagaauu

SEQ ID NO: 15231 - RNA, 1856 nt, Artificial Sequence
  mRNA product Design e-2 comprising derived and/or modified sequence from HRSV(Memphis-37)__AIY60640.1__F-del_DSCav1_mut2 (opt11)
gggagacccgugacccggaaguuguacggcuacgcgacuuucccucccacaaacccucgcgcccuuccuuuccuacuugggcccggcagaaagcuuaccauggaacuucccauccucaagaccaacgcuauuacgaccauccucgccgcagucacccucugcuucgcgucaucccaaaacaucaccgaagaauuuuaccaauccacaugcuccgcagucucaaaaggcuaccuaggagcccuacgcaccggaugguacacauccgucaucacaaucgaacucuccaacauaaaagaaaacaaaugcaacggcaccgaugccaaaguaaaacugauuaaacaagaacucgacaaauacaagaacgccgucacagaccuacagcuccucaugcaaucaacucccgccgccggcagcggauccgcuaucugcucaggcaucgccguaugcaaaguccuccaccuagaaggcgaaguaaacaaaaucaagaacgcacuacucucaacaaacaaagccgucgucucccucuccaacggcgucuccguccuuaccuucaaaguccucgaccuuaagaacuacauugacaaacaacuccuacccauccucaacaaacaauccugcucuauaccuaauauagaaaccguaaucgaauuucaacagaaaaacaaccgccuccucgaaauuacccgcgaguucucaguaaacgccggcguaaccacccccgucuccaccuacaugcucacaaauucagaacuccucagccucaucaacgacaugcccauaaccaacgaccaaaagaaacucaugucaaacaacguccaaaucgucaggcaacaaagcuacagcaucaugugcaucauuaaagaagaaguacucgccuacgucgugcaacuaccccucuacggcgucauagacacacccugcuggaaacuucacacaucaccgcucugcaccacaaacaccaaagaaggcaguaacauaugccucacccgaaccgaccgcggaugguacugcgacaacgccggauccgucagcuucuucccacaagccgaaaccugcaaaguacaauccaaccgagucuucugcgacaccaugaacucucuuacgcuccccucagaagucaaccuaugcaacaucgacaucuucaaccccaaauacgacugcaaaaucaugaccuccaaaacagacgucuccuccucagugauaaccucccucggcgccauugucuccugcuacggcaaaaccaaaugcaccgccuccaacaaaaaccgugggaucaucaaaaccuucucaaacggcugcgacuacguauccaauaagggugucgacacagucuccguaggcaauacccucuauugcgucaacaaacaagaaggccaaucccucuacgucaaaggcgaaccuaucaucaacuucuacgacccgcuagucuuccccucagacgaguucgacgcauccaucucacaagucaacgaaaagaucaaccagucccucgcauucauccgaaaauccgacgaacuucuccacaacguuaacgucggcaaauccaccacuaacauaaugaucaccacgaucaucauaguaauuaucgucauacuccuccuccuaaucgcugucggacucuuccucuacugcaaggcccgcuaaggacuaguguccaccugucccuccugggcugcuggauugucucguuuuccugccaaauaaacaggaucagcgcuuuacagaucuaaaaaaaaaaaaaaaaaaaaaaaaaaaaaaaaaaaaaaaaaaaaaaaaaaaaaaaaaaaaaaaaugcaucccccccccccccccccccccccccccccccaaaggcucuuuucagagccaccagaauu

SEQ ID NO: 15232 - RNA, 1826 nt, Artificial Sequence
  mRNA product Design e-3 comprising derived and/or modified sequence from HRSV(Memphis-37)__AIY60640.1__F-del_DSCav1_mut2 (opt1)
gggagacuuucccauucuguagcagaauuugguguugccuguggucuuggucccgcggagaagcuuaccauggagcugcccauccucaagaccaacgccaucaccacgauccuggccgcggugacccugugcuucgccagcucccagaacaucaccgaggaguucuaccagagcacgugcuccgccgucagcaagggcuaccucggcgcccugcgcaccgggugguacaccagcgugaucaccaucgagcuguccaacaucaaggagaacaagugcaacggcaccgacgccaaggugaagcucaucaagcaggagcuggacaaguacaagaacgcggucacggaccugcagcuccugaugcagagcaccccggccgccggcuccgggagcgcgaucugcuccggcaucgccgucugcaaggugcugcaccucgagggcgaggugaacaagaucaagaacgcccugcuguccaccaacaaggccgucgugagccucuccaacggggugagcguccugaccuucaaggugcuggaccucaagaacuacaucgacaagcagcugcugcccauccugaacaagcagagcugcuccauccccaacaucgagaccgucaucgaguuccagcagaagaacaaccgccuccuggagaucacgcgggaguucagcgugaacgcgggcgugaccacccccgucuccaccuacaugcugacgaacagcgagcuccugucccugaucaacgacaugccgaucaccaacgaccagaagaagcucaugagcaacaacgugcagaucgugcgccagcaguccuacagcaucaugugcaucaucaaggaggagguccuggccuacguggugcagcugccccucuacggggucaucgacacccccugcuggaagcugcacaccagcccccugugcacgaccaacaccaaggagggcuccaacaucugccucacccggacggaccgcgggugguacugcgacaacgccggcagcguguccuucuucccgcaggccgagaccugcaagguccagagcaaccggguguucugcgacaccaugaacucccugacccugcccagcgaggugaaccucugcaacaucgacaucuucaaccccaaguacgacugcaagaucaugacguccaagaccgacgucagcuccagcgugaucaccucccugggcgccaucgugagcugcuacgggaagaccaagugcacggcgagcaacaagaaccgcggcaucaucaagaccuucuccaacgggugcgacuacgucagcaacaagggcguggacaccguguccgucggcaacacccuguacugcgugaacaagcaggagggccagagccucuacgugaagggggagcccaucaucaacuucuacgacccgcuggucuuccccuccgacgaguucgacgccagcaucucccaggugaacgagaagaucaaccagagccuggccuucauccggaaguccgacgagcuccugcacaacgugaacgucggcaagagcaccacgaacaucaugaucaccaccaucaucaucgugaucaucgugauccugcugcuccugaucgccgucgggcuguuccucuacugcaaggcccgcugaggacuaguguccaccugucccuccugggcugcuggauugucucguuuuccugccaaauaaacaggaucagcgcuuuacagaucuaaaaaaaaaaaaaaaaaaaaaaaaaaaaaaaaaaaaaaaaaaaaaaaaaaaaaaaaaaaaaaaaugcaucccccccccccccccccccccccccccccccaaaggcucuuuucagagccaccagaauu

SEQ ID NO: 15233 - RNA, 1826 nt, Artificial Sequence
  mRNA product Design e-3 comprising derived and/or modified sequence from HRSV(Memphis-37)__AIY60640.1__F-del_DSCav1_mut2 (opt1)
gggagacuuucccauucuguagcagaauuugguguugccuguggucuuggucccgcggagaagcuuaccauggagcugcccauccucaagaccaacgccaucaccacgauccuggccgcggugacccugugcuucgccagcucccagaacaucaccgaggaguucuaccagagcacgugcuccgccgucagcaagggcuaccucggggcccugcgcaccggcugguacaccuccgugaucaccaucgagcugagcaacaucaaggagaacaagugcaacgggaccgacgccaaggugaagcucaucaagcaggagcuggacaaguacaagaacgcggucacggaccugcagcuccugaugcaguccaccccggccgccggcagcggguccgccaucugcagcggcaucgcggugugcaaggugcugcaccucgagggcgaggucaacaagaucaagaacgcccugcuguccaccaacaaggccguggugagccucuccaacggggucagcgugcugaccuucaaggugcuggaccucaagaacuacaucgacaagcagcugcugcccauccucaacaagcaguccugcagcauccccaacaucgagacggucaucgaguuccagcagaagaacaaccggcugcuggagaucacccgcgaguucuccgugaacgccggcgugaccacccccgucagcacguacaugcucaccaacuccgagcugcugagccucaucaacgacaugccgaucaccaacgaccagaagaagcugaugagcaacaacgugcagaucgugcggcagcaguccuacagcaucaugugcaucaucaaggaggagguccuggccuacguggugcagcucccccuguacggggucaucgacacccccugcuggaagcugcacacgagcccccucugcaccaccaacaccaaggagggcuccaacaucugccugacgcgcaccgaccgggggugguacugcgacaacgcgggcuccgugagcuucuucccgcaggccgagaccugcaaggugcaguccaaccgcgucuucugcgacaccaugaacagccugacgcuccccuccgaggugaaccugugcaacaucgacaucuucaaccccaaguacgacugcaagaucaugaccagcaagaccgacgucuccagcuccgugaucaccagccugggcgccaucguguccugcuacgggaagacgaagugcaccgccagcaacaagaaccggggcaucaucaagaccuucuccaacgggugcgacuacgucagcaacaagggcguggacaccguguccgucggcaacacgcucuacugcgugaacaagcaggaggggcagagccuguacgugaagggcgagcccaucaucaacuucuacgacccgcuggucuuccccagcgacgaguucgacgccuccaucagccaggugaacgagaagaucaaccagucccucgcguucauccgcaagagcgacgagcugcugcacaacgugaacgucgggaaguccaccaccaacaucaugaucaccaccaucaucaucgugaucaucgugauccuccugcugcucaucgccgucggccuguuccuguacugcaaggcccggugaggacuaguguccaccugucccuccugggcugcuggauugucucguuuuccugccaaauaaacaggaucagcgcuuuacagaucuaaaaaaaaaaaaaaaaaaaaaaaaaaaaaaaaaaaaaaaaaaaaaaaaaaaaaaaaaaaaaaaaugcaucccccccccccccccccccccccccccccccaaaggcucuuuucagagccaccagaauu

SEQ ID NO: 15234 - RNA, 1826 nt, Artificial Sequence
  mRNA product Design e-3 comprising derived and/or modified sequence from HRSV(Memphis-37)__AIY60640.1__F-del_DSCav1_mut2 (opt2)
gggagacuuucccauucuguagcagaauuugguguugccuguggucuuggucccgcggagaagcuuaccauggagcuccccauccucaagaccaacgccaucaccaccauccucgccgccgucacccucugcuucgccuccucccagaacaucaccgaggaguucuaccaguccaccugcuccgccgucuccaagggcuaccucggcgcccuccgcaccggcugguacaccuccgucaucaccaucgagcucuccaacaucaaggagaacaagugcaacggcaccgacgccaaggucaagcucaucaagcaggagcucgacaaguacaagaacgccgucaccgaccuccagcuccucaugcaguccacccccgccgccggcuccggcuccgccaucugcuccggcaucgccgucugcaagguccuccaccucgagggcgaggucaacaagaucaagaacgcccuccucuccaccaacaaggccgucgucucccucuccaacggcgucuccguccucaccuucaagguccucgaccucaagaacuacaucgacaagcagcuccuccccauccucaacaagcaguccugcuccauccccaacaucgagaccgucaucgaguuccagcagaagaacaaccgccuccucgagaucacccgcgaguucuccgucaacgccggcgucaccacccccgucuccaccuacaugcucaccaacuccgagcuccucucccucaucaacgacaugcccaucaccaacgaccagaagaagcucauguccaacaacguccagaucguccgccagcaguccuacuccaucaugugcaucaucaaggaggagguccucgccuacgucguccagcucccccucuacggcgucaucgacacccccugcuggaagcuccacaccuccccccucugcaccaccaacaccaaggagggcuccaacaucugccucacccgcaccgaccgcggcugguacugcgacaacgccggcuccgucuccuucuucccccaggccgagaccugcaagguccaguccaaccgcgucuucugcgacaccaugaacucccucacccuccccuccgaggucaaccucugcaacaucgacaucuucaaccccaaguacgacugcaagaucaugaccuccaagaccgacgucuccuccuccgucaucaccucccucggcgccaucgucuccugcuacggcaagaccaagugcaccgccuccaacaagaaccgcggcaucaucaagaccuucuccaacggcugcgacuacgucuccaacaagggcgucgacaccgucuccgucggcaacacccucuacugcgucaacaagcaggagggccagucccucuacgucaagggcgagcccaucaucaacuucuacgacccccucgucuuccccuccgacgaguucgacgccuccaucucccaggucaacgagaagaucaaccagucccucgccuucauccgcaaguccgacgagcuccuccacaacgucaacgucggcaaguccaccaccaacaucaugaucaccaccaucaucaucgucaucaucgucauccuccuccuccucaucgccgucggccucuuccucuacugcaaggcccgcugaggacuaguguccaccugucccuccugggcugcuggauugucucguuuuccugccaaauaaacaggaucagcgcuuuacagaucuaaaaaaaaaaaaaaaaaaaaaaaaaaaaaaaaaaaaaaaaaaaaaaaaaaaaaaaaaaaaaaaaugcaucccccccccccccccccccccccccccccccaaaggcucuuuucagagccaccagaauu

SEQ ID NO: 15235 - RNA, 1826 nt, Artificial Sequence
  mRNA product Design e-3 comprising derived and/or modified sequence from HRSV(Memphis-37)__AIY60640.1__F-del_DSCav1_mut2 (opt3)
gggagacuuucccauucuguagcagaauuugguguugccuguggucuuggucccgcggagaagcuuaccauggagcugcccauccucaagaccaacgccauuacaacuauacuugcugcagugacgcugugcuucgccagcucccagaauaucaccgaagaguuuuaccaaucuacauguucagcggucaguaaaggcuauuugggggcuuuaagaacuggaugguacaccagcguuauuacaaucgaacuguccaacauuaaggagaauaaaugcaacgguaccgacgccaaggugaaacuaaucaagcaggaacucgauaaguauaaaaaugcaguaacugaccugcagcuucugaugcagucuacuccugccgcuggcucggggucagcaauauguagcggaaucgccgugugcaaggucuugcaccucgagggcgaggugaacaaaauuaagaaugcucugcugaguaccaacaaagccguugugucccucucuaauggugucagcguguuaacguucaagguacuggaucuuaagaacuacaucgacaaacaauugcugccaauucuaaauaagcaguccuguucaaucccgaacauagaaacuguuauugaguuucagcagaaaaauaacaggcuccuggaaaucacccgggaguucagugugaaugcgggggucacaacucccgugagcaccuauaugcuuacaaacucugagcuguugucccucauuaacgauaugccuaucaccaaugaccaaaagaaacugaugucaaacaaugugcagaucguccgccagcagagcuacaguauuaugugcauaaucaaggaagagguuuuagcauaugugguacaacugccacucuacggagugauugauacgcccuguuggaaacuucauacuucuccucugugcacaaccaacacuaaggaaggcuccaauaucuguuugacacgaaccgaccguggcugguacugcgauaacgccgggagcgucucguuuuucccacaggcugagacguguaaggugcagucuaauagaguuuucugcgacaccaugaacucccuaacacugcccucagaagugaaucucugcaacauagauauuuucaauccuaaauaugacuguaagaucaugacaaguaaaaccgaugucagcuccucugugaucacaagccugggagccauuguaucaugcuacgguaagacuaaauguaccgcaaguaacaagaauaggggcaucauuaagacauuuuccaacgggugcgacuauguuagcaauaaaggaguggacaccgucucugugggcaacacucuuuacugugucaacaagcaagagggucagucacuguaugugaaaggggagccaauaaucaauuucuacgauccguugguuuuucccagugacgaauuugaugcuagcauuucccaggugaacgagaagaucaaucagucucucgccuuuauccggaaaucggacgaacuguuacacaacguaaaugucggaaagagcacgacaaacauuaugauaaccacuaucauuaucgugauuaucguuauacugcuacuccugaucgcggugggccuuuucuuguauugcaaggcccgcugaggacuaguguccaccugucccuccugggcugcuggauugucucguuuuccugccaaauaaacaggaucagcgcuuuacagaucuaaaaaaaaaaaaaaaaaaaaaaaaaaaaaaaaaaaaaaaaaaaaaaaaaaaaaaaaaaaaaaaaugcaucccccccccccccccccccccccccccccccaaaggcucuuuucagagccaccagaauu

SEQ ID NO: 15236 - RNA, 1826 nt, Artificial Sequence
  mRNA product Design e-3 comprising derived and/or modified sequence from HRSV(Memphis-37)__AIY60640.1__F-del_DSCav1_mut2 (opt4)
gggagacuuucccauucuguagcagaauuugguguugccuguggucuuggucccgcggagaagcuuaccauggagcugcccauccugaagaccaacgccaucaccaccauccuggccgccgugacccugugcuucgccagcagccagaacaucaccgaggaguucuaccagagcaccugcagcgccgugagcaagggcuaccugggcgcccugagaaccggcugguacaccagcgugaucaccaucgagcugagcaacaucaaggagaacaagugcaacggcaccgacgccaaggugaagcugaucaagcaggagcuggacaaguacaagaacgccgugaccgaccugcagcugcugaugcagagcacccccgccgccggcagcggcagcgccaucugcagcggcaucgccgugugcaaggugcugcaccuggagggcgaggugaacaagaucaagaacgcccugcugagcaccaacaaggccguggugagccugagcaacggcgugagcgugcugaccuucaaggugcuggaccugaagaacuacaucgacaagcagcugcugcccauccugaacaagcagagcugcagcauccccaacaucgagaccgugaucgaguuccagcagaagaacaacagacugcuggagaucaccagagaguucagcgugaacgccggcgugaccacccccgugagcaccuacaugcugaccaacagcgagcugcugagccugaucaacgacaugcccaucaccaacgaccagaagaagcugaugagcaacaacgugcagaucgugagacagcagagcuacagcaucaugugcaucaucaaggaggaggugcuggccuacguggugcagcugccccuguacggcgugaucgacacccccugcuggaagcugcacaccagcccccugugcaccaccaacaccaaggagggcagcaacaucugccugaccagaaccgacagaggcugguacugcgacaacgccggcagcgugagcuucuucccccaggccgagaccugcaaggugcagagcaacagaguguucugcgacaccaugaacagccugacccugcccagcgaggugaaccugugcaacaucgacaucuucaaccccaaguacgacugcaagaucaugaccagcaagaccgacgugagcagcagcgugaucaccagccugggcgccaucgugagcugcuacggcaagaccaagugcaccgccagcaacaagaacagaggcaucaucaagaccuucagcaacggcugcgacuacgugagcaacaagggcguggacaccgugagcgugggcaacacccuguacugcgugaacaagcaggagggccagagccuguacgugaagggcgagcccaucaucaacuucuacgacccccugguguuccccagcgacgaguucgacgccagcaucagccaggugaacgagaagaucaaccagagccuggccuucaucagaaagagcgacgagcugcugcacaacgugaacgugggcaagagcaccaccaacaucaugaucaccaccaucaucaucgugaucaucgugauccugcugcugcugaucgccgugggccuguuccuguacugcaaggccagaugaggacuaguguccaccugucccuccugggcugcuggauugucucguuuuccugccaaauaaacaggaucagcgcuuuacagaucuaaaaaaaaaaaaaaaaaaaaaaaaaaaaaaaaaaaaaaaaaaaaaaaaaaaaaaaaaaaaaaaaugcaucccccccccccccccccccccccccccccccaaaggcucuuuucagagccaccagaauu

SEQ ID NO: 15237 - RNA, 1826 nt, Artificial Sequence
  mRNA product Design e-3 comprising derived and/or modified sequence from HRSV(Memphis-37)__AIY60640.1__F-del_DSCav1_mut2 (opt5)
gggagacuuucccauucuguagcagaauuugguguugccuguggucuuggucccgcggagaagcuuaccauggagcugcccauccucaagaccaacgccauuacaacgauccuggcugccgugacccuuugcuucgcgagcucccagaauauuacagaagaguuuuaccaaucuaccuguagcgcugucuccaaaggcuaucugggggcccucagaacaggaugguacaccucuguuaucacaauugaacugagcaacaucaaggagaauaaaugcaacggcaccgacgccaaggugaaacuuaucaagcaggaacuggauaaguauaaaaaugcugugacggaccuccagcugcugaugcaguccaccccugccgcugggucuggaagcgccauuuguuccggcaucgcggucugcaaggugcuccaccuggagggggagguuaacaaaauuaagaaugcccuucugagcacaaacaaagcuguggucucucucuccaauggagugagcguucugaccuucaaggugcuugaucugaagaacuacaucgacaaacaacuccugccgauucugaauaagcagucuuguuccauccccaacauugaaacagucaucgaguuucagcagaaaaauaaccggcuccuggaaaucacccgcgaguucagcgugaaugccggcgugacgacaccugucucuaccuauaugcuuacaaacuccgagcugcucagccugauuaacgauaugcccaucaccaaugaccaaaagaaacuuauguccaacaauguucagauugugagacagcagucuuacagcaucaugugcauuaucaaggaagaggugcuggcuuaugucgugcaacucccucuguacggcguuaucgauacccccuguuggaaacugcauacauccccucucugcacgaccaacacaaaggaagggagcaauauuugucugacccggacagaccgcggaugguacugcgauaacgccggcucuguguccuuuuucccgcaggcggagaccuguaagguccagagcaauagaguguuuugcgacacgaugaacucucuuacacugcccagcgaaguuaaucucugcaacaucgauauuuucaauccuaaauaugacuguaagaucaugaccuccaaaaccgaugugucuagcuccgucauuacaagccugggggccaucgugucuugcuacggaaagaccaaauguacagcuuccaacaagaaucggggcaucauuaagacguuuagcaacgggugcgacuaugucucuaauaaaggaguggacaccguuuccgugggcaacacacuuuacugugucaacaagcaagagggccagagccuguaugugaaaggggagcccaucauuaauuucuacgauccucucguuuuucccuccgacgaguucgaugccucuaucagccaggugaacgaaaagauuaaucagucccuggcuuuuauccgcaaaucugacgaacugcuccacaacgucaaugugggaaagagcaccacaaacauuaugaucaccacgaucauuaucgugauuaucguuauucugcuucugcucaucgccgucggccuguuccuguauugcaaggccagaugaggacuaguguccaccugucccuccugggcugcuggauugucucguuuuccugccaaauaaacaggaucagcgcuuuacagaucuaaaaaaaaaaaaaaaaaaaaaaaaaaaaaaaaaaaaaaaaaaaaaaaaaaaaaaaaaaaaaaaaugcaucccccccccccccccccccccccccccccccaaaggcucuuuucagagccaccagaauu

SEQ ID NO: 15238 - RNA, 1826 nt, Artificial Sequence
  mRNA product Design e-3 comprising derived and/or modified sequence from HRSV(Memphis-37)__AIY60640.1__F-del_DSCav1_mut2 (opt6)
gggagacuuucccauucuguagcagaauuugguguugccuguggucuuggucccgcggagaagcuuaccauggaacuaccaauacucaaaacaaacgcaauaacaacaauuuuagcugcaguaacacuuuguuucgcauccucccaaaauauaacagaagaauuuuaucaaucaaccugcucagccgucuccaaaggauaucuaggugcacuacgcacuggaugguacacaagugucaucacaauagaacuuuccaacaucaaagaaaauaaauguaauggaacugacgcaaaaguaaaacucauaaaacaagaacuagacaaauacaaaaacgcaguaacagaccuacaacuauuaaugcaaucaacaccagcagcaggauccggcagugccauaugcucuggaauagcagucugcaaaguuuuacacuuagaaggcgaaguaaacaaaaucaaaaacgcccuacuaucuacaaauaaagccgucguaucucucucaaauggaguaucaguacuaacauucaaaguauuagacuuaaaaaacuacaucgauaaacaauuauugccaauauuaaacaaacaaucuugcucaauaccaaauauagaaacagucauagaauuucaacaaaaaaauaaccgauuauuagaaauaacacgagaauuuucaguaaaugccggagucaccacaccaguaucaacauacaugcuaacaaauucagaacuauuaucauuaauaaacgacaugccuauuacaaaugaucaaaaaaaacuaauguccaacaauguacaaauaguccgacaacaaagcuacucaaucauguguauaauaaaagaagaaguacuugcauacguaguacaauuaccacuauacggaguuaucgacacaccaugcuggaaacuccacacuucaccacucugcaccacaaacacaaaagaaggcucaaacauaugccuaacaagaacagaccgaggaugguacugcgacaacgcaggaucaguaucauucuucccacaagcagaaacuugcaaaguacaaucuaacagaguuuucugugacaccaugaauagccuaacacuccccuccgaaguuaaccuauguaacauagauauauuuaaucccaaauaugauugcaaaaucaugacaucuaaaaccgacguaucaucaucuguaaucacaucacuaggugccauagucucaugcuacggcaaaacaaaaugcaccgccucaaacaaaaaccgagguauaauaaaaaccuucaguaauggaugugacuacguaucaaacaaagguguugauaccguaagcgucggcaacacccuauacugcguaaauaaacaagaaggccaaucacuauacgucaaaggcgaaccaauuauuaacuucuaugacccacucgucuuucccuccgacgaauuugacgcaagcauaucacaaguaaacgaaaaaauaaaccaaucacuagcauucauacgcaaaucagaugaacuacuacauaacguaaacguaggaaaauccacuacaaauauaaugaucacaacaauaauaaucguaauuauagucauauuauuacuacuaauagcaguaggacuuuuccuauacuguaaagcaagauaaggacuaguguccaccugucccuccugggcugcuggauugucucguuuuccugccaaauaaacaggaucagcgcuuuacagaucuaaaaaaaaaaaaaaaaaaaaaaaaaaaaaaaaaaaaaaaaaaaaaaaaaaaaaaaaaaaaaaaaugcaucccccccccccccccccccccccccccccccaaaggcucuuuucagagccaccagaauu

SEQ ID NO: 15239 - RNA, 1826 nt, Artificial Sequence
  mRNA product Design e-3 comprising derived and/or modified sequence from HRSV(Memphis-37)__AIY60640.1__F-del_DSCav1_mut2 (opt11)
gggagacuuucccauucuguagcagaauuugguguugccuguggucuuggucccgcggagaagcuuaccauggaacuucccauccucaagaccaacgcuauuacgaccauccucgccgcagucacccucugcuucgcgucaucccaaaacaucaccgaagaauuuuaccaauccacaugcuccgcagucucaaaaggcuaccuaggagcccuacgcaccggaugguacacauccgucaucacaaucgaacucuccaacauaaaagaaaacaaaugcaacggcaccgaugccaaaguaaaacugauuaaacaagaacucgacaaauacaagaacgccgucacagaccuacagcuccucaugcaaucaacucccgccgccggcagcggauccgcuaucugcucaggcaucgccguaugcaaaguccuccaccuagaaggcgaaguaaacaaaaucaagaacgcacuacucucaacaaacaaagccgucgucucccucuccaacggcgucuccguccuuaccuucaaaguccucgaccuuaagaacuacauugacaaacaacuccuacccauccucaacaaacaauccugcucuauaccuaauauagaaaccguaaucgaauuucaacagaaaaacaaccgccuccucgaaauuacccgcgaguucucaguaaacgccggcguaaccacccccgucuccaccuacaugcucacaaauucagaacuccucagccucaucaacgacaugcccauaaccaacgaccaaaagaaacucaugucaaacaacguccaaaucgucaggcaacaaagcuacagcaucaugugcaucauuaaagaagaaguacucgccuacgucgugcaacuaccccucuacggcgucauagacacacccugcuggaaacuucacacaucaccgcucugcaccacaaacaccaaagaaggcaguaacauaugccucacccgaaccgaccgcggaugguacugcgacaacgccggauccgucagcuucuucccacaagccgaaaccugcaaaguacaauccaaccgagucuucugcgacaccaugaacucucuuacgcuccccucagaagucaaccuaugcaacaucgacaucuucaaccccaaauacgacugcaaaaucaugaccuccaaaacagacgucuccuccucagugauaaccucccucggcgccauugucuccugcuacggcaaaaccaaaugcaccgccuccaacaaaaaccgugggaucaucaaaaccuucucaaacggcugcgacuacguauccaauaagggugucgacacagucuccguaggcaauacccucuauugcgucaacaaacaagaaggccaaucccucuacgucaaaggcgaaccuaucaucaacuucuacgacccgcuagucuuccccucagacgaguucgacgcauccaucucacaagucaacgaaaagaucaaccagucccucgcauucauccgaaaauccgacgaacuucuccacaacguuaacgucggcaaauccaccacuaacauaaugaucaccacgaucaucauaguaauuaucgucauacuccuccuccuaaucgcugucggacucuuccucuacugcaaggcccgcuaaggacuaguguccaccugucccuccugggcugcuggauugucucguuuuccugccaaauaaacaggaucagcgcuuuacagaucuaaaaaaaaaaaaaaaaaaaaaaaaaaaaaaaaaaaaaaaaaaaaaaaaaaaaaaaaaaaaaaaaugcaucccccccccccccccccccccccccccccccaaaggcucuuuucagagccaccagaauu

SEQ ID NO: 15240 - RNA, 1880 nt, Artificial Sequence
  mRNA product Design e-4 comprising derived and/or modified sequence from HRSV(Memphis-37)__AIY60640.1__F-del_DSCav1_mut2 (opt1)
gggagacuccugucgggcggaaguaggaggaguagaguuuaaaaacaguacucuuuuuccgguucgggacguaguugaagcaacgacaagccggauaaccgcucuugagacaggaagcuuaccauggagcugcccauccucaagaccaacgccaucaccacgauccuggccgcggugacccugugcuucgccagcucccagaacaucaccgaggaguucuaccagagcacgugcuccgccgucagcaagggcuaccucggcgcccugcgcaccgggugguacaccagcgugaucaccaucgagcuguccaacaucaaggagaacaagugcaacggcaccgacgccaaggugaagcucaucaagcaggagcuggacaaguacaagaacgcggucacggaccugcagcuccugaugcagagcaccccggccgccggcuccgggagcgcgaucugcuccggcaucgccgucugcaaggugcugcaccucgagggcgaggugaacaagaucaagaacgcccugcuguccaccaacaaggccgucgugagccucuccaacggggugagcguccugaccuucaaggugcuggaccucaagaacuacaucgacaagcagcugcugcccauccugaacaagcagagcugcuccauccccaacaucgagaccgucaucgaguuccagcagaagaacaaccgccuccuggagaucacgcgggaguucagcgugaacgcgggcgugaccacccccgucuccaccuacaugcugacgaacagcgagcuccugucccugaucaacgacaugccgaucaccaacgaccagaagaagcucaugagcaacaacgugcagaucgugcgccagcaguccuacagcaucaugugcaucaucaaggaggagguccuggccuacguggugcagcugccccucuacggggucaucgacacccccugcuggaagcugcacaccagcccccugugcacgaccaacaccaaggagggcuccaacaucugccucacccggacggaccgcgggugguacugcgacaacgccggcagcguguccuucuucccgcaggccgagaccugcaagguccagagcaaccggguguucugcgacaccaugaacucccugacccugcccagcgaggugaaccucugcaacaucgacaucuucaaccccaaguacgacugcaagaucaugacguccaagaccgacgucagcuccagcgugaucaccucccugggcgccaucgugagcugcuacgggaagaccaagugcacggcgagcaacaagaaccgcggcaucaucaagaccuucuccaacgggugcgacuacgucagcaacaagggcguggacaccguguccgucggcaacacccuguacugcgugaacaagcaggagggccagagccucuacgugaagggggagcccaucaucaacuucuacgacccgcuggucuuccccuccgacgaguucgacgccagcaucucccaggugaacgagaagaucaaccagagccuggccuucauccggaaguccgacgagcuccugcacaacgugaacgucggcaagagcaccacgaacaucaugaucaccaccaucaucaucgugaucaucgugauccugcugcuccugaucgccgucgggcuguuccucuacugcaaggcccgcugaggacuaguguccaccugucccuccugggcugcuggauugucucguuuuccugccaaauaaacaggaucagcgcuuuacagaucuaaaaaaaaaaaaaaaaaaaaaaaaaaaaaaaaaaaaaaaaaaaaaaaaaaaaaaaaaaaaaaaaugcaucccccccccccccccccccccccccccccccaaaggcucuuuucagagccaccagaauu

SEQ ID NO: 15241 - RNA, 1880 nt, Artificial Sequence
  mRNA product Design e-4 comprising derived and/or modified sequence from HRSV(Memphis-37)__AIY60640.1__F-del_DSCav1_mut2 (opt1)
gggagacuccugucgggcggaaguaggaggaguagaguuuaaaaacaguacucuuuuuccgguucgggacguaguugaagcaacgacaagccggauaaccgcucuugagacaggaagcuuaccauggagcugcccauccucaagaccaacgccaucaccacgauccuggccgcggugacccugugcuucgccagcucccagaacaucaccgaggaguucuaccagagcacgugcuccgccgucagcaagggcuaccucggggcccugcgcaccggcugguacaccuccgugaucaccaucgagcugagcaacaucaaggagaacaagugcaacgggaccgacgccaaggugaagcucaucaagcaggagcuggacaaguacaagaacgcggucacggaccugcagcuccugaugcaguccaccccggccgccggcagcggguccgccaucugcagcggcaucgcggugugcaaggugcugcaccucgagggcgaggucaacaagaucaagaacgcccugcuguccaccaacaaggccguggugagccucuccaacggggucagcgugcugaccuucaaggugcuggaccucaagaacuacaucgacaagcagcugcugcccauccucaacaagcaguccugcagcauccccaacaucgagacggucaucgaguuccagcagaagaacaaccggcugcuggagaucacccgcgaguucuccgugaacgccggcgugaccacccccgucagcacguacaugcucaccaacuccgagcugcugagccucaucaacgacaugccgaucaccaacgaccagaagaagcugaugagcaacaacgugcagaucgugcggcagcaguccuacagcaucaugugcaucaucaaggaggagguccuggccuacguggugcagcucccccuguacggggucaucgacacccccugcuggaagcugcacacgagcccccucugcaccaccaacaccaaggagggcuccaacaucugccugacgcgcaccgaccgggggugguacugcgacaacgcgggcuccgugagcuucuucccgcaggccgagaccugcaaggugcaguccaaccgcgucuucugcgacaccaugaacagccugacgcuccccuccgaggugaaccugugcaacaucgacaucuucaaccccaaguacgacugcaagaucaugaccagcaagaccgacgucuccagcuccgugaucaccagccugggcgccaucguguccugcuacgggaagacgaagugcaccgccagcaacaagaaccggggcaucaucaagaccuucuccaacgggugcgacuacgucagcaacaagggcguggacaccguguccgucggcaacacgcucuacugcgugaacaagcaggaggggcagagccuguacgugaagggcgagcccaucaucaacuucuacgacccgcuggucuuccccagcgacgaguucgacgccuccaucagccaggugaacgagaagaucaaccagucccucgcguucauccgcaagagcgacgagcugcugcacaacgugaacgucgggaaguccaccaccaacaucaugaucaccaccaucaucaucgugaucaucgugauccuccugcugcucaucgccgucggccuguuccuguacugcaaggcccggugaggacuaguguccaccugucccuccugggcugcuggauugucucguuuuccugccaaauaaacaggaucagcgcuuuacagaucuaaaaaaaaaaaaaaaaaaaaaaaaaaaaaaaaaaaaaaaaaaaaaaaaaaaaaaaaaaaaaaaaugcaucccccccccccccccccccccccccccccccaaaggcucuuuucagagccaccagaauu

SEQ ID NO: 15242 - RNA, 1880 nt, Artificial Sequence
  mRNA product Design e-4 comprising derived and/or modified sequence from HRSV(Memphis-37)__AIY60640.1__F-del_DSCav1_mut2 (opt2)
gggagacuccugucgggcggaaguaggaggaguagaguuuaaaaacaguacucuuuuuccgguucgggacguaguugaagcaacgacaagccggauaaccgcucuugagacaggaagcuuaccauggagcuccccauccucaagaccaacgccaucaccaccauccucgccgccgucacccucugcuucgccuccucccagaacaucaccgaggaguucuaccaguccaccugcuccgccgucuccaagggcuaccucggcgcccuccgcaccggcugguacaccuccgucaucaccaucgagcucuccaacaucaaggagaacaagugcaacggcaccgacgccaaggucaagcucaucaagcaggagcucgacaaguacaagaacgccgucaccgaccuccagcuccucaugcaguccacccccgccgccggcuccggcuccgccaucugcuccggcaucgccgucugcaagguccuccaccucgagggcgaggucaacaagaucaagaacgcccuccucuccaccaacaaggccgucgucucccucuccaacggcgucuccguccucaccuucaagguccucgaccucaagaacuacaucgacaagcagcuccuccccauccucaacaagcaguccugcuccauccccaacaucgagaccgucaucgaguuccagcagaagaacaaccgccuccucgagaucacccgcgaguucuccgucaacgccggcgucaccacccccgucuccaccuacaugcucaccaacuccgagcuccucucccucaucaacgacaugcccaucaccaacgaccagaagaagcucauguccaacaacguccagaucguccgccagcaguccuacuccaucaugugcaucaucaaggaggagguccucgccuacgucguccagcucccccucuacggcgucaucgacacccccugcuggaagcuccacaccuccccccucugcaccaccaacaccaaggagggcuccaacaucugccucacccgcaccgaccgcggcugguacugcgacaacgccggcuccgucuccuucuucccccaggccgagaccugcaagguccaguccaaccgcgucuucugcgacaccaugaacucccucacccuccccuccgaggucaaccucugcaacaucgacaucuucaaccccaaguacgacugcaagaucaugaccuccaagaccgacgucuccuccuccgucaucaccucccucggcgccaucgucuccugcuacggcaagaccaagugcaccgccuccaacaagaaccgcggcaucaucaagaccuucuccaacggcugcgacuacgucuccaacaagggcgucgacaccgucuccgucggcaacacccucuacugcgucaacaagcaggagggccagucccucuacgucaagggcgagcccaucaucaacuucuacgacccccucgucuuccccuccgacgaguucgacgccuccaucucccaggucaacgagaagaucaaccagucccucgccuucauccgcaaguccgacgagcuccuccacaacgucaacgucggcaaguccaccaccaacaucaugaucaccaccaucaucaucgucaucaucgucauccuccuccuccucaucgccgucggccucuuccucuacugcaaggcccgcugaggacuaguguccaccugucccuccugggcugcuggauugucucguuuuccugccaaauaaacaggaucagcgcuuuacagaucuaaaaaaaaaaaaaaaaaaaaaaaaaaaaaaaaaaaaaaaaaaaaaaaaaaaaaaaaaaaaaaaaugcaucccccccccccccccccccccccccccccccaaaggcucuuuucagagccaccagaauu

SEQ ID NO: 15243 - RNA, 1880 nt, Artificial Sequence
  mRNA product Design e-4 comprising derived and/or modified sequence from HRSV(Memphis-37)__AIY60640.1__F-del_DSCav1_mut2 (opt3)
gggagacuccugucgggcggaaguaggaggaguagaguuuaaaaacaguacucuuuuuccgguucgggacguaguugaagcaacgacaagccggauaaccgcucuugagacaggaagcuuaccauggagcugcccauccucaagaccaacgccauuacaacuauacuugcugcagugacgcugugcuucgccagcucccagaauaucaccgaagaguuuuaccaaucuacauguucagcggucaguaaaggcuauuugggggcuuuaagaacuggaugguacaccagcguuauuacaaucgaacuguccaacauuaaggagaauaaaugcaacgguaccgacgccaaggugaaacuaaucaagcaggaacucgauaaguauaaaaaugcaguaacugaccugcagcuucugaugcagucuacuccugccgcuggcucggggucagcaauauguagcggaaucgccgugugcaaggucuugcaccucgagggcgaggugaacaaaauuaagaaugcucugcugaguaccaacaaagccguugugucccucucuaauggugucagcguguuaacguucaagguacuggaucuuaagaacuacaucgacaaacaauugcugccaauucuaaauaagcaguccuguucaaucccgaacauagaaacuguuauugaguuucagcagaaaaauaacaggcuccuggaaaucacccgggaguucagugugaaugcgggggucacaacucccgugagcaccuauaugcuuacaaacucugagcuguugucccucauuaacgauaugccuaucaccaaugaccaaaagaaacugaugucaaacaaugugcagaucguccgccagcagagcuacaguauuaugugcauaaucaaggaagagguuuuagcauaugugguacaacugccacucuacggagugauugauacgcccuguuggaaacuucauacuucuccucugugcacaaccaacacuaaggaaggcuccaauaucuguuugacacgaaccgaccguggcugguacugcgauaacgccgggagcgucucguuuuucccacaggcugagacguguaaggugcagucuaauagaguuuucugcgacaccaugaacucccuaacacugcccucagaagugaaucucugcaacauagauauuuucaauccuaaauaugacuguaagaucaugacaaguaaaaccgaugucagcuccucugugaucacaagccugggagccauuguaucaugcuacgguaagacuaaauguaccgcaaguaacaagaauaggggcaucauuaagacauuuuccaacgggugcgacuauguuagcaauaaaggaguggacaccgucucugugggcaacacucuuuacugugucaacaagcaagagggucagucacuguaugugaaaggggagccaauaaucaauuucuacgauccguugguuuuucccagugacgaauuugaugcuagcauuucccaggugaacgagaagaucaaucagucucucgccuuuauccggaaaucggacgaacuguuacacaacguaaaugucggaaagagcacgacaaacauuaugauaaccacuaucauuaucgugauuaucguuauacugcuacuccugaucgcggugggccuuuucuuguauugcaaggcccgcugaggacuaguguccaccugucccuccugggcugcuggauugucucguuuuccugccaaauaaacaggaucagcgcuuuacagaucuaaaaaaaaaaaaaaaaaaaaaaaaaaaaaaaaaaaaaaaaaaaaaaaaaaaaaaaaaaaaaaaaugcaucccccccccccccccccccccccccccccccaaaggcucuuuucagagccaccagaauu

SEQ ID NO: 15244 - RNA, 1880 nt, Artificial Sequence
  mRNA product Design e-4 comprising derived and/or modified sequence from HRSV(Memphis-37)__AIY60640.1__F-del_DSCav1_mut2 (opt4)
gggagacuccugucgggcggaaguaggaggaguagaguuuaaaaacaguacucuuuuuccgguucgggacguaguugaagcaacgacaagccggauaaccgcucuugagacaggaagcuuaccauggagcugcccauccugaagaccaacgccaucaccaccauccuggccgccgugacccugugcuucgccagcagccagaacaucaccgaggaguucuaccagagcaccugcagcgccgugagcaagggcuaccugggcgcccugagaaccggcugguacaccagcgugaucaccaucgagcugagcaacaucaaggagaacaagugcaacggcaccgacgccaaggugaagcugaucaagcaggagcuggacaaguacaagaacgccgugaccgaccugcagcugcugaugcagagcacccccgccgccggcagcggcagcgccaucugcagcggcaucgccgugugcaaggugcugcaccuggagggcgaggugaacaagaucaagaacgcccugcugagcaccaacaaggccguggugagccugagcaacggcgugagcgugcugaccuucaaggugcuggaccugaagaacuacaucgacaagcagcugcugcccauccugaacaagcagagcugcagcauccccaacaucgagaccgugaucgaguuccagcagaagaacaacagacugcuggagaucaccagagaguucagcgugaacgccggcgugaccacccccgugagcaccuacaugcugaccaacagcgagcugcugagccugaucaacgacaugcccaucaccaacgaccagaagaagcugaugagcaacaacgugcagaucgugagacagcagagcuacagcaucaugugcaucaucaaggaggaggugcuggccuacguggugcagcugccccuguacggcgugaucgacacccccugcuggaagcugcacaccagcccccugugcaccaccaacaccaaggagggcagcaacaucugccugaccagaaccgacagaggcugguacugcgacaacgccggcagcgugagcuucuucccccaggccgagaccugcaaggugcagagcaacagaguguucugcgacaccaugaacagccugacccugcccagcgaggugaaccugugcaacaucgacaucuucaaccccaaguacgacugcaagaucaugaccagcaagaccgacgugagcagcagcgugaucaccagccugggcgccaucgugagcugcuacggcaagaccaagugcaccgccagcaacaagaacagaggcaucaucaagaccuucagcaacggcugcgacuacgugagcaacaagggcguggacaccgugagcgugggcaacacccuguacugcgugaacaagcaggagggccagagccuguacgugaagggcgagcccaucaucaacuucuacgacccccugguguuccccagcgacgaguucgacgccagcaucagccaggugaacgagaagaucaaccagagccuggccuucaucagaaagagcgacgagcugcugcacaacgugaacgugggcaagagcaccaccaacaucaugaucaccaccaucaucaucgugaucaucgugauccugcugcugcugaucgccgugggccuguuccuguacugcaaggccagaugaggacuaguguccaccugucccuccugggcugcuggauugucucguuuuccugccaaauaaacaggaucagcgcuuuacagaucuaaaaaaaaaaaaaaaaaaaaaaaaaaaaaaaaaaaaaaaaaaaaaaaaaaaaaaaaaaaaaaaaugcaucccccccccccccccccccccccccccccccaaaggcucuuuucagagccaccagaauu

SEQ ID NO: 15245 - RNA, 1880 nt, Artificial Sequence
  mRNA product Design e-4 comprising derived and/or modified sequence from HRSV(Memphis-37)__AIY60640.1__F-del_DSCav1_mut2 (opt5)
gggagacuccugucgggcggaaguaggaggaguagaguuuaaaaacaguacucuuuuuccgguucgggacguaguugaagcaacgacaagccggauaaccgcucuugagacaggaagcuuaccauggagcugcccauccucaagaccaacgccauuacaacgauccuggcugccgugacccuuugcuucgcgagcucccagaauauuacagaagaguuuuaccaaucuaccuguagcgcugucuccaaaggcuaucugggggcccucagaacaggaugguacaccucuguuaucacaauugaacugagcaacaucaaggagaauaaaugcaacggcaccgacgccaaggugaaacuuaucaagcaggaacuggauaaguauaaaaaugcugugacggaccuccagcugcugaugcaguccaccccugccgcugggucuggaagcgccauuuguuccggcaucgcggucugcaaggugcuccaccuggagggggagguuaacaaaauuaagaaugcccuucugagcacaaacaaagcuguggucucucucuccaauggagugagcguucugaccuucaaggugcuugaucugaagaacuacaucgacaaacaacuccugccgauucugaauaagcagucuuguuccauccccaacauugaaacagucaucgaguuucagcagaaaaauaaccggcuccuggaaaucacccgcgaguucagcgugaaugccggcgugacgacaccugucucuaccuauaugcuuacaaacuccgagcugcucagccugauuaacgauaugcccaucaccaaugaccaaaagaaacuuauguccaacaauguucagauugugagacagcagucuuacagcaucaugugcauuaucaaggaagaggugcuggcuuaugucgugcaacucccucuguacggcguuaucgauacccccuguuggaaacugcauacauccccucucugcacgaccaacacaaaggaagggagcaauauuugucugacccggacagaccgcggaugguacugcgauaacgccggcucuguguccuuuuucccgcaggcggagaccuguaagguccagagcaauagaguguuuugcgacacgaugaacucucuuacacugcccagcgaaguuaaucucugcaacaucgauauuuucaauccuaaauaugacuguaagaucaugaccuccaaaaccgaugugucuagcuccgucauuacaagccugggggccaucgugucuugcuacggaaagaccaaauguacagcuuccaacaagaaucggggcaucauuaagacguuuagcaacgggugcgacuaugucucuaauaaaggaguggacaccguuuccgugggcaacacacuuuacugugucaacaagcaagagggccagagccuguaugugaaaggggagcccaucauuaauuucuacgauccucucguuuuucccuccgacgaguucgaugccucuaucagccaggugaacgaaaagauuaaucagucccuggcuuuuauccgcaaaucugacgaacugcuccacaacgucaaugugggaaagagcaccacaaacauuaugaucaccacgaucauuaucgugauuaucguuauucugcuucugcucaucgccgucggccuguuccuguauugcaaggccagaugaggacuaguguccaccugucccuccugggcugcuggauugucucguuuuccugccaaauaaacaggaucagcgcuuuacagaucuaaaaaaaaaaaaaaaaaaaaaaaaaaaaaaaaaaaaaaaaaaaaaaaaaaaaaaaaaaaaaaaaugcaucccccccccccccccccccccccccccccccaaaggcucuuuucagagccaccagaauu

SEQ ID NO: 15246 - RNA, 1880 nt, Artificial Sequence
  mRNA product Design e-4 comprising derived and/or modified sequence from HRSV(Memphis-37)__AIY60640.1__F-del_DSCav1_mut2 (opt6)
gggagacuccugucgggcggaaguaggaggaguagaguuuaaaaacaguacucuuuuuccgguucgggacguaguugaagcaacgacaagccggauaaccgcucuugagacaggaagcuuaccauggaacuaccaauacucaaaacaaacgcaauaacaacaauuuuagcugcaguaacacuuuguuucgcauccucccaaaauauaacagaagaauuuuaucaaucaaccugcucagccgucuccaaaggauaucuaggugcacuacgcacuggaugguacacaagugucaucacaauagaacuuuccaacaucaaagaaaauaaauguaauggaacugacgcaaaaguaaaacucauaaaacaagaacuagacaaauacaaaaacgcaguaacagaccuacaacuauuaaugcaaucaacaccagcagcaggauccggcagugccauaugcucuggaauagcagucugcaaaguuuuacacuuagaaggcgaaguaaacaaaaucaaaaacgcccuacuaucuacaaauaaagccgucguaucucucucaaauggaguaucaguacuaacauucaaaguauuagacuuaaaaaacuacaucgauaaacaauuauugccaauauuaaacaaacaaucuugcucaauaccaaauauagaaacagucauagaauuucaacaaaaaaauaaccgauuauuagaaauaacacgagaauuuucaguaaaugccggagucaccacaccaguaucaacauacaugcuaacaaauucagaacuauuaucauuaauaaacgacaugccuauuacaaaugaucaaaaaaaacuaauguccaacaauguacaaauaguccgacaacaaagcuacucaaucauguguauaauaaaagaagaaguacuugcauacguaguacaauuaccacuauacggaguuaucgacacaccaugcuggaaacuccacacuucaccacucugcaccacaaacacaaaagaaggcucaaacauaugccuaacaagaacagaccgaggaugguacugcgacaacgcaggaucaguaucauucuucccacaagcagaaacuugcaaaguacaaucuaacagaguuuucugugacaccaugaauagccuaacacuccccuccgaaguuaaccuauguaacauagauauauuuaaucccaaauaugauugcaaaaucaugacaucuaaaaccgacguaucaucaucuguaaucacaucacuaggugccauagucucaugcuacggcaaaacaaaaugcaccgccucaaacaaaaaccgagguauaauaaaaaccuucaguaauggaugugacuacguaucaaacaaagguguugauaccguaagcgucggcaacacccuauacugcguaaauaaacaagaaggccaaucacuauacgucaaaggcgaaccaauuauuaacuucuaugacccacucgucuuucccuccgacgaauuugacgcaagcauaucacaaguaaacgaaaaaauaaaccaaucacuagcauucauacgcaaaucagaugaacuacuacauaacguaaacguaggaaaauccacuacaaauauaaugaucacaacaauaauaaucguaauuauagucauauuauuacuacuaauagcaguaggacuuuuccuauacuguaaagcaagauaaggacuaguguccaccugucccuccugggcugcuggauugucucguuuuccugccaaauaaacaggaucagcgcuuuacagaucuaaaaaaaaaaaaaaaaaaaaaaaaaaaaaaaaaaaaaaaaaaaaaaaaaaaaaaaaaaaaaaaaugcaucccccccccccccccccccccccccccccccaaaggcucuuuucagagccaccagaauu

SEQ ID NO: 15247 - RNA, 1880 nt, Artificial Sequence
  mRNA product Design e-4 comprising derived and/or modified sequence from HRSV(Memphis-37)__AIY60640.1__F-del_DSCav1_mut2 (opt11)
gggagacuccugucgggcggaaguaggaggaguagaguuuaaaaacaguacucuuuuuccgguucgggacguaguugaagcaacgacaagccggauaaccgcucuugagacaggaagcuuaccauggaacuucccauccucaagaccaacgcuauuacgaccauccucgccgcagucacccucugcuucgcgucaucccaaaacaucaccgaagaauuuuaccaauccacaugcuccgcagucucaaaaggcuaccuaggagcccuacgcaccggaugguacacauccgucaucacaaucgaacucuccaacauaaaagaaaacaaaugcaacggcaccgaugccaaaguaaaacugauuaaacaagaacucgacaaauacaagaacgccgucacagaccuacagcuccucaugcaaucaacucccgccgccggcagcggauccgcuaucugcucaggcaucgccguaugcaaaguccuccaccuagaaggcgaaguaaacaaaaucaagaacgcacuacucucaacaaacaaagccgucgucucccucuccaacggcgucuccguccuuaccuucaaaguccucgaccuuaagaacuacauugacaaacaacuccuacccauccucaacaaacaauccugcucuauaccuaauauagaaaccguaaucgaauuucaacagaaaaacaaccgccuccucgaaauuacccgcgaguucucaguaaacgccggcguaaccacccccgucuccaccuacaugcucacaaauucagaacuccucagccucaucaacgacaugcccauaaccaacgaccaaaagaaacucaugucaaacaacguccaaaucgucaggcaacaaagcuacagcaucaugugcaucauuaaagaagaaguacucgccuacgucgugcaacuaccccucuacggcgucauagacacacccugcuggaaacuucacacaucaccgcucugcaccacaaacaccaaagaaggcaguaacauaugccucacccgaaccgaccgcggaugguacugcgacaacgccggauccgucagcuucuucccacaagccgaaaccugcaaaguacaauccaaccgagucuucugcgacaccaugaacucucuuacgcuccccucagaagucaaccuaugcaacaucgacaucuucaaccccaaauacgacugcaaaaucaugaccuccaaaacagacgucuccuccucagugauaaccucccucggcgccauugucuccugcuacggcaaaaccaaaugcaccgccuccaacaaaaaccgugggaucaucaaaaccuucucaaacggcugcgacuacguauccaauaagggugucgacacagucuccguaggcaauacccucuauugcgucaacaaacaagaaggccaaucccucuacgucaaaggcgaaccuaucaucaacuucuacgacccgcuagucuuccccucagacgaguucgacgcauccaucucacaagucaacgaaaagaucaaccagucccucgcauucauccgaaaauccgacgaacuucuccacaacguuaacgucggcaaauccaccacuaacauaaugaucaccacgaucaucauaguaauuaucgucauacuccuccuccuaaucgcugucggacucuuccucuacugcaaggcccgcuaaggacuaguguccaccugucccuccugggcugcuggauugucucguuuuccugccaaauaaacaggaucagcgcuuuacagaucuaaaaaaaaaaaaaaaaaaaaaaaaaaaaaaaaaaaaaaaaaaaaaaaaaaaaaaaaaaaaaaaaugcaucccccccccccccccccccccccccccccccaaaggcucuuuucagagccaccagaauu

SEQ ID NO: 15248 - RNA, 1847 nt, Artificial Sequence
  mRNA product Design e-5 comprising derived and/or modified sequence from HRSV(Memphis-37)__AIY60640.1__F-del_DSCav1_mut2 (opt1)
gggagagcggcucggccauuuugucccagucaguccggaggcugcggcugcagaaguaccgccugcggaguaacugcaaagaagcuuaccauggagcugcccauccucaagaccaacgccaucaccacgauccuggccgcggugacccugugcuucgccagcucccagaacaucaccgaggaguucuaccagagcacgugcuccgccgucagcaagggcuaccucggcgcccugcgcaccgggugguacaccagcgugaucaccaucgagcuguccaacaucaaggagaacaagugcaacggcaccgacgccaaggugaagcucaucaagcaggagcuggacaaguacaagaacgcggucacggaccugcagcuccugaugcagagcaccccggccgccggcuccgggagcgcgaucugcuccggcaucgccgucugcaaggugcugcaccucgagggcgaggugaacaagaucaagaacgcccugcuguccaccaacaaggccgucgugagccucuccaacggggugagcguccugaccuucaaggugcuggaccucaagaacuacaucgacaagcagcugcugcccauccugaacaagcagagcugcuccauccccaacaucgagaccgucaucgaguuccagcagaagaacaaccgccuccuggagaucacgcgggaguucagcgugaacgcgggcgugaccacccccgucuccaccuacaugcugacgaacagcgagcuccugucccugaucaacgacaugccgaucaccaacgaccagaagaagcucaugagcaacaacgugcagaucgugcgccagcaguccuacagcaucaugugcaucaucaaggaggagguccuggccuacguggugcagcugccccucuacggggucaucgacacccccugcuggaagcugcacaccagcccccugugcacgaccaacaccaaggagggcuccaacaucugccucacccggacggaccgcgggugguacugcgacaacgccggcagcguguccuucuucccgcaggccgagaccugcaagguccagagcaaccggguguucugcgacaccaugaacucccugacccugcccagcgaggugaaccucugcaacaucgacaucuucaaccccaaguacgacugcaagaucaugacguccaagaccgacgucagcuccagcgugaucaccucccugggcgccaucgugagcugcuacgggaagaccaagugcacggcgagcaacaagaaccgcggcaucaucaagaccuucuccaacgggugcgacuacgucagcaacaagggcguggacaccguguccgucggcaacacccuguacugcgugaacaagcaggagggccagagccucuacgugaagggggagcccaucaucaacuucuacgacccgcuggucuuccccuccgacgaguucgacgccagcaucucccaggugaacgagaagaucaaccagagccuggccuucauccggaaguccgacgagcuccugcacaacgugaacgucggcaagagcaccacgaacaucaugaucaccaccaucaucaucgugaucaucgugauccugcugcuccugaucgccgucgggcuguuccucuacugcaaggcccgcugaggacuaguguccaccugucccuccugggcugcuggauugucucguuuuccugccaaauaaacaggaucagcgcuuuacagaucuaaaaaaaaaaaaaaaaaaaaaaaaaaaaaaaaaaaaaaaaaaaaaaaaaaaaaaaaaaaaaaaaugcaucccccccccccccccccccccccccccccccaaaggcucuuuucagagccaccagaauu

SEQ ID NO: 15249 - RNA, 1847 nt, Artificial Sequence
  mRNA product Design e-5 comprising derived and/or modified sequence from HRSV(Memphis-37)__AIY60640.1__F-del_DSCav1_mut2 (opt1)
gggagagcggcucggccauuuugucccagucaguccggaggcugcggcugcagaaguaccgccugcggaguaacugcaaagaagcuuaccauggagcugcccauccucaagaccaacgccaucaccacgauccuggccgcggugacccugugcuucgccagcucccagaacaucaccgaggaguucuaccagagcacgugcuccgccgucagcaagggcuaccucggggcccugcgcaccggcugguacaccuccgugaucaccaucgagcugagcaacaucaaggagaacaagugcaacgggaccgacgccaaggugaagcucaucaagcaggagcuggacaaguacaagaacgcggucacggaccugcagcuccugaugcaguccaccccggccgccggcagcggguccgccaucugcagcggcaucgcggugugcaaggugcugcaccucgagggcgaggucaacaagaucaagaacgcccugcuguccaccaacaaggccguggugagccucuccaacggggucagcgugcugaccuucaaggugcuggaccucaagaacuacaucgacaagcagcugcugcccauccucaacaagcaguccugcagcauccccaacaucgagacggucaucgaguuccagcagaagaacaaccggcugcuggagaucacccgcgaguucuccgugaacgccggcgugaccacccccgucagcacguacaugcucaccaacuccgagcugcugagccucaucaacgacaugccgaucaccaacgaccagaagaagcugaugagcaacaacgugcagaucgugcggcagcaguccuacagcaucaugugcaucaucaaggaggagguccuggccuacguggugcagcucccccuguacggggucaucgacacccccugcuggaagcugcacacgagcccccucugcaccaccaacaccaaggagggcuccaacaucugccugacgcgcaccgaccgggggugguacugcgacaacgcgggcuccgugagcuucuucccgcaggccgagaccugcaaggugcaguccaaccgcgucuucugcgacaccaugaacagccugacgcuccccuccgaggugaaccugugcaacaucgacaucuucaaccccaaguacgacugcaagaucaugaccagcaagaccgacgucuccagcuccgugaucaccagccugggcgccaucguguccugcuacgggaagacgaagugcaccgccagcaacaagaaccggggcaucaucaagaccuucuccaacgggugcgacuacgucagcaacaagggcguggacaccguguccgucggcaacacgcucuacugcgugaacaagcaggaggggcagagccuguacgugaagggcgagcccaucaucaacuucuacgacccgcuggucuuccccagcgacgaguucgacgccuccaucagccaggugaacgagaagaucaaccagucccucgcguucauccgcaagagcgacgagcugcugcacaacgugaacgucgggaaguccaccaccaacaucaugaucaccaccaucaucaucgugaucaucgugauccuccugcugcucaucgccgucggccuguuccuguacugcaaggcccggugaggacuaguguccaccugucccuccugggcugcuggauugucucguuuuccugccaaauaaacaggaucagcgcuuuacagaucuaaaaaaaaaaaaaaaaaaaaaaaaaaaaaaaaaaaaaaaaaaaaaaaaaaaaaaaaaaaaaaaaugcaucccccccccccccccccccccccccccccccaaaggcucuuuucagagccaccagaauu

SEQ ID NO: 15250 - RNA, 1847 nt, Artificial Sequence
  mRNA product Design e-5 comprising derived and/or modified sequence from HRSV(Memphis-37)__AIY60640.1__F-del_DSCav1_mut2 (opt2)
gggagagcggcucggccauuuugucccagucaguccggaggcugcggcugcagaaguaccgccugcggaguaacugcaaagaagcuuaccauggagcuccccauccucaagaccaacgccaucaccaccauccucgccgccgucacccucugcuucgccuccucccagaacaucaccgaggaguucuaccaguccaccugcuccgccgucuccaagggcuaccucggcgcccuccgcaccggcugguacaccuccgucaucaccaucgagcucuccaacaucaaggagaacaagugcaacggcaccgacgccaaggucaagcucaucaagcaggagcucgacaaguacaagaacgccgucaccgaccuccagcuccucaugcaguccacccccgccgccggcuccggcuccgccaucugcuccggcaucgccgucugcaagguccuccaccucgagggcgaggucaacaagaucaagaacgcccuccucuccaccaacaaggccgucgucucccucuccaacggcgucuccguccucaccuucaagguccucgaccucaagaacuacaucgacaagcagcuccuccccauccucaacaagcaguccugcuccauccccaacaucgagaccgucaucgaguuccagcagaagaacaaccgccuccucgagaucacccgcgaguucuccgucaacgccggcgucaccacccccgucuccaccuacaugcucaccaacuccgagcuccucucccucaucaacgacaugcccaucaccaacgaccagaagaagcucauguccaacaacguccagaucguccgccagcaguccuacuccaucaugugcaucaucaaggaggagguccucgccuacgucguccagcucccccucuacggcgucaucgacacccccugcuggaagcuccacaccuccccccucugcaccaccaacaccaaggagggcuccaacaucugccucacccgcaccgaccgcggcugguacugcgacaacgccggcuccgucuccuucuucccccaggccgagaccugcaagguccaguccaaccgcgucuucugcgacaccaugaacucccucacccuccccuccgaggucaaccucugcaacaucgacaucuucaaccccaaguacgacugcaagaucaugaccuccaagaccgacgucuccuccuccgucaucaccucccucggcgccaucgucuccugcuacggcaagaccaagugcaccgccuccaacaagaaccgcggcaucaucaagaccuucuccaacggcugcgacuacgucuccaacaagggcgucgacaccgucuccgucggcaacacccucuacugcgucaacaagcaggagggccagucccucuacgucaagggcgagcccaucaucaacuucuacgacccccucgucuuccccuccgacgaguucgacgccuccaucucccaggucaacgagaagaucaaccagucccucgccuucauccgcaaguccgacgagcuccuccacaacgucaacgucggcaaguccaccaccaacaucaugaucaccaccaucaucaucgucaucaucgucauccuccuccuccucaucgccgucggccucuuccucuacugcaaggcccgcugaggacuaguguccaccugucccuccugggcugcuggauugucucguuuuccugccaaauaaacaggaucagcgcuuuacagaucuaaaaaaaaaaaaaaaaaaaaaaaaaaaaaaaaaaaaaaaaaaaaaaaaaaaaaaaaaaaaaaaaugcaucccccccccccccccccccccccccccccccaaaggcucuuuucagagccaccagaauu

SEQ ID NO: 15251 - RNA, 1847 nt, Artificial Sequence
  mRNA product Design e-5 comprising derived and/or modified sequence from HRSV(Memphis-37)__AIY60640.1__F-del_DSCav1_mut2 (opt3)
gggagagcggcucggccauuuugucccagucaguccggaggcugcggcugcagaaguaccgccugcggaguaacugcaaagaagcuuaccauggagcugcccauccucaagaccaacgccauuacaacuauacuugcugcagugacgcugugcuucgccagcucccagaauaucaccgaagaguuuuaccaaucuacauguucagcggucaguaaaggcuauuugggggcuuuaagaacuggaugguacaccagcguuauuacaaucgaacuguccaacauuaaggagaauaaaugcaacgguaccgacgccaaggugaaacuaaucaagcaggaacucgauaaguauaaaaaugcaguaacugaccugcagcuucugaugcagucuacuccugccgcuggcucggggucagcaauauguagcggaaucgccgugugcaaggucuugcaccucgagggcgaggugaacaaaauuaagaaugcucugcugaguaccaacaaagccguugugucccucucuaauggugucagcguguuaacguucaagguacuggaucuuaagaacuacaucgacaaacaauugcugccaauucuaaauaagcaguccuguucaaucccgaacauagaaacuguuauugaguuucagcagaaaaauaacaggcuccuggaaaucacccgggaguucagugugaaugcgggggucacaacucccgugagcaccuauaugcuuacaaacucugagcuguugucccucauuaacgauaugccuaucaccaaugaccaaaagaaacugaugucaaacaaugugcagaucguccgccagcagagcuacaguauuaugugcauaaucaaggaagagguuuuagcauaugugguacaacugccacucuacggagugauugauacgcccuguuggaaacuucauacuucuccucugugcacaaccaacacuaaggaaggcuccaauaucuguuugacacgaaccgaccguggcugguacugcgauaacgccgggagcgucucguuuuucccacaggcugagacguguaaggugcagucuaauagaguuuucugcgacaccaugaacucccuaacacugcccucagaagugaaucucugcaacauagauauuuucaauccuaaauaugacuguaagaucaugacaaguaaaaccgaugucagcuccucugugaucacaagccugggagccauuguaucaugcuacgguaagacuaaauguaccgcaaguaacaagaauaggggcaucauuaagacauuuuccaacgggugcgacuauguuagcaauaaaggaguggacaccgucucugugggcaacacucuuuacugugucaacaagcaagagggucagucacuguaugugaaaggggagccaauaaucaauuucuacgauccguugguuuuucccagugacgaauuugaugcuagcauuucccaggugaacgagaagaucaaucagucucucgccuuuauccggaaaucggacgaacuguuacacaacguaaaugucggaaagagcacgacaaacauuaugauaaccacuaucauuaucgugauuaucguuauacugcuacuccugaucgcggugggccuuuucuuguauugcaaggcccgcugaggacuaguguccaccugucccuccugggcugcuggauugucucguuuuccugccaaauaaacaggaucagcgcuuuacagaucuaaaaaaaaaaaaaaaaaaaaaaaaaaaaaaaaaaaaaaaaaaaaaaaaaaaaaaaaaaaaaaaaugcaucccccccccccccccccccccccccccccccaaaggcucuuuucagagccaccagaauu

SEQ ID NO: 15252 - RNA, 1847 nt, Artificial Sequence
  mRNA product Design e-5 comprising derived and/or modified sequence from HRSV(Memphis-37)__AIY60640.1__F-del_DSCav1_mut2 (opt4)
gggagagcggcucggccauuuugucccagucaguccggaggcugcggcugcagaaguaccgccugcggaguaacugcaaagaagcuuaccauggagcugcccauccugaagaccaacgccaucaccaccauccuggccgccgugacccugugcuucgccagcagccagaacaucaccgaggaguucuaccagagcaccugcagcgccgugagcaagggcuaccugggcgcccugagaaccggcugguacaccagcgugaucaccaucgagcugagcaacaucaaggagaacaagugcaacggcaccgacgccaaggugaagcugaucaagcaggagcuggacaaguacaagaacgccgugaccgaccugcagcugcugaugcagagcacccccgccgccggcagcggcagcgccaucugcagcggcaucgccgugugcaaggugcugcaccuggagggcgaggugaacaagaucaagaacgcccugcugagcaccaacaaggccguggugagccugagcaacggcgugagcgugcugaccuucaaggugcuggaccugaagaacuacaucgacaagcagcugcugcccauccugaacaagcagagcugcagcauccccaacaucgagaccgugaucgaguuccagcagaagaacaacagacugcuggagaucaccagagaguucagcgugaacgccggcgugaccacccccgugagcaccuacaugcugaccaacagcgagcugcugagccugaucaacgacaugcccaucaccaacgaccagaagaagcugaugagcaacaacgugcagaucgugagacagcagagcuacagcaucaugugcaucaucaaggaggaggugcuggccuacguggugcagcugccccuguacggcgugaucgacacccccugcuggaagcugcacaccagcccccugugcaccaccaacaccaaggagggcagcaacaucugccugaccagaaccgacagaggcugguacugcgacaacgccggcagcgugagcuucuucccccaggccgagaccugcaaggugcagagcaacagaguguucugcgacaccaugaacagccugacccugcccagcgaggugaaccugugcaacaucgacaucuucaaccccaaguacgacugcaagaucaugaccagcaagaccgacgugagcagcagcgugaucaccagccugggcgccaucgugagcugcuacggcaagaccaagugcaccgccagcaacaagaacagaggcaucaucaagaccuucagcaacggcugcgacuacgugagcaacaagggcguggacaccgugagcgugggcaacacccuguacugcgugaacaagcaggagggccagagccuguacgugaagggcgagcccaucaucaacuucuacgacccccugguguuccccagcgacgaguucgacgccagcaucagccaggugaacgagaagaucaaccagagccuggccuucaucagaaagagcgacgagcugcugcacaacgugaacgugggcaagagcaccaccaacaucaugaucaccaccaucaucaucgugaucaucgugauccugcugcugcugaucgccgugggccuguuccuguacugcaaggccagaugaggacuaguguccaccugucccuccugggcugcuggauugucucguuuuccugccaaauaaacaggaucagcgcuuuacagaucuaaaaaaaaaaaaaaaaaaaaaaaaaaaaaaaaaaaaaaaaaaaaaaaaaaaaaaaaaaaaaaaaugcaucccccccccccccccccccccccccccccccaaaggcucuuuucagagccaccagaauu

SEQ ID NO: 15253 - RNA, 1847 nt, Artificial Sequence
  mRNA product Design e-5 comprising derived and/or modified sequence from HRSV(Memphis-37)__AIY60640.1__F-del_DSCav1_mut2 (opt5)
gggagagcggcucggccauuuugucccagucaguccggaggcugcggcugcagaaguaccgccugcggaguaacugcaaagaagcuuaccauggagcugcccauccucaagaccaacgccauuacaacgauccuggcugccgugacccuuugcuucgcgagcucccagaauauuacagaagaguuuuaccaaucuaccuguagcgcugucuccaaaggcuaucugggggcccucagaacaggaugguacaccucuguuaucacaauugaacugagcaacaucaaggagaauaaaugcaacggcaccgacgccaaggugaaacuuaucaagcaggaacuggauaaguauaaaaaugcugugacggaccuccagcugcugaugcaguccaccccugccgcugggucuggaagcgccauuuguuccggcaucgcggucugcaaggugcuccaccuggagggggagguuaacaaaauuaagaaugcccuucugagcacaaacaaagcuguggucucucucuccaauggagugagcguucugaccuucaaggugcuugaucugaagaacuacaucgacaaacaacuccugccgauucugaauaagcagucuuguuccauccccaacauugaaacagucaucgaguuucagcagaaaaauaaccggcuccuggaaaucacccgcgaguucagcgugaaugccggcgugacgacaccugucucuaccuauaugcuuacaaacuccgagcugcucagccugauuaacgauaugcccaucaccaaugaccaaaagaaacuuauguccaacaauguucagauugugagacagcagucuuacagcaucaugugcauuaucaaggaagaggugcuggcuuaugucgugcaacucccucuguacggcguuaucgauacccccuguuggaaacugcauacauccccucucugcacgaccaacacaaaggaagggagcaauauuugucugacccggacagaccgcggaugguacugcgauaacgccggcucuguguccuuuuucccgcaggcggagaccuguaagguccagagcaauagaguguuuugcgacacgaugaacucucuuacacugcccagcgaaguuaaucucugcaacaucgauauuuucaauccuaaauaugacuguaagaucaugaccuccaaaaccgaugugucuagcuccgucauuacaagccugggggccaucgugucuugcuacggaaagaccaaauguacagcuuccaacaagaaucggggcaucauuaagacguuuagcaacgggugcgacuaugucucuaauaaaggaguggacaccguuuccgugggcaacacacuuuacugugucaacaagcaagagggccagagccuguaugugaaaggggagcccaucauuaauuucuacgauccucucguuuuucccuccgacgaguucgaugccucuaucagccaggugaacgaaaagauuaaucagucccuggcuuuuauccgcaaaucugacgaacugcuccacaacgucaaugugggaaagagcaccacaaacauuaugaucaccacgaucauuaucgugauuaucguuauucugcuucugcucaucgccgucggccuguuccuguauugcaaggccagaugaggacuaguguccaccugucccuccugggcugcuggauugucucguuuuccugccaaauaaacaggaucagcgcuuuacagaucuaaaaaaaaaaaaaaaaaaaaaaaaaaaaaaaaaaaaaaaaaaaaaaaaaaaaaaaaaaaaaaaaugcaucccccccccccccccccccccccccccccccaaaggcucuuuucagagccaccagaauu

SEQ ID NO: 15254 - RNA, 1847 nt, Artificial Sequence
  mRNA product Design e-5 comprising derived and/or modified sequence from HRSV(Memphis-37)__AIY60640.1__F-del_DSCav1_mut2 (opt6)
gggagagcggcucggccauuuugucccagucaguccggaggcugcggcugcagaaguaccgccugcggaguaacugcaaagaagcuuaccauggaacuaccaauacucaaaacaaacgcaauaacaacaauuuuagcugcaguaacacuuuguuucgcauccucccaaaauauaacagaagaauuuuaucaaucaaccugcucagccgucuccaaaggauaucuaggugcacuacgcacuggaugguacacaagugucaucacaauagaacuuuccaacaucaaagaaaauaaauguaauggaacugacgcaaaaguaaaacucauaaaacaagaacuagacaaauacaaaaacgcaguaacagaccuacaacuauuaaugcaaucaacaccagcagcaggauccggcagugccauaugcucuggaauagcagucugcaaaguuuuacacuuagaaggcgaaguaaacaaaaucaaaaacgcccuacuaucuacaaauaaagccgucguaucucucucaaauggaguaucaguacuaacauucaaaguauuagacuuaaaaaacuacaucgauaaacaauuauugccaauauuaaacaaacaaucuugcucaauaccaaauauagaaacagucauagaauuucaacaaaaaaauaaccgauuauuagaaauaacacgagaauuuucaguaaaugccggagucaccacaccaguaucaacauacaugcuaacaaauucagaacuauuaucauuaauaaacgacaugccuauuacaaaugaucaaaaaaaacuaauguccaacaauguacaaauaguccgacaacaaagcuacucaaucauguguauaauaaaagaagaaguacuugcauacguaguacaauuaccacuauacggaguuaucgacacaccaugcuggaaacuccacacuucaccacucugcaccacaaacacaaaagaaggcucaaacauaugccuaacaagaacagaccgaggaugguacugcgacaacgcaggaucaguaucauucuucccacaagcagaaacuugcaaaguacaaucuaacagaguuuucugugacaccaugaauagccuaacacuccccuccgaaguuaaccuauguaacauagauauauuuaaucccaaauaugauugcaaaaucaugacaucuaaaaccgacguaucaucaucuguaaucacaucacuaggugccauagucucaugcuacggcaaaacaaaaugcaccgccucaaacaaaaaccgagguauaauaaaaaccuucaguaauggaugugacuacguaucaaacaaagguguugauaccguaagcgucggcaacacccuauacugcguaaauaaacaagaaggccaaucacuauacgucaaaggcgaaccaauuauuaacuucuaugacccacucgucuuucccuccgacgaauuugacgcaagcauaucacaaguaaacgaaaaaauaaaccaaucacuagcauucauacgcaaaucagaugaacuacuacauaacguaaacguaggaaaauccacuacaaauauaaugaucacaacaauaauaaucguaauuauagucauauuauuacuacuaauagcaguaggacuuuuccuauacuguaaagcaagauaaggacuaguguccaccugucccuccugggcugcuggauugucucguuuuccugccaaauaaacaggaucagcgcuuuacagaucuaaaaaaaaaaaaaaaaaaaaaaaaaaaaaaaaaaaaaaaaaaaaaaaaaaaaaaaaaaaaaaaaugcaucccccccccccccccccccccccccccccccaaaggcucuuuucagagccaccagaauu

SEQ ID NO: 15255 - RNA, 1847 nt, Artificial Sequence
  mRNA product Design e-5 comprising derived and/or modified sequence from HRSV(Memphis-37)__AIY60640.1__F-del_DSCav1_mut2 (opt11)
gggagagcggcucggccauuuugucccagucaguccggaggcugcggcugcagaaguaccgccugcggaguaacugcaaagaagcuuaccauggaacuucccauccucaagaccaacgcuauuacgaccauccucgccgcagucacccucugcuucgcgucaucccaaaacaucaccgaagaauuuuaccaauccacaugcuccgcagucucaaaaggcuaccuaggagcccuacgcaccggaugguacacauccgucaucacaaucgaacucuccaacauaaaagaaaacaaaugcaacggcaccgaugccaaaguaaaacugauuaaacaagaacucgacaaauacaagaacgccgucacagaccuacagcuccucaugcaaucaacucccgccgccggcagcggauccgcuaucugcucaggcaucgccguaugcaaaguccuccaccuagaaggcgaaguaaacaaaaucaagaacgcacuacucucaacaaacaaagccgucgucucccucuccaacggcgucuccguccuuaccuucaaaguccucgaccuuaagaacuacauugacaaacaacuccuacccauccucaacaaacaauccugcucuauaccuaauauagaaaccguaaucgaauuucaacagaaaaacaaccgccuccucgaaauuacccgcgaguucucaguaaacgccggcguaaccacccccgucuccaccuacaugcucacaaauucagaacuccucagccucaucaacgacaugcccauaaccaacgaccaaaagaaacucaugucaaacaacguccaaaucgucaggcaacaaagcuacagcaucaugugcaucauuaaagaagaaguacucgccuacgucgugcaacuaccccucuacggcgucauagacacacccugcuggaaacuucacacaucaccgcucugcaccacaaacaccaaagaaggcaguaacauaugccucacccgaaccgaccgcggaugguacugcgacaacgccggauccgucagcuucuucccacaagccgaaaccugcaaaguacaauccaaccgagucuucugcgacaccaugaacucucuuacgcuccccucagaagucaaccuaugcaacaucgacaucuucaaccccaaauacgacugcaaaaucaugaccuccaaaacagacgucuccuccucagugauaaccucccucggcgccauugucuccugcuacggcaaaaccaaaugcaccgccuccaacaaaaaccgugggaucaucaaaaccuucucaaacggcugcgacuacguauccaauaagggugucgacacagucuccguaggcaauacccucuauugcgucaacaaacaagaaggccaaucccucuacgucaaaggcgaaccuaucaucaacuucuacgacccgcuagucuuccccucagacgaguucgacgcauccaucucacaagucaacgaaaagaucaaccagucccucgcauucauccgaaaauccgacgaacuucuccacaacguuaacgucggcaaauccaccacuaacauaaugaucaccacgaucaucauaguaauuaucgucauacuccuccuccuaaucgcugucggacucuuccucuacugcaaggcccgcuaaggacuaguguccaccugucccuccugggcugcuggauugucucguuuuccugccaaauaaacaggaucagcgcuuuacagaucuaaaaaaaaaaaaaaaaaaaaaaaaaaaaaaaaaaaaaaaaaaaaaaaaaaaaaaaaaaaaaaaaugcaucccccccccccccccccccccccccccccccaaaggcucuuuucagagccaccagaauu

SEQ ID NO: 15256 - RNA, 1914 nt, Artificial Sequence
  mRNA product Design e-6 comprising derived and/or modified sequence from HRSV(Memphis-37)__AIY60640.1__F-del_DSCav1_mut2 (opt1)
gggagagcggcucggccauuuugucccagucaguccggaggcugcggcugcagaaguaccgccugcggaguaacugcaaagaagcuuaccauggagcugcccauccucaagaccaacgccaucaccacgauccuggccgcggugacccugugcuucgccagcucccagaacaucaccgaggaguucuaccagagcacgugcuccgccgucagcaagggcuaccucggcgcccugcgcaccgggugguacaccagcgugaucaccaucgagcuguccaacaucaaggagaacaagugcaacggcaccgacgccaaggugaagcucaucaagcaggagcuggacaaguacaagaacgcggucacggaccugcagcuccugaugcagagcaccccggccgccggcuccgggagcgcgaucugcuccggcaucgccgucugcaaggugcugcaccucgagggcgaggugaacaagaucaagaacgcccugcuguccaccaacaaggccgucgugagccucuccaacggggugagcguccugaccuucaaggugcuggaccucaagaacuacaucgacaagcagcugcugcccauccugaacaagcagagcugcuccauccccaacaucgagaccgucaucgaguuccagcagaagaacaaccgccuccuggagaucacgcgggaguucagcgugaacgcgggcgugaccacccccgucuccaccuacaugcugacgaacagcgagcuccugucccugaucaacgacaugccgaucaccaacgaccagaagaagcucaugagcaacaacgugcagaucgugcgccagcaguccuacagcaucaugugcaucaucaaggaggagguccuggccuacguggugcagcugccccucuacggggucaucgacacccccugcuggaagcugcacaccagcccccugugcacgaccaacaccaaggagggcuccaacaucugccucacccggacggaccgcgggugguacugcgacaacgccggcagcguguccuucuucccgcaggccgagaccugcaagguccagagcaaccggguguucugcgacaccaugaacucccugacccugcccagcgaggugaaccucugcaacaucgacaucuucaaccccaaguacgacugcaagaucaugacguccaagaccgacgucagcuccagcgugaucaccucccugggcgccaucgugagcugcuacgggaagaccaagugcacggcgagcaacaagaaccgcggcaucaucaagaccuucuccaacgggugcgacuacgucagcaacaagggcguggacaccguguccgucggcaacacccuguacugcgugaacaagcaggagggccagagccucuacgugaagggggagcccaucaucaacuucuacgacccgcuggucuuccccuccgacgaguucgacgccagcaucucccaggugaacgagaagaucaaccagagccuggccuucauccggaaguccgacgagcuccugcacaacgugaacgucggcaagagcaccacgaacaucaugaucaccaccaucaucaucgugaucaucgugauccugcugcuccugaucgccgucgggcuguuccucuacugcaaggcccgcugaggacuaguacuggcugcaucucccuuuccucuguccuccauccuucucccaggauggugaagggggaccugguacccagugauccccaccccaggauccuaaaucaugacuuaccugcuaauaaaaacucauuggaaaagugagaagaucuaaaaaaaaaaaaaaaaaaaaaaaaaaaaaaaaaaaaaaaaaaaaaaaaaaaaaaaaaaaaaaaaugcaucccccccccccccccccccccccccccccccaaaggcucuuuucagagccaccagaauu

SEQ ID NO: 15257 - RNA, 1914 nt, Artificial Sequence
  mRNA product Design e-6 comprising derived and/or modified sequence from HRSV(Memphis-37)__AIY60640.1__F-del_DSCav1_mut2 (opt1)
gggagagcggcucggccauuuugucccagucaguccggaggcugcggcugcagaaguaccgccugcggaguaacugcaaagaagcuuaccauggagcugcccauccucaagaccaacgccaucaccacgauccuggccgcggugacccugugcuucgccagcucccagaacaucaccgaggaguucuaccagagcacgugcuccgccgucagcaagggcuaccucggggcccugcgcaccggcugguacaccuccgugaucaccaucgagcugagcaacaucaaggagaacaagugcaacgggaccgacgccaaggugaagcucaucaagcaggagcuggacaaguacaagaacgcggucacggaccugcagcuccugaugcaguccaccccggccgccggcagcggguccgccaucugcagcggcaucgcggugugcaaggugcugcaccucgagggcgaggucaacaagaucaagaacgcccugcuguccaccaacaaggccguggugagccucuccaacggggucagcgugcugaccuucaaggugcuggaccucaagaacuacaucgacaagcagcugcugcccauccucaacaagcaguccugcagcauccccaacaucgagacggucaucgaguuccagcagaagaacaaccggcugcuggagaucacccgcgaguucuccgugaacgccggcgugaccacccccgucagcacguacaugcucaccaacuccgagcugcugagccucaucaacgacaugccgaucaccaacgaccagaagaagcugaugagcaacaacgugcagaucgugcggcagcaguccuacagcaucaugugcaucaucaaggaggagguccuggccuacguggugcagcucccccuguacggggucaucgacacccccugcuggaagcugcacacgagcccccucugcaccaccaacaccaaggagggcuccaacaucugccugacgcgcaccgaccgggggugguacugcgacaacgcgggcuccgugagcuucuucccgcaggccgagaccugcaaggugcaguccaaccgcgucuucugcgacaccaugaacagccugacgcuccccuccgaggugaaccugugcaacaucgacaucuucaaccccaaguacgacugcaagaucaugaccagcaagaccgacgucuccagcuccgugaucaccagccugggcgccaucguguccugcuacgggaagacgaagugcaccgccagcaacaagaaccggggcaucaucaagaccuucuccaacgggugcgacuacgucagcaacaagggcguggacaccguguccgucggcaacacgcucuacugcgugaacaagcaggaggggcagagccuguacgugaagggcgagcccaucaucaacuucuacgacccgcuggucuuccccagcgacgaguucgacgccuccaucagccaggugaacgagaagaucaaccagucccucgcguucauccgcaagagcgacgagcugcugcacaacgugaacgucgggaaguccaccaccaacaucaugaucaccaccaucaucaucgugaucaucgugauccuccugcugcucaucgccgucggccuguuccuguacugcaaggcccggugaggacuaguacuggcugcaucucccuuuccucuguccuccauccuucucccaggauggugaagggggaccugguacccagugauccccaccccaggauccuaaaucaugacuuaccugcuaauaaaaacucauuggaaaagugagaagaucuaaaaaaaaaaaaaaaaaaaaaaaaaaaaaaaaaaaaaaaaaaaaaaaaaaaaaaaaaaaaaaaaugcaucccccccccccccccccccccccccccccccaaaggcucuuuucagagccaccagaauu

SEQ ID NO: 15258 - RNA, 1914 nt, Artificial Sequence
  mRNA product Design e-6 comprising derived and/or modified sequence from HRSV(Memphis-37)__AIY60640.1__F-del_DSCav1_mut2 (opt2)
gggagagcggcucggccauuuugucccagucaguccggaggcugcggcugcagaaguaccgccugcggaguaacugcaaagaagcuuaccauggagcuccccauccucaagaccaacgccaucaccaccauccucgccgccgucacccucugcuucgccuccucccagaacaucaccgaggaguucuaccaguccaccugcuccgccgucuccaagggcuaccucggcgcccuccgcaccggcugguacaccuccgucaucaccaucgagcucuccaacaucaaggagaacaagugcaacggcaccgacgccaaggucaagcucaucaagcaggagcucgacaaguacaagaacgccgucaccgaccuccagcuccucaugcaguccacccccgccgccggcuccggcuccgccaucugcuccggcaucgccgucugcaagguccuccaccucgagggcgaggucaacaagaucaagaacgcccuccucuccaccaacaaggccgucgucucccucuccaacggcgucuccguccucaccuucaagguccucgaccucaagaacuacaucgacaagcagcuccuccccauccucaacaagcaguccugcuccauccccaacaucgagaccgucaucgaguuccagcagaagaacaaccgccuccucgagaucacccgcgaguucuccgucaacgccggcgucaccacccccgucuccaccuacaugcucaccaacuccgagcuccucucccucaucaacgacaugcccaucaccaacgaccagaagaagcucauguccaacaacguccagaucguccgccagcaguccuacuccaucaugugcaucaucaaggaggagguccucgccuacgucguccagcucccccucuacggcgucaucgacacccccugcuggaagcuccacaccuccccccucugcaccaccaacaccaaggagggcuccaacaucugccucacccgcaccgaccgcggcugguacugcgacaacgccggcuccgucuccuucuucccccaggccgagaccugcaagguccaguccaaccgcgucuucugcgacaccaugaacucccucacccuccccuccgaggucaaccucugcaacaucgacaucuucaaccccaaguacgacugcaagaucaugaccuccaagaccgacgucuccuccuccgucaucaccucccucggcgccaucgucuccugcuacggcaagaccaagugcaccgccuccaacaagaaccgcggcaucaucaagaccuucuccaacggcugcgacuacgucuccaacaagggcgucgacaccgucuccgucggcaacacccucuacugcgucaacaagcaggagggccagucccucuacgucaagggcgagcccaucaucaacuucuacgacccccucgucuuccccuccgacgaguucgacgccuccaucucccaggucaacgagaagaucaaccagucccucgccuucauccgcaaguccgacgagcuccuccacaacgucaacgucggcaaguccaccaccaacaucaugaucaccaccaucaucaucgucaucaucgucauccuccuccuccucaucgccgucggccucuuccucuacugcaaggcccgcugaggacuaguacuggcugcaucucccuuuccucuguccuccauccuucucccaggauggugaagggggaccugguacccagugauccccaccccaggauccuaaaucaugacuuaccugcuaauaaaaacucauuggaaaagugagaagaucuaaaaaaaaaaaaaaaaaaaaaaaaaaaaaaaaaaaaaaaaaaaaaaaaaaaaaaaaaaaaaaaaugcaucccccccccccccccccccccccccccccccaaaggcucuuuucagagccaccagaauu

SEQ ID NO: 15259 - RNA, 1914 nt, Artificial Sequence
  mRNA product Design e-6 comprising derived and/or modified sequence from HRSV(Memphis-37)__AIY60640.1__F-del_DSCav1_mut2 (opt3)
gggagagcggcucggccauuuugucccagucaguccggaggcugcggcugcagaaguaccgccugcggaguaacugcaaagaagcuuaccauggagcugcccauccucaagaccaacgccauuacaacuauacuugcugcagugacgcugugcuucgccagcucccagaauaucaccgaagaguuuuaccaaucuacauguucagcggucaguaaaggcuauuugggggcuuuaagaacuggaugguacaccagcguuauuacaaucgaacuguccaacauuaaggagaauaaaugcaacgguaccgacgccaaggugaaacuaaucaagcaggaacucgauaaguauaaaaaugcaguaacugaccugcagcuucugaugcagucuacuccugccgcuggcucggggucagcaauauguagcggaaucgccgugugcaaggucuugcaccucgagggcgaggugaacaaaauuaagaaugcucugcugaguaccaacaaagccguugugucccucucuaauggugucagcguguuaacguucaagguacuggaucuuaagaacuacaucgacaaacaauugcugccaauucuaaauaagcaguccuguucaaucccgaacauagaaacuguuauugaguuucagcagaaaaauaacaggcuccuggaaaucacccgggaguucagugugaaugcgggggucacaacucccgugagcaccuauaugcuuacaaacucugagcuguugucccucauuaacgauaugccuaucaccaaugaccaaaagaaacugaugucaaacaaugugcagaucguccgccagcagagcuacaguauuaugugcauaaucaaggaagagguuuuagcauaugugguacaacugccacucuacggagugauugauacgcccuguuggaaacuucauacuucuccucugugcacaaccaacacuaaggaaggcuccaauaucuguuugacacgaaccgaccguggcugguacugcgauaacgccgggagcgucucguuuuucccacaggcugagacguguaaggugcagucuaauagaguuuucugcgacaccaugaacucccuaacacugcccucagaagugaaucucugcaacauagauauuuucaauccuaaauaugacuguaagaucaugacaaguaaaaccgaugucagcuccucugugaucacaagccugggagccauuguaucaugcuacgguaagacuaaauguaccgcaaguaacaagaauaggggcaucauuaagacauuuuccaacgggugcgacuauguuagcaauaaaggaguggacaccgucucugugggcaacacucuuuacugugucaacaagcaagagggucagucacuguaugugaaaggggagccaauaaucaauuucuacgauccguugguuuuucccagugacgaauuugaugcuagcauuucccaggugaacgagaagaucaaucagucucucgccuuuauccggaaaucggacgaacuguuacacaacguaaaugucggaaagagcacgacaaacauuaugauaaccacuaucauuaucgugauuaucguuauacugcuacuccugaucgcggugggccuuuucuuguauugcaaggcccgcugaggacuaguacuggcugcaucucccuuuccucuguccuccauccuucucccaggauggugaagggggaccugguacccagugauccccaccccaggauccuaaaucaugacuuaccugcuaauaaaaacucauuggaaaagugagaagaucuaaaaaaaaaaaaaaaaaaaaaaaaaaaaaaaaaaaaaaaaaaaaaaaaaaaaaaaaaaaaaaaaugcaucccccccccccccccccccccccccccccccaaaggcucuuuucagagccaccagaauu

SEQ ID NO: 15260 - RNA, 1914 nt, Artificial Sequence
  mRNA product Design e-6 comprising derived and/or modified sequence from HRSV(Memphis-37)__AIY60640.1__F-del_DSCav1_mut2 (opt4)
gggagagcggcucggccauuuugucccagucaguccggaggcugcggcugcagaaguaccgccugcggaguaacugcaaagaagcuuaccauggagcugcccauccugaagaccaacgccaucaccaccauccuggccgccgugacccugugcuucgccagcagccagaacaucaccgaggaguucuaccagagcaccugcagcgccgugagcaagggcuaccugggcgcccugagaaccggcugguacaccagcgugaucaccaucgagcugagcaacaucaaggagaacaagugcaacggcaccgacgccaaggugaagcugaucaagcaggagcuggacaaguacaagaacgccgugaccgaccugcagcugcugaugcagagcacccccgccgccggcagcggcagcgccaucugcagcggcaucgccgugugcaaggugcugcaccuggagggcgaggugaacaagaucaagaacgcccugcugagcaccaacaaggccguggugagccugagcaacggcgugagcgugcugaccuucaaggugcuggaccugaagaacuacaucgacaagcagcugcugcccauccugaacaagcagagcugcagcauccccaacaucgagaccgugaucgaguuccagcagaagaacaacagacugcuggagaucaccagagaguucagcgugaacgccggcgugaccacccccgugagcaccuacaugcugaccaacagcgagcugcugagccugaucaacgacaugcccaucaccaacgaccagaagaagcugaugagcaacaacgugcagaucgugagacagcagagcuacagcaucaugugcaucaucaaggaggaggugcuggccuacguggugcagcugccccuguacggcgugaucgacacccccugcuggaagcugcacaccagcccccugugcaccaccaacaccaaggagggcagcaacaucugccugaccagaaccgacagaggcugguacugcgacaacgccggcagcgugagcuucuucccccaggccgagaccugcaaggugcagagcaacagaguguucugcgacaccaugaacagccugacccugcccagcgaggugaaccugugcaacaucgacaucuucaaccccaaguacgacugcaagaucaugaccagcaagaccgacgugagcagcagcgugaucaccagccugggcgccaucgugagcugcuacggcaagaccaagugcaccgccagcaacaagaacagaggcaucaucaagaccuucagcaacggcugcgacuacgugagcaacaagggcguggacaccgugagcgugggcaacacccuguacugcgugaacaagcaggagggccagagccuguacgugaagggcgagcccaucaucaacuucuacgacccccugguguuccccagcgacgaguucgacgccagcaucagccaggugaacgagaagaucaaccagagccuggccuucaucagaaagagcgacgagcugcugcacaacgugaacgugggcaagagcaccaccaacaucaugaucaccaccaucaucaucgugaucaucgugauccugcugcugcugaucgccgugggccuguuccuguacugcaaggccagaugaggacuaguacuggcugcaucucccuuuccucuguccuccauccuucucccaggauggugaagggggaccugguacccagugauccccaccccaggauccuaaaucaugacuuaccugcuaauaaaaacucauuggaaaagugagaagaucuaaaaaaaaaaaaaaaaaaaaaaaaaaaaaaaaaaaaaaaaaaaaaaaaaaaaaaaaaaaaaaaaugcaucccccccccccccccccccccccccccccccaaaggcucuuuucagagccaccagaauu

SEQ ID NO: 15261 - RNA, 1914 nt, Artificial Sequence
  mRNA product Design e-6 comprising derived and/or modified sequence from HRSV(Memphis-37)__AIY60640.1__F-del_DSCav1_mut2 (opt5)
gggagagcggcucggccauuuugucccagucaguccggaggcugcggcugcagaaguaccgccugcggaguaacugcaaagaagcuuaccauggagcugcccauccucaagaccaacgccauuacaacgauccuggcugccgugacccuuugcuucgcgagcucccagaauauuacagaagaguuuuaccaaucuaccuguagcgcugucuccaaaggcuaucugggggcccucagaacaggaugguacaccucuguuaucacaauugaacugagcaacaucaaggagaauaaaugcaacggcaccgacgccaaggugaaacuuaucaagcaggaacuggauaaguauaaaaaugcugugacggaccuccagcugcugaugcaguccaccccugccgcugggucuggaagcgccauuuguuccggcaucgcggucugcaaggugcuccaccuggagggggagguuaacaaaauuaagaaugcccuucugagcacaaacaaagcuguggucucucucuccaauggagugagcguucugaccuucaaggugcuugaucugaagaacuacaucgacaaacaacuccugccgauucugaauaagcagucuuguuccauccccaacauugaaacagucaucgaguuucagcagaaaaauaaccggcuccuggaaaucacccgcgaguucagcgugaaugccggcgugacgacaccugucucuaccuauaugcuuacaaacuccgagcugcucagccugauuaacgauaugcccaucaccaaugaccaaaagaaacuuauguccaacaauguucagauugugagacagcagucuuacagcaucaugugcauuaucaaggaagaggugcuggcuuaugucgugcaacucccucuguacggcguuaucgauacccccuguuggaaacugcauacauccccucucugcacgaccaacacaaaggaagggagcaauauuugucugacccggacagaccgcggaugguacugcgauaacgccggcucuguguccuuuuucccgcaggcggagaccuguaagguccagagcaauagaguguuuugcgacacgaugaacucucuuacacugcccagcgaaguuaaucucugcaacaucgauauuuucaauccuaaauaugacuguaagaucaugaccuccaaaaccgaugugucuagcuccgucauuacaagccugggggccaucgugucuugcuacggaaagaccaaauguacagcuuccaacaagaaucggggcaucauuaagacguuuagcaacgggugcgacuaugucucuaauaaaggaguggacaccguuuccgugggcaacacacuuuacugugucaacaagcaagagggccagagccuguaugugaaaggggagcccaucauuaauuucuacgauccucucguuuuucccuccgacgaguucgaugccucuaucagccaggugaacgaaaagauuaaucagucccuggcuuuuauccgcaaaucugacgaacugcuccacaacgucaaugugggaaagagcaccacaaacauuaugaucaccacgaucauuaucgugauuaucguuauucugcuucugcucaucgccgucggccuguuccuguauugcaaggccagaugaggacuaguacuggcugcaucucccuuuccucuguccuccauccuucucccaggauggugaagggggaccugguacccagugauccccaccccaggauccuaaaucaugacuuaccugcuaauaaaaacucauuggaaaagugagaagaucuaaaaaaaaaaaaaaaaaaaaaaaaaaaaaaaaaaaaaaaaaaaaaaaaaaaaaaaaaaaaaaaaugcaucccccccccccccccccccccccccccccccaaaggcucuuuucagagccaccagaauu

SEQ ID NO: 15262 - RNA, 1914 nt, Artificial Sequence
  mRNA product Design e-6 comprising derived and/or modified sequence from HRSV(Memphis-37)__AIY60640.1__F-del_DSCav1_mut2 (opt6)
gggagagcggcucggccauuuugucccagucaguccggaggcugcggcugcagaaguaccgccugcggaguaacugcaaagaagcuuaccauggaacuaccaauacucaaaacaaacgcaauaacaacaauuuuagcugcaguaacacuuuguuucgcauccucccaaaauauaacagaagaauuuuaucaaucaaccugcucagccgucuccaaaggauaucuaggugcacuacgcacuggaugguacacaagugucaucacaauagaacuuuccaacaucaaagaaaauaaauguaauggaacugacgcaaaaguaaaacucauaaaacaagaacuagacaaauacaaaaacgcaguaacagaccuacaacuauuaaugcaaucaacaccagcagcaggauccggcagugccauaugcucuggaauagcagucugcaaaguuuuacacuuagaaggcgaaguaaacaaaaucaaaaacgcccuacuaucuacaaauaaagccgucguaucucucucaaauggaguaucaguacuaacauucaaaguauuagacuuaaaaaacuacaucgauaaacaauuauugccaauauuaaacaaacaaucuugcucaauaccaaauauagaaacagucauagaauuucaacaaaaaaauaaccgauuauuagaaauaacacgagaauuuucaguaaaugccggagucaccacaccaguaucaacauacaugcuaacaaauucagaacuauuaucauuaauaaacgacaugccuauuacaaaugaucaaaaaaaacuaauguccaacaauguacaaauaguccgacaacaaagcuacucaaucauguguauaauaaaagaagaaguacuugcauacguaguacaauuaccacuauacggaguuaucgacacaccaugcuggaaacuccacacuucaccacucugcaccacaaacacaaaagaaggcucaaacauaugccuaacaagaacagaccgaggaugguacugcgacaacgcaggaucaguaucauucuucccacaagcagaaacuugcaaaguacaaucuaacagaguuuucugugacaccaugaauagccuaacacuccccuccgaaguuaaccuauguaacauagauauauuuaaucccaaauaugauugcaaaaucaugacaucuaaaaccgacguaucaucaucuguaaucacaucacuaggugccauagucucaugcuacggcaaaacaaaaugcaccgccucaaacaaaaaccgagguauaauaaaaaccuucaguaauggaugugacuacguaucaaacaaagguguugauaccguaagcgucggcaacacccuauacugcguaaauaaacaagaaggccaaucacuauacgucaaaggcgaaccaauuauuaacuucuaugacccacucgucuuucccuccgacgaauuugacgcaagcauaucacaaguaaacgaaaaaauaaaccaaucacuagcauucauacgcaaaucagaugaacuacuacauaacguaaacguaggaaaauccacuacaaauauaaugaucacaacaauaauaaucguaauuauagucauauuauuacuacuaauagcaguaggacuuuuccuauacuguaaagcaagauaaggacuaguacuggcugcaucucccuuuccucuguccuccauccuucucccaggauggugaagggggaccugguacccagugauccccaccccaggauccuaaaucaugacuuaccugcuaauaaaaacucauuggaaaagugagaagaucuaaaaaaaaaaaaaaaaaaaaaaaaaaaaaaaaaaaaaaaaaaaaaaaaaaaaaaaaaaaaaaaaugcaucccccccccccccccccccccccccccccccaaaggcucuuuucagagccaccagaauu

SEQ ID NO: 15263 - RNA, 1914 nt, Artificial Sequence
  mRNA product Design e-6 comprising derived and/or modified sequence from HRSV(Memphis-37)__AIY60640.1__F-del_DSCav1_mut2 (opt11)
gggagagcggcucggccauuuugucccagucaguccggaggcugcggcugcagaaguaccgccugcggaguaacugcaaagaagcuuaccauggaacuucccauccucaagaccaacgcuauuacgaccauccucgccgcagucacccucugcuucgcgucaucccaaaacaucaccgaagaauuuuaccaauccacaugcuccgcagucucaaaaggcuaccuaggagcccuacgcaccggaugguacacauccgucaucacaaucgaacucuccaacauaaaagaaaacaaaugcaacggcaccgaugccaaaguaaaacugauuaaacaagaacucgacaaauacaagaacgccgucacagaccuacagcuccucaugcaaucaacucccgccgccggcagcggauccgcuaucugcucaggcaucgccguaugcaaaguccuccaccuagaaggcgaaguaaacaaaaucaagaacgcacuacucucaacaaacaaagccgucgucucccucuccaacggcgucuccguccuuaccuucaaaguccucgaccuuaagaacuacauugacaaacaacuccuacccauccucaacaaacaauccugcucuauaccuaauauagaaaccguaaucgaauuucaacagaaaaacaaccgccuccucgaaauuacccgcgaguucucaguaaacgccggcguaaccacccccgucuccaccuacaugcucacaaauucagaacuccucagccucaucaacgacaugcccauaaccaacgaccaaaagaaacucaugucaaacaacguccaaaucgucaggcaacaaagcuacagcaucaugugcaucauuaaagaagaaguacucgccuacgucgugcaacuaccccucuacggcgucauagacacacccugcuggaaacuucacacaucaccgcucugcaccacaaacaccaaagaaggcaguaacauaugccucacccgaaccgaccgcggaugguacugcgacaacgccggauccgucagcuucuucccacaagccgaaaccugcaaaguacaauccaaccgagucuucugcgacaccaugaacucucuuacgcuccccucagaagucaaccuaugcaacaucgacaucuucaaccccaaauacgacugcaaaaucaugaccuccaaaacagacgucuccuccucagugauaaccucccucggcgccauugucuccugcuacggcaaaaccaaaugcaccgccuccaacaaaaaccgugggaucaucaaaaccuucucaaacggcugcgacuacguauccaauaagggugucgacacagucuccguaggcaauacccucuauugcgucaacaaacaagaaggccaaucccucuacgucaaaggcgaaccuaucaucaacuucuacgacccgcuagucuuccccucagacgaguucgacgcauccaucucacaagucaacgaaaagaucaaccagucccucgcauucauccgaaaauccgacgaacuucuccacaacguuaacgucggcaaauccaccacuaacauaaugaucaccacgaucaucauaguaauuaucgucauacuccuccuccuaaucgcugucggacucuuccucuacugcaaggcccgcuaaggacuaguacuggcugcaucucccuuuccucuguccuccauccuucucccaggauggugaagggggaccugguacccagugauccccaccccaggauccuaaaucaugacuuaccugcuaauaaaaacucauuggaaaagugagaagaucuaaaaaaaaaaaaaaaaaaaaaaaaaaaaaaaaaaaaaaaaaaaaaaaaaaaaaaaaaaaaaaaaugcaucccccccccccccccccccccccccccccccaaaggcucuuuucagagccaccagaauu

SEQ ID NO: 15264 - RNA, 2130 nt, Artificial Sequence
  mRNA product Design f-1 comprising derived and/or modified sequence from HRSV(Memphis-37)__AIY60640.1__F-del_DSCav1_mut2 (opt1)
gggagagcggcucggccauuuugucccagucaguccggaggcugcggcugcagaaguaccgccugcggaguaacugcaaagaagcuuaccauggagcugcccauccucaagaccaacgccaucaccacgauccuggccgcggugacccugugcuucgccagcucccagaacaucaccgaggaguucuaccagagcacgugcuccgccgucagcaagggcuaccucggcgcccugcgcaccgggugguacaccagcgugaucaccaucgagcuguccaacaucaaggagaacaagugcaacggcaccgacgccaaggugaagcucaucaagcaggagcuggacaaguacaagaacgcggucacggaccugcagcuccugaugcagagcaccccggccgccggcuccgggagcgcgaucugcuccggcaucgccgucugcaaggugcugcaccucgagggcgaggugaacaagaucaagaacgcccugcuguccaccaacaaggccgucgugagccucuccaacggggugagcguccugaccuucaaggugcuggaccucaagaacuacaucgacaagcagcugcugcccauccugaacaagcagagcugcuccauccccaacaucgagaccgucaucgaguuccagcagaagaacaaccgccuccuggagaucacgcgggaguucagcgugaacgcgggcgugaccacccccgucuccaccuacaugcugacgaacagcgagcuccugucccugaucaacgacaugccgaucaccaacgaccagaagaagcucaugagcaacaacgugcagaucgugcgccagcaguccuacagcaucaugugcaucaucaaggaggagguccuggccuacguggugcagcugccccucuacggggucaucgacacccccugcuggaagcugcacaccagcccccugugcacgaccaacaccaaggagggcuccaacaucugccucacccggacggaccgcgggugguacugcgacaacgccggcagcguguccuucuucccgcaggccgagaccugcaagguccagagcaaccggguguucugcgacaccaugaacucccugacccugcccagcgaggugaaccucugcaacaucgacaucuucaaccccaaguacgacugcaagaucaugacguccaagaccgacgucagcuccagcgugaucaccucccugggcgccaucgugagcugcuacgggaagaccaagugcacggcgagcaacaagaaccgcggcaucaucaagaccuucuccaacgggugcgacuacgucagcaacaagggcguggacaccguguccgucggcaacacccuguacugcgugaacaagcaggagggccagagccucuacgugaagggggagcccaucaucaacuucuacgacccgcuggucuuccccuccgacgaguucgacgccagcaucucccaggugaacgagaagaucaaccagagccuggccuucauccggaaguccgacgagcuccugcacaacgugaacgucggcaagagcaccacgaacaucaugaucaccaccaucaucaucgugaucaucgugauccugcugcuccugaucgccgucgggcuguuccucuacugcaaggcccgcugaggacuagugaagggaacacccaaauuuaauucagccuuaagcacaauuaauuaagagugaaacguaauuguacaagcaguuggucacccaccauagggcaugaucaacaccgcaaccuuuccuuuuucccccagugauucugaaaaaccccucuucccuucagcuugcuuagauguuccaaauuuaguaagcuuaaggcggccuacagaagaaaaagaaaaaaaaggccacaaaaguucccucucacuuucaguaaauaaaauaaaagcagcaacagaaauaaagaaauaaaugaaauucaaaaugaaauaaauauuguguugugcagcauuaaaaaaucaauaaaaauuaaaaaugagcaagaucuaaaaaaaaaaaaaaaaaaaaaaaaaaaaaaaaaaaaaaaaaaaaaaaaaaaaaaaaaaaaaaaaugcaucccccccccccccccccccccccccccccccaaaggcucuuuucagagccaccagaauu

SEQ ID NO: 15265 - RNA, 2130 nt, Artificial Sequence
  mRNA product Design f-1 comprising derived and/or modified sequence from HRSV(Memphis-37)__AIY60640.1__F-del_DSCav1_mut2 (opt1)
gggagagcggcucggccauuuugucccagucaguccggaggcugcggcugcagaaguaccgccugcggaguaacugcaaagaagcuuaccauggagcugcccauccucaagaccaacgccaucaccacgauccuggccgcggugacccugugcuucgccagcucccagaacaucaccgaggaguucuaccagagcacgugcuccgccgucagcaagggcuaccucggggcccugcgcaccggcugguacaccuccgugaucaccaucgagcugagcaacaucaaggagaacaagugcaacgggaccgacgccaaggugaagcucaucaagcaggagcuggacaaguacaagaacgcggucacggaccugcagcuccugaugcaguccaccccggccgccggcagcggguccgccaucugcagcggcaucgcggugugcaaggugcugcaccucgagggcgaggucaacaagaucaagaacgcccugcuguccaccaacaaggccguggugagccucuccaacggggucagcgugcugaccuucaaggugcuggaccucaagaacuacaucgacaagcagcugcugcccauccucaacaagcaguccugcagcauccccaacaucgagacggucaucgaguuccagcagaagaacaaccggcugcuggagaucacccgcgaguucuccgugaacgccggcgugaccacccccgucagcacguacaugcucaccaacuccgagcugcugagccucaucaacgacaugccgaucaccaacgaccagaagaagcugaugagcaacaacgugcagaucgugcggcagcaguccuacagcaucaugugcaucaucaaggaggagguccuggccuacguggugcagcucccccuguacggggucaucgacacccccugcuggaagcugcacacgagcccccucugcaccaccaacaccaaggagggcuccaacaucugccugacgcgcaccgaccgggggugguacugcgacaacgcgggcuccgugagcuucuucccgcaggccgagaccugcaaggugcaguccaaccgcgucuucugcgacaccaugaacagccugacgcuccccuccgaggugaaccugugcaacaucgacaucuucaaccccaaguacgacugcaagaucaugaccagcaagaccgacgucuccagcuccgugaucaccagccugggcgccaucguguccugcuacgggaagacgaagugcaccgccagcaacaagaaccggggcaucaucaagaccuucuccaacgggugcgacuacgucagcaacaagggcguggacaccguguccgucggcaacacgcucuacugcgugaacaagcaggaggggcagagccuguacgugaagggcgagcccaucaucaacuucuacgacccgcuggucuuccccagcgacgaguucgacgccuccaucagccaggugaacgagaagaucaaccagucccucgcguucauccgcaagagcgacgagcugcugcacaacgugaacgucgggaaguccaccaccaacaucaugaucaccaccaucaucaucgugaucaucgugauccuccugcugcucaucgccgucggccuguuccuguacugcaaggcccggugaggacuagugaagggaacacccaaauuuaauucagccuuaagcacaauuaauuaagagugaaacguaauuguacaagcaguuggucacccaccauagggcaugaucaacaccgcaaccuuuccuuuuucccccagugauucugaaaaaccccucuucccuucagcuugcuuagauguuccaaauuuaguaagcuuaaggcggccuacagaagaaaaagaaaaaaaaggccacaaaaguucccucucacuuucaguaaauaaaauaaaagcagcaacagaaauaaagaaauaaaugaaauucaaaaugaaauaaauauuguguugugcagcauuaaaaaaucaauaaaaauuaaaaaugagcaagaucuaaaaaaaaaaaaaaaaaaaaaaaaaaaaaaaaaaaaaaaaaaaaaaaaaaaaaaaaaaaaaaaaugcaucccccccccccccccccccccccccccccccaaaggcucuuuucagagccaccagaauu

SEQ ID NO: 15266 - RNA, 2130 nt, Artificial Sequence
  mRNA product Design f-1 comprising derived and/or modified sequence from HRSV(Memphis-37)__AIY60640.1__F-del_DSCav1_mut2 (opt2)
gggagagcggcucggccauuuugucccagucaguccggaggcugcggcugcagaaguaccgccugcggaguaacugcaaagaagcuuaccauggagcuccccauccucaagaccaacgccaucaccaccauccucgccgccgucacccucugcuucgccuccucccagaacaucaccgaggaguucuaccaguccaccugcuccgccgucuccaagggcuaccucggcgcccuccgcaccggcugguacaccuccgucaucaccaucgagcucuccaacaucaaggagaacaagugcaacggcaccgacgccaaggucaagcucaucaagcaggagcucgacaaguacaagaacgccgucaccgaccuccagcuccucaugcaguccacccccgccgccggcuccggcuccgccaucugcuccggcaucgccgucugcaagguccuccaccucgagggcgaggucaacaagaucaagaacgcccuccucuccaccaacaaggccgucgucucccucuccaacggcgucuccguccucaccuucaagguccucgaccucaagaacuacaucgacaagcagcuccuccccauccucaacaagcaguccugcuccauccccaacaucgagaccgucaucgaguuccagcagaagaacaaccgccuccucgagaucacccgcgaguucuccgucaacgccggcgucaccacccccgucuccaccuacaugcucaccaacuccgagcuccucucccucaucaacgacaugcccaucaccaacgaccagaagaagcucauguccaacaacguccagaucguccgccagcaguccuacuccaucaugugcaucaucaaggaggagguccucgccuacgucguccagcucccccucuacggcgucaucgacacccccugcuggaagcuccacaccuccccccucugcaccaccaacaccaaggagggcuccaacaucugccucacccgcaccgaccgcggcugguacugcgacaacgccggcuccgucuccuucuucccccaggccgagaccugcaagguccaguccaaccgcgucuucugcgacaccaugaacucccucacccuccccuccgaggucaaccucugcaacaucgacaucuucaaccccaaguacgacugcaagaucaugaccuccaagaccgacgucuccuccuccgucaucaccucccucggcgccaucgucuccugcuacggcaagaccaagugcaccgccuccaacaagaaccgcggcaucaucaagaccuucuccaacggcugcgacuacgucuccaacaagggcgucgacaccgucuccgucggcaacacccucuacugcgucaacaagcaggagggccagucccucuacgucaagggcgagcccaucaucaacuucuacgacccccucgucuuccccuccgacgaguucgacgccuccaucucccaggucaacgagaagaucaaccagucccucgccuucauccgcaaguccgacgagcuccuccacaacgucaacgucggcaaguccaccaccaacaucaugaucaccaccaucaucaucgucaucaucgucauccuccuccuccucaucgccgucggccucuuccucuacugcaaggcccgcugaggacuagugaagggaacacccaaauuuaauucagccuuaagcacaauuaauuaagagugaaacguaauuguacaagcaguuggucacccaccauagggcaugaucaacaccgcaaccuuuccuuuuucccccagugauucugaaaaaccccucuucccuucagcuugcuuagauguuccaaauuuaguaagcuuaaggcggccuacagaagaaaaagaaaaaaaaggccacaaaaguucccucucacuuucaguaaauaaaauaaaagcagcaacagaaauaaagaaauaaaugaaauucaaaaugaaauaaauauuguguugugcagcauuaaaaaaucaauaaaaauuaaaaaugagcaagaucuaaaaaaaaaaaaaaaaaaaaaaaaaaaaaaaaaaaaaaaaaaaaaaaaaaaaaaaaaaaaaaaaugcaucccccccccccccccccccccccccccccccaaaggcucuuuucagagccaccagaauu

SEQ ID NO: 15267 - RNA, 2130 nt, Artificial Sequence
  mRNA product Design f-1 comprising derived and/or modified sequence from HRSV(Memphis-37)__AIY60640.1__F-del_DSCav1_mut2 (opt3)
gggagagcggcucggccauuuugucccagucaguccggaggcugcggcugcagaaguaccgccugcggaguaacugcaaagaagcuuaccauggagcugcccauccucaagaccaacgccauuacaacuauacuugcugcagugacgcugugcuucgccagcucccagaauaucaccgaagaguuuuaccaaucuacauguucagcggucaguaaaggcuauuugggggcuuuaagaacuggaugguacaccagcguuauuacaaucgaacuguccaacauuaaggagaauaaaugcaacgguaccgacgccaaggugaaacuaaucaagcaggaacucgauaaguauaaaaaugcaguaacugaccugcagcuucugaugcagucuacuccugccgcuggcucggggucagcaauauguagcggaaucgccgugugcaaggucuugcaccucgagggcgaggugaacaaaauuaagaaugcucugcugaguaccaacaaagccguugugucccucucuaauggugucagcguguuaacguucaagguacuggaucuuaagaacuacaucgacaaacaauugcugccaauucuaaauaagcaguccuguucaaucccgaacauagaaacuguuauugaguuucagcagaaaaauaacaggcuccuggaaaucacccgggaguucagugugaaugcgggggucacaacucccgugagcaccuauaugcuuacaaacucugagcuguugucccucauuaacgauaugccuaucaccaaugaccaaaagaaacugaugucaaacaaugugcagaucguccgccagcagagcuacaguauuaugugcauaaucaaggaagagguuuuagcauaugugguacaacugccacucuacggagugauugauacgcccuguuggaaacuucauacuucuccucugugcacaaccaacacuaaggaaggcuccaauaucuguuugacacgaaccgaccguggcugguacugcgauaacgccgggagcgucucguuuuucccacaggcugagacguguaaggugcagucuaauagaguuuucugcgacaccaugaacucccuaacacugcccucagaagugaaucucugcaacauagauauuuucaauccuaaauaugacuguaagaucaugacaaguaaaaccgaugucagcuccucugugaucacaagccugggagccauuguaucaugcuacgguaagacuaaauguaccgcaaguaacaagaauaggggcaucauuaagacauuuuccaacgggugcgacuauguuagcaauaaaggaguggacaccgucucugugggcaacacucuuuacugugucaacaagcaagagggucagucacuguaugugaaaggggagccaauaaucaauuucuacgauccguugguuuuucccagugacgaauuugaugcuagcauuucccaggugaacgagaagaucaaucagucucucgccuuuauccggaaaucggacgaacuguuacacaacguaaaugucggaaagagcacgacaaacauuaugauaaccacuaucauuaucgugauuaucguuauacugcuacuccugaucgcggugggccuuuucuuguauugcaaggcccgcugaggacuagugaagggaacacccaaauuuaauucagccuuaagcacaauuaauuaagagugaaacguaauuguacaagcaguuggucacccaccauagggcaugaucaacaccgcaaccuuuccuuuuucccccagugauucugaaaaaccccucuucccuucagcuugcuuagauguuccaaauuuaguaagcuuaaggcggccuacagaagaaaaagaaaaaaaaggccacaaaaguucccucucacuuucaguaaauaaaauaaaagcagcaacagaaauaaagaaauaaaugaaauucaaaaugaaauaaauauuguguugugcagcauuaaaaaaucaauaaaaauuaaaaaugagcaagaucuaaaaaaaaaaaaaaaaaaaaaaaaaaaaaaaaaaaaaaaaaaaaaaaaaaaaaaaaaaaaaaaaugcaucccccccccccccccccccccccccccccccaaaggcucuuuucagagccaccagaauu

SEQ ID NO: 15268 - RNA, 2130 nt, Artificial Sequence
  mRNA product Design f-1 comprising derived and/or modified sequence from HRSV(Memphis-37)__AIY60640.1__F-del_DSCav1_mut2 (opt4)
gggagagcggcucggccauuuugucccagucaguccggaggcugcggcugcagaaguaccgccugcggaguaacugcaaagaagcuuaccauggagcugcccauccugaagaccaacgccaucaccaccauccuggccgccgugacccugugcuucgccagcagccagaacaucaccgaggaguucuaccagagcaccugcagcgccgugagcaagggcuaccugggcgcccugagaaccggcugguacaccagcgugaucaccaucgagcugagcaacaucaaggagaacaagugcaacggcaccgacgccaaggugaagcugaucaagcaggagcuggacaaguacaagaacgccgugaccgaccugcagcugcugaugcagagcacccccgccgccggcagcggcagcgccaucugcagcggcaucgccgugugcaaggugcugcaccuggagggcgaggugaacaagaucaagaacgcccugcugagcaccaacaaggccguggugagccugagcaacggcgugagcgugcugaccuucaaggugcuggaccugaagaacuacaucgacaagcagcugcugcccauccugaacaagcagagcugcagcauccccaacaucgagaccgugaucgaguuccagcagaagaacaacagacugcuggagaucaccagagaguucagcgugaacgccggcgugaccacccccgugagcaccuacaugcugaccaacagcgagcugcugagccugaucaacgacaugcccaucaccaacgaccagaagaagcugaugagcaacaacgugcagaucgugagacagcagagcuacagcaucaugugcaucaucaaggaggaggugcuggccuacguggugcagcugccccuguacggcgugaucgacacccccugcuggaagcugcacaccagcccccugugcaccaccaacaccaaggagggcagcaacaucugccugaccagaaccgacagaggcugguacugcgacaacgccggcagcgugagcuucuucccccaggccgagaccugcaaggugcagagcaacagaguguucugcgacaccaugaacagccugacccugcccagcgaggugaaccugugcaacaucgacaucuucaaccccaaguacgacugcaagaucaugaccagcaagaccgacgugagcagcagcgugaucaccagccugggcgccaucgugagcugcuacggcaagaccaagugcaccgccagcaacaagaacagaggcaucaucaagaccuucagcaacggcugcgacuacgugagcaacaagggcguggacaccgugagcgugggcaacacccuguacugcgugaacaagcaggagggccagagccuguacgugaagggcgagcccaucaucaacuucuacgacccccugguguuccccagcgacgaguucgacgccagcaucagccaggugaacgagaagaucaaccagagccuggccuucaucagaaagagcgacgagcugcugcacaacgugaacgugggcaagagcaccaccaacaucaugaucaccaccaucaucaucgugaucaucgugauccugcugcugcugaucgccgugggccuguuccuguacugcaaggccagaugaggacuagugaagggaacacccaaauuuaauucagccuuaagcacaauuaauuaagagugaaacguaauuguacaagcaguuggucacccaccauagggcaugaucaacaccgcaaccuuuccuuuuucccccagugauucugaaaaaccccucuucccuucagcuugcuuagauguuccaaauuuaguaagcuuaaggcggccuacagaagaaaaagaaaaaaaaggccacaaaaguucccucucacuuucaguaaauaaaauaaaagcagcaacagaaauaaagaaauaaaugaaauucaaaaugaaauaaauauuguguugugcagcauuaaaaaaucaauaaaaauuaaaaaugagcaagaucuaaaaaaaaaaaaaaaaaaaaaaaaaaaaaaaaaaaaaaaaaaaaaaaaaaaaaaaaaaaaaaaaugcaucccccccccccccccccccccccccccccccaaaggcucuuuucagagccaccagaauu

SEQ ID NO: 15269 - RNA, 2130 nt, Artificial Sequence
  mRNA product Design f-1 comprising derived and/or modified sequence from HRSV(Memphis-37)__AIY60640.1__F-del_DSCav1_mut2 (opt5)
gggagagcggcucggccauuuugucccagucaguccggaggcugcggcugcagaaguaccgccugcggaguaacugcaaagaagcuuaccauggagcugcccauccucaagaccaacgccauuacaacgauccuggcugccgugacccuuugcuucgcgagcucccagaauauuacagaagaguuuuaccaaucuaccuguagcgcugucuccaaaggcuaucugggggcccucagaacaggaugguacaccucuguuaucacaauugaacugagcaacaucaaggagaauaaaugcaacggcaccgacgccaaggugaaacuuaucaagcaggaacuggauaaguauaaaaaugcugugacggaccuccagcugcugaugcaguccaccccugccgcugggucuggaagcgccauuuguuccggcaucgcggucugcaaggugcuccaccuggagggggagguuaacaaaauuaagaaugcccuucugagcacaaacaaagcuguggucucucucuccaauggagugagcguucugaccuucaaggugcuugaucugaagaacuacaucgacaaacaacuccugccgauucugaauaagcagucuuguuccauccccaacauugaaacagucaucgaguuucagcagaaaaauaaccggcuccuggaaaucacccgcgaguucagcgugaaugccggcgugacgacaccugucucuaccuauaugcuuacaaacuccgagcugcucagccugauuaacgauaugcccaucaccaaugaccaaaagaaacuuauguccaacaauguucagauugugagacagcagucuuacagcaucaugugcauuaucaaggaagaggugcuggcuuaugucgugcaacucccucuguacggcguuaucgauacccccuguuggaaacugcauacauccccucucugcacgaccaacacaaaggaagggagcaauauuugucugacccggacagaccgcggaugguacugcgauaacgccggcucuguguccuuuuucccgcaggcggagaccuguaagguccagagcaauagaguguuuugcgacacgaugaacucucuuacacugcccagcgaaguuaaucucugcaacaucgauauuuucaauccuaaauaugacuguaagaucaugaccuccaaaaccgaugugucuagcuccgucauuacaagccugggggccaucgugucuugcuacggaaagaccaaauguacagcuuccaacaagaaucggggcaucauuaagacguuuagcaacgggugcgacuaugucucuaauaaaggaguggacaccguuuccgugggcaacacacuuuacugugucaacaagcaagagggccagagccuguaugugaaaggggagcccaucauuaauuucuacgauccucucguuuuucccuccgacgaguucgaugccucuaucagccaggugaacgaaaagauuaaucagucccuggcuuuuauccgcaaaucugacgaacugcuccacaacgucaaugugggaaagagcaccacaaacauuaugaucaccacgaucauuaucgugauuaucguuauucugcuucugcucaucgccgucggccuguuccuguauugcaaggccagaugaggacuagugaagggaacacccaaauuuaauucagccuuaagcacaauuaauuaagagugaaacguaauuguacaagcaguuggucacccaccauagggcaugaucaacaccgcaaccuuuccuuuuucccccagugauucugaaaaaccccucuucccuucagcuugcuuagauguuccaaauuuaguaagcuuaaggcggccuacagaagaaaaagaaaaaaaaggccacaaaaguucccucucacuuucaguaaauaaaauaaaagcagcaacagaaauaaagaaauaaaugaaauucaaaaugaaauaaauauuguguugugcagcauuaaaaaaucaauaaaaauuaaaaaugagcaagaucuaaaaaaaaaaaaaaaaaaaaaaaaaaaaaaaaaaaaaaaaaaaaaaaaaaaaaaaaaaaaaaaaugcaucccccccccccccccccccccccccccccccaaaggcucuuuucagagccaccagaauu

SEQ ID NO: 15270 - RNA, 2130 nt, Artificial Sequence
  mRNA product Design f-1 comprising derived and/or modified sequence from HRSV(Memphis-37)__AIY60640.1__F-del_DSCav1_mut2 (opt6)
gggagagcggcucggccauuuugucccagucaguccggaggcugcggcugcagaaguaccgccugcggaguaacugcaaagaagcuuaccauggaacuaccaauacucaaaacaaacgcaauaacaacaauuuuagcugcaguaacacuuuguuucgcauccucccaaaauauaacagaagaauuuuaucaaucaaccugcucagccgucuccaaaggauaucuaggugcacuacgcacuggaugguacacaagugucaucacaauagaacuuuccaacaucaaagaaaauaaauguaauggaacugacgcaaaaguaaaacucauaaaacaagaacuagacaaauacaaaaacgcaguaacagaccuacaacuauuaaugcaaucaacaccagcagcaggauccggcagugccauaugcucuggaauagcagucugcaaaguuuuacacuuagaaggcgaaguaaacaaaaucaaaaacgcccuacuaucuacaaauaaagccgucguaucucucucaaauggaguaucaguacuaacauucaaaguauuagacuuaaaaaacuacaucgauaaacaauuauugccaauauuaaacaaacaaucuugcucaauaccaaauauagaaacagucauagaauuucaacaaaaaaauaaccgauuauuagaaauaacacgagaauuuucaguaaaugccggagucaccacaccaguaucaacauacaugcuaacaaauucagaacuauuaucauuaauaaacgacaugccuauuacaaaugaucaaaaaaaacuaauguccaacaauguacaaauaguccgacaacaaagcuacucaaucauguguauaauaaaagaagaaguacuugcauacguaguacaauuaccacuauacggaguuaucgacacaccaugcuggaaacuccacacuucaccacucugcaccacaaacacaaaagaaggcucaaacauaugccuaacaagaacagaccgaggaugguacugcgacaacgcaggaucaguaucauucuucccacaagcagaaacuugcaaaguacaaucuaacagaguuuucugugacaccaugaauagccuaacacuccccuccgaaguuaaccuauguaacauagauauauuuaaucccaaauaugauugcaaaaucaugacaucuaaaaccgacguaucaucaucuguaaucacaucacuaggugccauagucucaugcuacggcaaaacaaaaugcaccgccucaaacaaaaaccgagguauaauaaaaaccuucaguaauggaugugacuacguaucaaacaaagguguugauaccguaagcgucggcaacacccuauacugcguaaauaaacaagaaggccaaucacuauacgucaaaggcgaaccaauuauuaacuucuaugacccacucgucuuucccuccgacgaauuugacgcaagcauaucacaaguaaacgaaaaaauaaaccaaucacuagcauucauacgcaaaucagaugaacuacuacauaacguaaacguaggaaaauccacuacaaauauaaugaucacaacaauaauaaucguaauuauagucauauuauuacuacuaauagcaguaggacuuuuccuauacuguaaagcaagauaaggacuagugaagggaacacccaaauuuaauucagccuuaagcacaauuaauuaagagugaaacguaauuguacaagcaguuggucacccaccauagggcaugaucaacaccgcaaccuuuccuuuuucccccagugauucugaaaaaccccucuucccuucagcuugcuuagauguuccaaauuuaguaagcuuaaggcggccuacagaagaaaaagaaaaaaaaggccacaaaaguucccucucacuuucaguaaauaaaauaaaagcagcaacagaaauaaagaaauaaaugaaauucaaaaugaaauaaauauuguguugugcagcauuaaaaaaucaauaaaaauuaaaaaugagcaagaucuaaaaaaaaaaaaaaaaaaaaaaaaaaaaaaaaaaaaaaaaaaaaaaaaaaaaaaaaaaaaaaaaugcaucccccccccccccccccccccccccccccccaaaggcucuuuucagagccaccagaauu

SEQ ID NO: 15271 - RNA, 2130 nt, Artificial Sequence
  mRNA product Design f-1 comprising derived and/or modified sequence from HRSV(Memphis-37)__AIY60640.1__F-del_DSCav1_mut2 (opt11)
gggagagcggcucggccauuuugucccagucaguccggaggcugcggcugcagaaguaccgccugcggaguaacugcaaagaagcuuaccauggaacuucccauccucaagaccaacgcuauuacgaccauccucgccgcagucacccucugcuucgcgucaucccaaaacaucaccgaagaauuuuaccaauccacaugcuccgcagucucaaaaggcuaccuaggagcccuacgcaccggaugguacacauccgucaucacaaucgaacucuccaacauaaaagaaaacaaaugcaacggcaccgaugccaaaguaaaacugauuaaacaagaacucgacaaauacaagaacgccgucacagaccuacagcuccucaugcaaucaacucccgccgccggcagcggauccgcuaucugcucaggcaucgccguaugcaaaguccuccaccuagaaggcgaaguaaacaaaaucaagaacgcacuacucucaacaaacaaagccgucgucucccucuccaacggcgucuccguccuuaccuucaaaguccucgaccuuaagaacuacauugacaaacaacuccuacccauccucaacaaacaauccugcucuauaccuaauauagaaaccguaaucgaauuucaacagaaaaacaaccgccuccucgaaauuacccgcgaguucucaguaaacgccggcguaaccacccccgucuccaccuacaugcucacaaauucagaacuccucagccucaucaacgacaugcccauaaccaacgaccaaaagaaacucaugucaaacaacguccaaaucgucaggcaacaaagcuacagcaucaugugcaucauuaaagaagaaguacucgccuacgucgugcaacuaccccucuacggcgucauagacacacccugcuggaaacuucacacaucaccgcucugcaccacaaacaccaaagaaggcaguaacauaugccucacccgaaccgaccgcggaugguacugcgacaacgccggauccgucagcuucuucccacaagccgaaaccugcaaaguacaauccaaccgagucuucugcgacaccaugaacucucuuacgcuccccucagaagucaaccuaugcaacaucgacaucuucaaccccaaauacgacugcaaaaucaugaccuccaaaacagacgucuccuccucagugauaaccucccucggcgccauugucuccugcuacggcaaaaccaaaugcaccgccuccaacaaaaaccgugggaucaucaaaaccuucucaaacggcugcgacuacguauccaauaagggugucgacacagucuccguaggcaauacccucuauugcgucaacaaacaagaaggccaaucccucuacgucaaaggcgaaccuaucaucaacuucuacgacccgcuagucuuccccucagacgaguucgacgcauccaucucacaagucaacgaaaagaucaaccagucccucgcauucauccgaaaauccgacgaacuucuccacaacguuaacgucggcaaauccaccacuaacauaaugaucaccacgaucaucauaguaauuaucgucauacuccuccuccuaaucgcugucggacucuuccucuacugcaaggcccgcuaaggacuagugaagggaacacccaaauuuaauucagccuuaagcacaauuaauuaagagugaaacguaauuguacaagcaguuggucacccaccauagggcaugaucaacaccgcaaccuuuccuuuuucccccagugauucugaaaaaccccucuucccuucagcuugcuuagauguuccaaauuuaguaagcuuaaggcggccuacagaagaaaaagaaaaaaaaggccacaaaaguucccucucacuuucaguaaauaaaauaaaagcagcaacagaaauaaagaaauaaaugaaauucaaaaugaaauaaauauuguguugugcagcauuaaaaaaucaauaaaaauuaaaaaugagcaagaucuaaaaaaaaaaaaaaaaaaaaaaaaaaaaaaaaaaaaaaaaaaaaaaaaaaaaaaaaaaaaaaaaugcaucccccccccccccccccccccccccccccccaaaggcucuuuucagagccaccagaauu

SEQ ID NO: 15272 - RNA, 1910 nt, Artificial Sequence
  mRNA product Design f-2 comprising derived and/or modified sequence from HRSV(Memphis-37)__AIY60640.1__F-del_DSCav1_mut2 (opt1)
gggagagcggcucggccauuuugucccagucaguccggaggcugcggcugcagaaguaccgccugcggaguaacugcaaagaagcuuaccauggagcugcccauccucaagaccaacgccaucaccacgauccuggccgcggugacccugugcuucgccagcucccagaacaucaccgaggaguucuaccagagcacgugcuccgccgucagcaagggcuaccucggcgcccugcgcaccgggugguacaccagcgugaucaccaucgagcuguccaacaucaaggagaacaagugcaacggcaccgacgccaaggugaagcucaucaagcaggagcuggacaaguacaagaacgcggucacggaccugcagcuccugaugcagagcaccccggccgccggcuccgggagcgcgaucugcuccggcaucgccgucugcaaggugcugcaccucgagggcgaggugaacaagaucaagaacgcccugcuguccaccaacaaggccgucgugagccucuccaacggggugagcguccugaccuucaaggugcuggaccucaagaacuacaucgacaagcagcugcugcccauccugaacaagcagagcugcuccauccccaacaucgagaccgucaucgaguuccagcagaagaacaaccgccuccuggagaucacgcgggaguucagcgugaacgcgggcgugaccacccccgucuccaccuacaugcugacgaacagcgagcuccugucccugaucaacgacaugccgaucaccaacgaccagaagaagcucaugagcaacaacgugcagaucgugcgccagcaguccuacagcaucaugugcaucaucaaggaggagguccuggccuacguggugcagcugccccucuacggggucaucgacacccccugcuggaagcugcacaccagcccccugugcacgaccaacaccaaggagggcuccaacaucugccucacccggacggaccgcgggugguacugcgacaacgccggcagcguguccuucuucccgcaggccgagaccugcaagguccagagcaaccggguguucugcgacaccaugaacucccugacccugcccagcgaggugaaccucugcaacaucgacaucuucaaccccaaguacgacugcaagaucaugacguccaagaccgacgucagcuccagcgugaucaccucccugggcgccaucgugagcugcuacgggaagaccaagugcacggcgagcaacaagaaccgcggcaucaucaagaccuucuccaacgggugcgacuacgucagcaacaagggcguggacaccguguccgucggcaacacccuguacugcgugaacaagcaggagggccagagccucuacgugaagggggagcccaucaucaacuucuacgacccgcuggucuuccccuccgacgaguucgacgccagcaucucccaggugaacgagaagaucaaccagagccuggccuucauccggaaguccgacgagcuccugcacaacgugaacgucggcaagagcaccacgaacaucaugaucaccaccaucaucaucgugaucaucgugauccugcugcuccugaucgccgucgggcuguuccucuacugcaaggcccgcugaggacuaguggaagcauuuuccuggcugauuaaaagaaauuacucagcuauggucaucuguuccuguuagaaggcuaugcagcauauuauauacuaugcgcauguuaugaaaugcauaauaaaaaauuuuaaaaaaucuaaaagaucuaaaaaaaaaaaaaaaaaaaaaaaaaaaaaaaaaaaaaaaaaaaaaaaaaaaaaaaaaaaaaaaaugcaucccccccccccccccccccccccccccccccaaaggcucuuuucagagccaccagaauu

SEQ ID NO: 15273 - RNA, 1910 nt, Artificial Sequence
  mRNA product Design f-2 comprising derived and/or modified sequence from HRSV(Memphis-37)__AIY60640.1__F-del_DSCav1_mut2 (opt1)
gggagagcggcucggccauuuugucccagucaguccggaggcugcggcugcagaaguaccgccugcggaguaacugcaaagaagcuuaccauggagcugcccauccucaagaccaacgccaucaccacgauccuggccgcggugacccugugcuucgccagcucccagaacaucaccgaggaguucuaccagagcacgugcuccgccgucagcaagggcuaccucggggcccugcgcaccggcugguacaccuccgugaucaccaucgagcugagcaacaucaaggagaacaagugcaacgggaccgacgccaaggugaagcucaucaagcaggagcuggacaaguacaagaacgcggucacggaccugcagcuccugaugcaguccaccccggccgccggcagcggguccgccaucugcagcggcaucgcggugugcaaggugcugcaccucgagggcgaggucaacaagaucaagaacgcccugcuguccaccaacaaggccguggugagccucuccaacggggucagcgugcugaccuucaaggugcuggaccucaagaacuacaucgacaagcagcugcugcccauccucaacaagcaguccugcagcauccccaacaucgagacggucaucgaguuccagcagaagaacaaccggcugcuggagaucacccgcgaguucuccgugaacgccggcgugaccacccccgucagcacguacaugcucaccaacuccgagcugcugagccucaucaacgacaugccgaucaccaacgaccagaagaagcugaugagcaacaacgugcagaucgugcggcagcaguccuacagcaucaugugcaucaucaaggaggagguccuggccuacguggugcagcucccccuguacggggucaucgacacccccugcuggaagcugcacacgagcccccucugcaccaccaacaccaaggagggcuccaacaucugccugacgcgcaccgaccgggggugguacugcgacaacgcgggcuccgugagcuucuucccgcaggccgagaccugcaaggugcaguccaaccgcgucuucugcgacaccaugaacagccugacgcuccccuccgaggugaaccugugcaacaucgacaucuucaaccccaaguacgacugcaagaucaugaccagcaagaccgacgucuccagcuccgugaucaccagccugggcgccaucguguccugcuacgggaagacgaagugcaccgccagcaacaagaaccggggcaucaucaagaccuucuccaacgggugcgacuacgucagcaacaagggcguggacaccguguccgucggcaacacgcucuacugcgugaacaagcaggaggggcagagccuguacgugaagggcgagcccaucaucaacuucuacgacccgcuggucuuccccagcgacgaguucgacgccuccaucagccaggugaacgagaagaucaaccagucccucgcguucauccgcaagagcgacgagcugcugcacaacgugaacgucgggaaguccaccaccaacaucaugaucaccaccaucaucaucgugaucaucgugauccuccugcugcucaucgccgucggccuguuccuguacugcaaggcccggugaggacuaguggaagcauuuuccuggcugauuaaaagaaauuacucagcuauggucaucuguuccuguuagaaggcuaugcagcauauuauauacuaugcgcauguuaugaaaugcauaauaaaaaauuuuaaaaaaucuaaaagaucuaaaaaaaaaaaaaaaaaaaaaaaaaaaaaaaaaaaaaaaaaaaaaaaaaaaaaaaaaaaaaaaaugcaucccccccccccccccccccccccccccccccaaaggcucuuuucagagccaccagaauu

SEQ ID NO: 15274 - RNA, 1910 nt, Artificial Sequence
  mRNA product Design f-2 comprising derived and/or modified sequence from HRSV(Memphis-37)__AIY60640.1__F-del_DSCav1_mut2 (opt2)
gggagagcggcucggccauuuugucccagucaguccggaggcugcggcugcagaaguaccgccugcggaguaacugcaaagaagcuuaccauggagcuccccauccucaagaccaacgccaucaccaccauccucgccgccgucacccucugcuucgccuccucccagaacaucaccgaggaguucuaccaguccaccugcuccgccgucuccaagggcuaccucggcgcccuccgcaccggcugguacaccuccgucaucaccaucgagcucuccaacaucaaggagaacaagugcaacggcaccgacgccaaggucaagcucaucaagcaggagcucgacaaguacaagaacgccgucaccgaccuccagcuccucaugcaguccacccccgccgccggcuccggcuccgccaucugcuccggcaucgccgucugcaagguccuccaccucgagggcgaggucaacaagaucaagaacgcccuccucuccaccaacaaggccgucgucucccucuccaacggcgucuccguccucaccuucaagguccucgaccucaagaacuacaucgacaagcagcuccuccccauccucaacaagcaguccugcuccauccccaacaucgagaccgucaucgaguuccagcagaagaacaaccgccuccucgagaucacccgcgaguucuccgucaacgccggcgucaccacccccgucuccaccuacaugcucaccaacuccgagcuccucucccucaucaacgacaugcccaucaccaacgaccagaagaagcucauguccaacaacguccagaucguccgccagcaguccuacuccaucaugugcaucaucaaggaggagguccucgccuacgucguccagcucccccucuacggcgucaucgacacccccugcuggaagcuccacaccuccccccucugcaccaccaacaccaaggagggcuccaacaucugccucacccgcaccgaccgcggcugguacugcgacaacgccggcuccgucuccuucuucccccaggccgagaccugcaagguccaguccaaccgcgucuucugcgacaccaugaacucccucacccuccccuccgaggucaaccucugcaacaucgacaucuucaaccccaaguacgacugcaagaucaugaccuccaagaccgacgucuccuccuccgucaucaccucccucggcgccaucgucuccugcuacggcaagaccaagugcaccgccuccaacaagaaccgcggcaucaucaagaccuucuccaacggcugcgacuacgucuccaacaagggcgucgacaccgucuccgucggcaacacccucuacugcgucaacaagcaggagggccagucccucuacgucaagggcgagcccaucaucaacuucuacgacccccucgucuuccccuccgacgaguucgacgccuccaucucccaggucaacgagaagaucaaccagucccucgccuucauccgcaaguccgacgagcuccuccacaacgucaacgucggcaaguccaccaccaacaucaugaucaccaccaucaucaucgucaucaucgucauccuccuccuccucaucgccgucggccucuuccucuacugcaaggcccgcugaggacuaguggaagcauuuuccuggcugauuaaaagaaauuacucagcuauggucaucuguuccuguuagaaggcuaugcagcauauuauauacuaugcgcauguuaugaaaugcauaauaaaaaauuuuaaaaaaucuaaaagaucuaaaaaaaaaaaaaaaaaaaaaaaaaaaaaaaaaaaaaaaaaaaaaaaaaaaaaaaaaaaaaaaaugcaucccccccccccccccccccccccccccccccaaaggcucuuuucagagccaccagaauu

SEQ ID NO: 15275 - RNA, 1910 nt, Artificial Sequence
  mRNA product Design f-2 comprising derived and/or modified sequence from HRSV(Memphis-37)__AIY60640.1__F-del_DSCav1_mut2 (opt3)
gggagagcggcucggccauuuugucccagucaguccggaggcugcggcugcagaaguaccgccugcggaguaacugcaaagaagcuuaccauggagcugcccauccucaagaccaacgccauuacaacuauacuugcugcagugacgcugugcuucgccagcucccagaauaucaccgaagaguuuuaccaaucuacauguucagcggucaguaaaggcuauuugggggcuuuaagaacuggaugguacaccagcguuauuacaaucgaacuguccaacauuaaggagaauaaaugcaacgguaccgacgccaaggugaaacuaaucaagcaggaacucgauaaguauaaaaaugcaguaacugaccugcagcuucugaugcagucuacuccugccgcuggcucggggucagcaauauguagcggaaucgccgugugcaaggucuugcaccucgagggcgaggugaacaaaauuaagaaugcucugcugaguaccaacaaagccguugugucccucucuaauggugucagcguguuaacguucaagguacuggaucuuaagaacuacaucgacaaacaauugcugccaauucuaaauaagcaguccuguucaaucccgaacauagaaacuguuauugaguuucagcagaaaaauaacaggcuccuggaaaucacccgggaguucagugugaaugcgggggucacaacucccgugagcaccuauaugcuuacaaacucugagcuguugucccucauuaacgauaugccuaucaccaaugaccaaaagaaacugaugucaaacaaugugcagaucguccgccagcagagcuacaguauuaugugcauaaucaaggaagagguuuuagcauaugugguacaacugccacucuacggagugauugauacgcccuguuggaaacuucauacuucuccucugugcacaaccaacacuaaggaaggcuccaauaucuguuugacacgaaccgaccguggcugguacugcgauaacgccgggagcgucucguuuuucccacaggcugagacguguaaggugcagucuaauagaguuuucugcgacaccaugaacucccuaacacugcccucagaagugaaucucugcaacauagauauuuucaauccuaaauaugacuguaagaucaugacaaguaaaaccgaugucagcuccucugugaucacaagccugggagccauuguaucaugcuacgguaagacuaaauguaccgcaaguaacaagaauaggggcaucauuaagacauuuuccaacgggugcgacuauguuagcaauaaaggaguggacaccgucucugugggcaacacucuuuacugugucaacaagcaagagggucagucacuguaugugaaaggggagccaauaaucaauuucuacgauccguugguuuuucccagugacgaauuugaugcuagcauuucccaggugaacgagaagaucaaucagucucucgccuuuauccggaaaucggacgaacuguuacacaacguaaaugucggaaagagcacgacaaacauuaugauaaccacuaucauuaucgugauuaucguuauacugcuacuccugaucgcggugggccuuuucuuguauugcaaggcccgcugaggacuaguggaagcauuuuccuggcugauuaaaagaaauuacucagcuauggucaucuguuccuguuagaaggcuaugcagcauauuauauacuaugcgcauguuaugaaaugcauaauaaaaaauuuuaaaaaaucuaaaagaucuaaaaaaaaaaaaaaaaaaaaaaaaaaaaaaaaaaaaaaaaaaaaaaaaaaaaaaaaaaaaaaaaugcaucccccccccccccccccccccccccccccccaaaggcucuuuucagagccaccagaauu

SEQ ID NO: 15276 - RNA, 1910 nt, Artificial Sequence
  mRNA product Design f-2 comprising derived and/or modified sequence from HRSV(Memphis-37)__AIY60640.1__F-del_DSCav1_mut2 (opt4)
gggagagcggcucggccauuuugucccagucaguccggaggcugcggcugcagaaguaccgccugcggaguaacugcaaagaagcuuaccauggagcugcccauccugaagaccaacgccaucaccaccauccuggccgccgugacccugugcuucgccagcagccagaacaucaccgaggaguucuaccagagcaccugcagcgccgugagcaagggcuaccugggcgcccugagaaccggcugguacaccagcgugaucaccaucgagcugagcaacaucaaggagaacaagugcaacggcaccgacgccaaggugaagcugaucaagcaggagcuggacaaguacaagaacgccgugaccgaccugcagcugcugaugcagagcacccccgccgccggcagcggcagcgccaucugcagcggcaucgccgugugcaaggugcugcaccuggagggcgaggugaacaagaucaagaacgcccugcugagcaccaacaaggccguggugagccugagcaacggcgugagcgugcugaccuucaaggugcuggaccugaagaacuacaucgacaagcagcugcugcccauccugaacaagcagagcugcagcauccccaacaucgagaccgugaucgaguuccagcagaagaacaacagacugcuggagaucaccagagaguucagcgugaacgccggcgugaccacccccgugagcaccuacaugcugaccaacagcgagcugcugagccugaucaacgacaugcccaucaccaacgaccagaagaagcugaugagcaacaacgugcagaucgugagacagcagagcuacagcaucaugugcaucaucaaggaggaggugcuggccuacguggugcagcugccccuguacggcgugaucgacacccccugcuggaagcugcacaccagcccccugugcaccaccaacaccaaggagggcagcaacaucugccugaccagaaccgacagaggcugguacugcgacaacgccggcagcgugagcuucuucccccaggccgagaccugcaaggugcagagcaacagaguguucugcgacaccaugaacagccugacccugcccagcgaggugaaccugugcaacaucgacaucuucaaccccaaguacgacugcaagaucaugaccagcaagaccgacgugagcagcagcgugaucaccagccugggcgccaucgugagcugcuacggcaagaccaagugcaccgccagcaacaagaacagaggcaucaucaagaccuucagcaacggcugcgacuacgugagcaacaagggcguggacaccgugagcgugggcaacacccuguacugcgugaacaagcaggagggccagagccuguacgugaagggcgagcccaucaucaacuucuacgacccccugguguuccccagcgacgaguucgacgccagcaucagccaggugaacgagaagaucaaccagagccuggccuucaucagaaagagcgacgagcugcugcacaacgugaacgugggcaagagcaccaccaacaucaugaucaccaccaucaucaucgugaucaucgugauccugcugcugcugaucgccgugggccuguuccuguacugcaaggccagaugaggacuaguggaagcauuuuccuggcugauuaaaagaaauuacucagcuauggucaucuguuccuguuagaaggcuaugcagcauauuauauacuaugcgcauguuaugaaaugcauaauaaaaaauuuuaaaaaaucuaaaagaucuaaaaaaaaaaaaaaaaaaaaaaaaaaaaaaaaaaaaaaaaaaaaaaaaaaaaaaaaaaaaaaaaugcaucccccccccccccccccccccccccccccccaaaggcucuuuucagagccaccagaauu

SEQ ID NO: 15277 - RNA, 1910 nt, Artificial Sequence
  mRNA product Design f-2 comprising derived and/or modified sequence from HRSV(Memphis-37)__AIY60640.1__F-del_DSCav1_mut2 (opt5)
gggagagcggcucggccauuuugucccagucaguccggaggcugcggcugcagaaguaccgccugcggaguaacugcaaagaagcuuaccauggagcugcccauccucaagaccaacgccauuacaacgauccuggcugccgugacccuuugcuucgcgagcucccagaauauuacagaagaguuuuaccaaucuaccuguagcgcugucuccaaaggcuaucugggggcccucagaacaggaugguacaccucuguuaucacaauugaacugagcaacaucaaggagaauaaaugcaacggcaccgacgccaaggugaaacuuaucaagcaggaacuggauaaguauaaaaaugcugugacggaccuccagcugcugaugcaguccaccccugccgcugggucuggaagcgccauuuguuccggcaucgcggucugcaaggugcuccaccuggagggggagguuaacaaaauuaagaaugcccuucugagcacaaacaaagcuguggucucucucuccaauggagugagcguucugaccuucaaggugcuugaucugaagaacuacaucgacaaacaacuccugccgauucugaauaagcagucuuguuccauccccaacauugaaacagucaucgaguuucagcagaaaaauaaccggcuccuggaaaucacccgcgaguucagcgugaaugccggcgugacgacaccugucucuaccuauaugcuuacaaacuccgagcugcucagccugauuaacgauaugcccaucaccaaugaccaaaagaaacuuauguccaacaauguucagauugugagacagcagucuuacagcaucaugugcauuaucaaggaagaggugcuggcuuaugucgugcaacucccucuguacggcguuaucgauacccccuguuggaaacugcauacauccccucucugcacgaccaacacaaaggaagggagcaauauuugucugacccggacagaccgcggaugguacugcgauaacgccggcucuguguccuuuuucccgcaggcggagaccuguaagguccagagcaauagaguguuuugcgacacgaugaacucucuuacacugcccagcgaaguuaaucucugcaacaucgauauuuucaauccuaaauaugacuguaagaucaugaccuccaaaaccgaugugucuagcuccgucauuacaagccugggggccaucgugucuugcuacggaaagaccaaauguacagcuuccaacaagaaucggggcaucauuaagacguuuagcaacgggugcgacuaugucucuaauaaaggaguggacaccguuuccgugggcaacacacuuuacugugucaacaagcaagagggccagagccuguaugugaaaggggagcccaucauuaauuucuacgauccucucguuuuucccuccgacgaguucgaugccucuaucagccaggugaacgaaaagauuaaucagucccuggcuuuuauccgcaaaucugacgaacugcuccacaacgucaaugugggaaagagcaccacaaacauuaugaucaccacgaucauuaucgugauuaucguuauucugcuucugcucaucgccgucggccuguuccuguauugcaaggccagaugaggacuaguggaagcauuuuccuggcugauuaaaagaaauuacucagcuauggucaucuguuccuguuagaaggcuaugcagcauauuauauacuaugcgcauguuaugaaaugcauaauaaaaaauuuuaaaaaaucuaaaagaucuaaaaaaaaaaaaaaaaaaaaaaaaaaaaaaaaaaaaaaaaaaaaaaaaaaaaaaaaaaaaaaaaugcaucccccccccccccccccccccccccccccccaaaggcucuuuucagagccaccagaauu

SEQ ID NO: 15278 - RNA, 1910 nt, Artificial Sequence
  mRNA product Design f-2 comprising derived and/or modified sequence from HRSV(Memphis-37)__AIY60640.1__F-del_DSCav1_mut2 (opt6)
gggagagcggcucggccauuuugucccagucaguccggaggcugcggcugcagaaguaccgccugcggaguaacugcaaagaagcuuaccauggaacuaccaauacucaaaacaaacgcaauaacaacaauuuuagcugcaguaacacuuuguuucgcauccucccaaaauauaacagaagaauuuuaucaaucaaccugcucagccgucuccaaaggauaucuaggugcacuacgcacuggaugguacacaagugucaucacaauagaacuuuccaacaucaaagaaaauaaauguaauggaacugacgcaaaaguaaaacucauaaaacaagaacuagacaaauacaaaaacgcaguaacagaccuacaacuauuaaugcaaucaacaccagcagcaggauccggcagugccauaugcucuggaauagcagucugcaaaguuuuacacuuagaaggcgaaguaaacaaaaucaaaaacgcccuacuaucuacaaauaaagccgucguaucucucucaaauggaguaucaguacuaacauucaaaguauuagacuuaaaaaacuacaucgauaaacaauuauugccaauauuaaacaaacaaucuugcucaauaccaaauauagaaacagucauagaauuucaacaaaaaaauaaccgauuauuagaaauaacacgagaauuuucaguaaaugccggagucaccacaccaguaucaacauacaugcuaacaaauucagaacuauuaucauuaauaaacgacaugccuauuacaaaugaucaaaaaaaacuaauguccaacaauguacaaauaguccgacaacaaagcuacucaaucauguguauaauaaaagaagaaguacuugcauacguaguacaauuaccacuauacggaguuaucgacacaccaugcuggaaacuccacacuucaccacucugcaccacaaacacaaaagaaggcucaaacauaugccuaacaagaacagaccgaggaugguacugcgacaacgcaggaucaguaucauucuucccacaagcagaaacuugcaaaguacaaucuaacagaguuuucugugacaccaugaauagccuaacacuccccuccgaaguuaaccuauguaacauagauauauuuaaucccaaauaugauugcaaaaucaugacaucuaaaaccgacguaucaucaucuguaaucacaucacuaggugccauagucucaugcuacggcaaaacaaaaugcaccgccucaaacaaaaaccgagguauaauaaaaaccuucaguaauggaugugacuacguaucaaacaaagguguugauaccguaagcgucggcaacacccuauacugcguaaauaaacaagaaggccaaucacuauacgucaaaggcgaaccaauuauuaacuucuaugacccacucgucuuucccuccgacgaauuugacgcaagcauaucacaaguaaacgaaaaaauaaaccaaucacuagcauucauacgcaaaucagaugaacuacuacauaacguaaacguaggaaaauccacuacaaauauaaugaucacaacaauaauaaucguaauuauagucauauuauuacuacuaauagcaguaggacuuuuccuauacuguaaagcaagauaaggacuaguggaagcauuuuccuggcugauuaaaagaaauuacucagcuauggucaucuguuccuguuagaaggcuaugcagcauauuauauacuaugcgcauguuaugaaaugcauaauaaaaaauuuuaaaaaaucuaaaagaucuaaaaaaaaaaaaaaaaaaaaaaaaaaaaaaaaaaaaaaaaaaaaaaaaaaaaaaaaaaaaaaaaugcaucccccccccccccccccccccccccccccccaaaggcucuuuucagagccaccagaauu

SEQ ID NO: 15279 - RNA, 1910 nt, Artificial Sequence
  mRNA product Design f-2 comprising derived and/or modified sequence from HRSV(Memphis-37)__AIY60640.1__F-del_DSCav1_mut2 (opt11)
gggagagcggcucggccauuuugucccagucaguccggaggcugcggcugcagaaguaccgccugcggaguaacugcaaagaagcuuaccauggaacuucccauccucaagaccaacgcuauuacgaccauccucgccgcagucacccucugcuucgcgucaucccaaaacaucaccgaagaauuuuaccaauccacaugcuccgcagucucaaaaggcuaccuaggagcccuacgcaccggaugguacacauccgucaucacaaucgaacucuccaacauaaaagaaaacaaaugcaacggcaccgaugccaaaguaaaacugauuaaacaagaacucgacaaauacaagaacgccgucacagaccuacagcuccucaugcaaucaacucccgccgccggcagcggauccgcuaucugcucaggcaucgccguaugcaaaguccuccaccuagaaggcgaaguaaacaaaaucaagaacgcacuacucucaacaaacaaagccgucgucucccucuccaacggcgucuccguccuuaccuucaaaguccucgaccuuaagaacuacauugacaaacaacuccuacccauccucaacaaacaauccugcucuauaccuaauauagaaaccguaaucgaauuucaacagaaaaacaaccgccuccucgaaauuacccgcgaguucucaguaaacgccggcguaaccacccccgucuccaccuacaugcucacaaauucagaacuccucagccucaucaacgacaugcccauaaccaacgaccaaaagaaacucaugucaaacaacguccaaaucgucaggcaacaaagcuacagcaucaugugcaucauuaaagaagaaguacucgccuacgucgugcaacuaccccucuacggcgucauagacacacccugcuggaaacuucacacaucaccgcucugcaccacaaacaccaaagaaggcaguaacauaugccucacccgaaccgaccgcggaugguacugcgacaacgccggauccgucagcuucuucccacaagccgaaaccugcaaaguacaauccaaccgagucuucugcgacaccaugaacucucuuacgcuccccucagaagucaaccuaugcaacaucgacaucuucaaccccaaauacgacugcaaaaucaugaccuccaaaacagacgucuccuccucagugauaaccucccucggcgccauugucuccugcuacggcaaaaccaaaugcaccgccuccaacaaaaaccgugggaucaucaaaaccuucucaaacggcugcgacuacguauccaauaagggugucgacacagucuccguaggcaauacccucuauugcgucaacaaacaagaaggccaaucccucuacgucaaaggcgaaccuaucaucaacuucuacgacccgcuagucuuccccucagacgaguucgacgcauccaucucacaagucaacgaaaagaucaaccagucccucgcauucauccgaaaauccgacgaacuucuccacaacguuaacgucggcaaauccaccacuaacauaaugaucaccacgaucaucauaguaauuaucgucauacuccuccuccuaaucgcugucggacucuuccucuacugcaaggcccgcuaaggacuaguggaagcauuuuccuggcugauuaaaagaaauuacucagcuauggucaucuguuccuguuagaaggcuaugcagcauauuauauacuaugcgcauguuaugaaaugcauaauaaaaaauuuuaaaaaaucuaaaagaucuaaaaaaaaaaaaaaaaaaaaaaaaaaaaaaaaaaaaaaaaaaaaaaaaaaaaaaaaaaaaaaaaugcaucccccccccccccccccccccccccccccccaaaggcucuuuucagagccaccagaauu

SEQ ID NO: 15280 - RNA, 1901 nt, Artificial Sequence
  mRNA product Design f-3 comprising derived and/or modified sequence from HRSV(Memphis-37)__AIY60640.1__F-del_DSCav1_mut2 (opt1)
gggagagucccgcagucggcguccagcggcucugcuuguucgugugugugucguugcaggccuuauucaagcuuaccauggagcugcccauccucaagaccaacgccaucaccacgauccuggccgcggugacccugugcuucgccagcucccagaacaucaccgaggaguucuaccagagcacgugcuccgccgucagcaagggcuaccucggcgcccugcgcaccgggugguacaccagcgugaucaccaucgagcuguccaacaucaaggagaacaagugcaacggcaccgacgccaaggugaagcucaucaagcaggagcuggacaaguacaagaacgcggucacggaccugcagcuccugaugcagagcaccccggccgccggcuccgggagcgcgaucugcuccggcaucgccgucugcaaggugcugcaccucgagggcgaggugaacaagaucaagaacgcccugcuguccaccaacaaggccgucgugagccucuccaacggggugagcguccugaccuucaaggugcuggaccucaagaacuacaucgacaagcagcugcugcccauccugaacaagcagagcugcuccauccccaacaucgagaccgucaucgaguuccagcagaagaacaaccgccuccuggagaucacgcgggaguucagcgugaacgcgggcgugaccacccccgucuccaccuacaugcugacgaacagcgagcuccugucccugaucaacgacaugccgaucaccaacgaccagaagaagcucaugagcaacaacgugcagaucgugcgccagcaguccuacagcaucaugugcaucaucaaggaggagguccuggccuacguggugcagcugccccucuacggggucaucgacacccccugcuggaagcugcacaccagcccccugugcacgaccaacaccaaggagggcuccaacaucugccucacccggacggaccgcgggugguacugcgacaacgccggcagcguguccuucuucccgcaggccgagaccugcaagguccagagcaaccggguguucugcgacaccaugaacucccugacccugcccagcgaggugaaccucugcaacaucgacaucuucaaccccaaguacgacugcaagaucaugacguccaagaccgacgucagcuccagcgugaucaccucccugggcgccaucgugagcugcuacgggaagaccaagugcacggcgagcaacaagaaccgcggcaucaucaagaccuucuccaacgggugcgacuacgucagcaacaagggcguggacaccguguccgucggcaacacccuguacugcgugaacaagcaggagggccagagccucuacgugaagggggagcccaucaucaacuucuacgacccgcuggucuuccccuccgacgaguucgacgccagcaucucccaggugaacgagaagaucaaccagagccuggccuucauccggaaguccgacgagcuccugcacaacgugaacgucggcaagagcaccacgaacaucaugaucaccaccaucaucaucgugaucaucgugauccugcugcuccugaucgccgucgggcuguuccucuacugcaaggcccgcugaggacuaguacuggcugcaucucccuuuccucuguccuccauccuucucccaggauggugaagggggaccugguacccagugauccccaccccaggauccuaaaucaugacuuaccugcuaauaaaaacucauuggaaaagugagaagaucuaaaaaaaaaaaaaaaaaaaaaaaaaaaaaaaaaaaaaaaaaaaaaaaaaaaaaaaaaaaaaaaaugcaucccccccccccccccccccccccccccccccaaaggcucuuuucagagccaccagaauu

SEQ ID NO: 15281 - RNA, 1901 nt, Artificial Sequence
  mRNA product Design f-3 comprising derived and/or modified sequence from HRSV(Memphis-37)__AIY60640.1__F-del_DSCav1_mut2 (opt1)
gggagagucccgcagucggcguccagcggcucugcuuguucgugugugugucguugcaggccuuauucaagcuuaccauggagcugcccauccucaagaccaacgccaucaccacgauccuggccgcggugacccugugcuucgccagcucccagaacaucaccgaggaguucuaccagagcacgugcuccgccgucagcaagggcuaccucggggcccugcgcaccggcugguacaccuccgugaucaccaucgagcugagcaacaucaaggagaacaagugcaacgggaccgacgccaaggugaagcucaucaagcaggagcuggacaaguacaagaacgcggucacggaccugcagcuccugaugcaguccaccccggccgccggcagcggguccgccaucugcagcggcaucgcggugugcaaggugcugcaccucgagggcgaggucaacaagaucaagaacgcccugcuguccaccaacaaggccguggugagccucuccaacggggucagcgugcugaccuucaaggugcuggaccucaagaacuacaucgacaagcagcugcugcccauccucaacaagcaguccugcagcauccccaacaucgagacggucaucgaguuccagcagaagaacaaccggcugcuggagaucacccgcgaguucuccgugaacgccggcgugaccacccccgucagcacguacaugcucaccaacuccgagcugcugagccucaucaacgacaugccgaucaccaacgaccagaagaagcugaugagcaacaacgugcagaucgugcggcagcaguccuacagcaucaugugcaucaucaaggaggagguccuggccuacguggugcagcucccccuguacggggucaucgacacccccugcuggaagcugcacacgagcccccucugcaccaccaacaccaaggagggcuccaacaucugccugacgcgcaccgaccgggggugguacugcgacaacgcgggcuccgugagcuucuucccgcaggccgagaccugcaaggugcaguccaaccgcgucuucugcgacaccaugaacagccugacgcuccccuccgaggugaaccugugcaacaucgacaucuucaaccccaaguacgacugcaagaucaugaccagcaagaccgacgucuccagcuccgugaucaccagccugggcgccaucguguccugcuacgggaagacgaagugcaccgccagcaacaagaaccggggcaucaucaagaccuucuccaacgggugcgacuacgucagcaacaagggcguggacaccguguccgucggcaacacgcucuacugcgugaacaagcaggaggggcagagccuguacgugaagggcgagcccaucaucaacuucuacgacccgcuggucuuccccagcgacgaguucgacgccuccaucagccaggugaacgagaagaucaaccagucccucgcguucauccgcaagagcgacgagcugcugcacaacgugaacgucgggaaguccaccaccaacaucaugaucaccaccaucaucaucgugaucaucgugauccuccugcugcucaucgccgucggccuguuccuguacugcaaggcccggugaggacuaguacuggcugcaucucccuuuccucuguccuccauccuucucccaggauggugaagggggaccugguacccagugauccccaccccaggauccuaaaucaugacuuaccugcuaauaaaaacucauuggaaaagugagaagaucuaaaaaaaaaaaaaaaaaaaaaaaaaaaaaaaaaaaaaaaaaaaaaaaaaaaaaaaaaaaaaaaaugcaucccccccccccccccccccccccccccccccaaaggcucuuuucagagccaccagaauu

SEQ ID NO: 15282 - RNA, 1901 nt, Artificial Sequence
  mRNA product Design f-3 comprising derived and/or modified sequence from HRSV(Memphis-37)__AIY60640.1__F-del_DSCav1_mut2 (opt2)
gggagagucccgcagucggcguccagcggcucugcuuguucgugugugugucguugcaggccuuauucaagcuuaccauggagcuccccauccucaagaccaacgccaucaccaccauccucgccgccgucacccucugcuucgccuccucccagaacaucaccgaggaguucuaccaguccaccugcuccgccgucuccaagggcuaccucggcgcccuccgcaccggcugguacaccuccgucaucaccaucgagcucuccaacaucaaggagaacaagugcaacggcaccgacgccaaggucaagcucaucaagcaggagcucgacaaguacaagaacgccgucaccgaccuccagcuccucaugcaguccacccccgccgccggcuccggcuccgccaucugcuccggcaucgccgucugcaagguccuccaccucgagggcgaggucaacaagaucaagaacgcccuccucuccaccaacaaggccgucgucucccucuccaacggcgucuccguccucaccuucaagguccucgaccucaagaacuacaucgacaagcagcuccuccccauccucaacaagcaguccugcuccauccccaacaucgagaccgucaucgaguuccagcagaagaacaaccgccuccucgagaucacccgcgaguucuccgucaacgccggcgucaccacccccgucuccaccuacaugcucaccaacuccgagcuccucucccucaucaacgacaugcccaucaccaacgaccagaagaagcucauguccaacaacguccagaucguccgccagcaguccuacuccaucaugugcaucaucaaggaggagguccucgccuacgucguccagcucccccucuacggcgucaucgacacccccugcuggaagcuccacaccuccccccucugcaccaccaacaccaaggagggcuccaacaucugccucacccgcaccgaccgcggcugguacugcgacaacgccggcuccgucuccuucuucccccaggccgagaccugcaagguccaguccaaccgcgucuucugcgacaccaugaacucccucacccuccccuccgaggucaaccucugcaacaucgacaucuucaaccccaaguacgacugcaagaucaugaccuccaagaccgacgucuccuccuccgucaucaccucccucggcgccaucgucuccugcuacggcaagaccaagugcaccgccuccaacaagaaccgcggcaucaucaagaccuucuccaacggcugcgacuacgucuccaacaagggcgucgacaccgucuccgucggcaacacccucuacugcgucaacaagcaggagggccagucccucuacgucaagggcgagcccaucaucaacuucuacgacccccucgucuuccccuccgacgaguucgacgccuccaucucccaggucaacgagaagaucaaccagucccucgccuucauccgcaaguccgacgagcuccuccacaacgucaacgucggcaaguccaccaccaacaucaugaucaccaccaucaucaucgucaucaucgucauccuccuccuccucaucgccgucggccucuuccucuacugcaaggcccgcugaggacuaguacuggcugcaucucccuuuccucuguccuccauccuucucccaggauggugaagggggaccugguacccagugauccccaccccaggauccuaaaucaugacuuaccugcuaauaaaaacucauuggaaaagugagaagaucuaaaaaaaaaaaaaaaaaaaaaaaaaaaaaaaaaaaaaaaaaaaaaaaaaaaaaaaaaaaaaaaaugcaucccccccccccccccccccccccccccccccaaaggcucuuuucagagccaccagaauu

SEQ ID NO: 15283 - RNA, 1901 nt, Artificial Sequence
  mRNA product Design f-3 comprising derived and/or modified sequence from HRSV(Memphis-37)__AIY60640.1__F-del_DSCav1_mut2 (opt3)
gggagagucccgcagucggcguccagcggcucugcuuguucgugugugugucguugcaggccuuauucaagcuuaccauggagcugcccauccucaagaccaacgccauuacaacuauacuugcugcagugacgcugugcuucgccagcucccagaauaucaccgaagaguuuuaccaaucuacauguucagcggucaguaaaggcuauuugggggcuuuaagaacuggaugguacaccagcguuauuacaaucgaacuguccaacauuaaggagaauaaaugcaacgguaccgacgccaaggugaaacuaaucaagcaggaacucgauaaguauaaaaaugcaguaacugaccugcagcuucugaugcagucuacuccugccgcuggcucggggucagcaauauguagcggaaucgccgugugcaaggucuugcaccucgagggcgaggugaacaaaauuaagaaugcucugcugaguaccaacaaagccguugugucccucucuaauggugucagcguguuaacguucaagguacuggaucuuaagaacuacaucgacaaacaauugcugccaauucuaaauaagcaguccuguucaaucccgaacauagaaacuguuauugaguuucagcagaaaaauaacaggcuccuggaaaucacccgggaguucagugugaaugcgggggucacaacucccgugagcaccuauaugcuuacaaacucugagcuguugucccucauuaacgauaugccuaucaccaaugaccaaaagaaacugaugucaaacaaugugcagaucguccgccagcagagcuacaguauuaugugcauaaucaaggaagagguuuuagcauaugugguacaacugccacucuacggagugauugauacgcccuguuggaaacuucauacuucuccucugugcacaaccaacacuaaggaaggcuccaauaucuguuugacacgaaccgaccguggcugguacugcgauaacgccgggagcgucucguuuuucccacaggcugagacguguaaggugcagucuaauagaguuuucugcgacaccaugaacucccuaacacugcccucagaagugaaucucugcaacauagauauuuucaauccuaaauaugacuguaagaucaugacaaguaaaaccgaugucagcuccucugugaucacaagccugggagccauuguaucaugcuacgguaagacuaaauguaccgcaaguaacaagaauaggggcaucauuaagacauuuuccaacgggugcgacuauguuagcaauaaaggaguggacaccgucucugugggcaacacucuuuacugugucaacaagcaagagggucagucacuguaugugaaaggggagccaauaaucaauuucuacgauccguugguuuuucccagugacgaauuugaugcuagcauuucccaggugaacgagaagaucaaucagucucucgccuuuauccggaaaucggacgaacuguuacacaacguaaaugucggaaagagcacgacaaacauuaugauaaccacuaucauuaucgugauuaucguuauacugcuacuccugaucgcggugggccuuuucuuguauugcaaggcccgcugaggacuaguacuggcugcaucucccuuuccucuguccuccauccuucucccaggauggugaagggggaccugguacccagugauccccaccccaggauccuaaaucaugacuuaccugcuaauaaaaacucauuggaaaagugagaagaucuaaaaaaaaaaaaaaaaaaaaaaaaaaaaaaaaaaaaaaaaaaaaaaaaaaaaaaaaaaaaaaaaugcaucccccccccccccccccccccccccccccccaaaggcucuuuucagagccaccagaauu

SEQ ID NO: 15284 - RNA, 1901 nt, Artificial Sequence
  mRNA product Design f-3 comprising derived and/or modified sequence from HRSV(Memphis-37)__AIY60640.1__F-del_DSCav1_mut2 (opt4)
gggagagucccgcagucggcguccagcggcucugcuuguucgugugugugucguugcaggccuuauucaagcuuaccauggagcugcccauccugaagaccaacgccaucaccaccauccuggccgccgugacccugugcuucgccagcagccagaacaucaccgaggaguucuaccagagcaccugcagcgccgugagcaagggcuaccugggcgcccugagaaccggcugguacaccagcgugaucaccaucgagcugagcaacaucaaggagaacaagugcaacggcaccgacgccaaggugaagcugaucaagcaggagcuggacaaguacaagaacgccgugaccgaccugcagcugcugaugcagagcacccccgccgccggcagcggcagcgccaucugcagcggcaucgccgugugcaaggugcugcaccuggagggcgaggugaacaagaucaagaacgcccugcugagcaccaacaaggccguggugagccugagcaacggcgugagcgugcugaccuucaaggugcuggaccugaagaacuacaucgacaagcagcugcugcccauccugaacaagcagagcugcagcauccccaacaucgagaccgugaucgaguuccagcagaagaacaacagacugcuggagaucaccagagaguucagcgugaacgccggcgugaccacccccgugagcaccuacaugcugaccaacagcgagcugcugagccugaucaacgacaugcccaucaccaacgaccagaagaagcugaugagcaacaacgugcagaucgugagacagcagagcuacagcaucaugugcaucaucaaggaggaggugcuggccuacguggugcagcugccccuguacggcgugaucgacacccccugcuggaagcugcacaccagcccccugugcaccaccaacaccaaggagggcagcaacaucugccugaccagaaccgacagaggcugguacugcgacaacgccggcagcgugagcuucuucccccaggccgagaccugcaaggugcagagcaacagaguguucugcgacaccaugaacagccugacccugcccagcgaggugaaccugugcaacaucgacaucuucaaccccaaguacgacugcaagaucaugaccagcaagaccgacgugagcagcagcgugaucaccagccugggcgccaucgugagcugcuacggcaagaccaagugcaccgccagcaacaagaacagaggcaucaucaagaccuucagcaacggcugcgacuacgugagcaacaagggcguggacaccgugagcgugggcaacacccuguacugcgugaacaagcaggagggccagagccuguacgugaagggcgagcccaucaucaacuucuacgacccccugguguuccccagcgacgaguucgacgccagcaucagccaggugaacgagaagaucaaccagagccuggccuucaucagaaagagcgacgagcugcugcacaacgugaacgugggcaagagcaccaccaacaucaugaucaccaccaucaucaucgugaucaucgugauccugcugcugcugaucgccgugggccuguuccuguacugcaaggccagaugaggacuaguacuggcugcaucucccuuuccucuguccuccauccuucucccaggauggugaagggggaccugguacccagugauccccaccccaggauccuaaaucaugacuuaccugcuaauaaaaacucauuggaaaagugagaagaucuaaaaaaaaaaaaaaaaaaaaaaaaaaaaaaaaaaaaaaaaaaaaaaaaaaaaaaaaaaaaaaaaugcaucccccccccccccccccccccccccccccccaaaggcucuuuucagagccaccagaauu

SEQ ID NO: 15285 - RNA, 1901 nt, Artificial Sequence
  mRNA product Design f-3 comprising derived and/or modified sequence from HRSV(Memphis-37)__AIY60640.1__F-del_DSCav1_mut2 (opt5)
gggagagucccgcagucggcguccagcggcucugcuuguucgugugugugucguugcaggccuuauucaagcuuaccauggagcugcccauccucaagaccaacgccauuacaacgauccuggcugccgugacccuuugcuucgcgagcucccagaauauuacagaagaguuuuaccaaucuaccuguagcgcugucuccaaaggcuaucugggggcccucagaacaggaugguacaccucuguuaucacaauugaacugagcaacaucaaggagaauaaaugcaacggcaccgacgccaaggugaaacuuaucaagcaggaacuggauaaguauaaaaaugcugugacggaccuccagcugcugaugcaguccaccccugccgcugggucuggaagcgccauuuguuccggcaucgcggucugcaaggugcuccaccuggagggggagguuaacaaaauuaagaaugcccuucugagcacaaacaaagcuguggucucucucuccaauggagugagcguucugaccuucaaggugcuugaucugaagaacuacaucgacaaacaacuccugccgauucugaauaagcagucuuguuccauccccaacauugaaacagucaucgaguuucagcagaaaaauaaccggcuccuggaaaucacccgcgaguucagcgugaaugccggcgugacgacaccugucucuaccuauaugcuuacaaacuccgagcugcucagccugauuaacgauaugcccaucaccaaugaccaaaagaaacuuauguccaacaauguucagauugugagacagcagucuuacagcaucaugugcauuaucaaggaagaggugcuggcuuaugucgugcaacucccucuguacggcguuaucgauacccccuguuggaaacugcauacauccccucucugcacgaccaacacaaaggaagggagcaauauuugucugacccggacagaccgcggaugguacugcgauaacgccggcucuguguccuuuuucccgcaggcggagaccuguaagguccagagcaauagaguguuuugcgacacgaugaacucucuuacacugcccagcgaaguuaaucucugcaacaucgauauuuucaauccuaaauaugacuguaagaucaugaccuccaaaaccgaugugucuagcuccgucauuacaagccugggggccaucgugucuugcuacggaaagaccaaauguacagcuuccaacaagaaucggggcaucauuaagacguuuagcaacgggugcgacuaugucucuaauaaaggaguggacaccguuuccgugggcaacacacuuuacugugucaacaagcaagagggccagagccuguaugugaaaggggagcccaucauuaauuucuacgauccucucguuuuucccuccgacgaguucgaugccucuaucagccaggugaacgaaaagauuaaucagucccuggcuuuuauccgcaaaucugacgaacugcuccacaacgucaaugugggaaagagcaccacaaacauuaugaucaccacgaucauuaucgugauuaucguuauucugcuucugcucaucgccgucggccuguuccuguauugcaaggccagaugaggacuaguacuggcugcaucucccuuuccucuguccuccauccuucucccaggauggugaagggggaccugguacccagugauccccaccccaggauccuaaaucaugacuuaccugcuaauaaaaacucauuggaaaagugagaagaucuaaaaaaaaaaaaaaaaaaaaaaaaaaaaaaaaaaaaaaaaaaaaaaaaaaaaaaaaaaaaaaaaugcaucccccccccccccccccccccccccccccccaaaggcucuuuucagagccaccagaauu

SEQ ID NO: 15286 - RNA, 1901 nt, Artificial Sequence
  mRNA product Design f-3 comprising derived and/or modified sequence from HRSV(Memphis-37)__AIY60640.1__F-del_DSCav1_mut2 (opt6)
gggagagucccgcagucggcguccagcggcucugcuuguucgugugugugucguugcaggccuuauucaagcuuaccauggaacuaccaauacucaaaacaaacgcaauaacaacaauuuuagcugcaguaacacuuuguuucgcauccucccaaaauauaacagaagaauuuuaucaaucaaccugcucagccgucuccaaaggauaucuaggugcacuacgcacuggaugguacacaagugucaucacaauagaacuuuccaacaucaaagaaaauaaauguaauggaacugacgcaaaaguaaaacucauaaaacaagaacuagacaaauacaaaaacgcaguaacagaccuacaacuauuaaugcaaucaacaccagcagcaggauccggcagugccauaugcucuggaauagcagucugcaaaguuuuacacuuagaaggcgaaguaaacaaaaucaaaaacgcccuacuaucuacaaauaaagccgucguaucucucucaaauggaguaucaguacuaacauucaaaguauuagacuuaaaaaacuacaucgauaaacaauuauugccaauauuaaacaaacaaucuugcucaauaccaaauauagaaacagucauagaauuucaacaaaaaaauaaccgauuauuagaaauaacacgagaauuuucaguaaaugccggagucaccacaccaguaucaacauacaugcuaacaaauucagaacuauuaucauuaauaaacgacaugccuauuacaaaugaucaaaaaaaacuaauguccaacaauguacaaauaguccgacaacaaagcuacucaaucauguguauaauaaaagaagaaguacuugcauacguaguacaauuaccacuauacggaguuaucgacacaccaugcuggaaacuccacacuucaccacucugcaccacaaacacaaaagaaggcucaaacauaugccuaacaagaacagaccgaggaugguacugcgacaacgcaggaucaguaucauucuucccacaagcagaaacuugcaaaguacaaucuaacagaguuuucugugacaccaugaauagccuaacacuccccuccgaaguuaaccuauguaacauagauauauuuaaucccaaauaugauugcaaaaucaugacaucuaaaaccgacguaucaucaucuguaaucacaucacuaggugccauagucucaugcuacggcaaaacaaaaugcaccgccucaaacaaaaaccgagguauaauaaaaaccuucaguaauggaugugacuacguaucaaacaaagguguugauaccguaagcgucggcaacacccuauacugcguaaauaaacaagaaggccaaucacuauacgucaaaggcgaaccaauuauuaacuucuaugacccacucgucuuucccuccgacgaauuugacgcaagcauaucacaaguaaacgaaaaaauaaaccaaucacuagcauucauacgcaaaucagaugaacuacuacauaacguaaacguaggaaaauccacuacaaauauaaugaucacaacaauaauaaucguaauuauagucauauuauuacuacuaauagcaguaggacuuuuccuauacuguaaagcaagauaaggacuaguacuggcugcaucucccuuuccucuguccuccauccuucucccaggauggugaagggggaccugguacccagugauccccaccccaggauccuaaaucaugacuuaccugcuaauaaaaacucauuggaaaagugagaagaucuaaaaaaaaaaaaaaaaaaaaaaaaaaaaaaaaaaaaaaaaaaaaaaaaaaaaaaaaaaaaaaaaugcaucccccccccccccccccccccccccccccccaaaggcucuuuucagagccaccagaauu

SEQ ID NO: 15287 - RNA, 1901 nt, Artificial Sequence
  mRNA product Design f-3 comprising derived and/or modified sequence from HRSV(Memphis-37)__AIY60640.1__F-del_DSCav1_mut2 (opt11)
gggagagucccgcagucggcguccagcggcucugcuuguucgugugugugucguugcaggccuuauucaagcuuaccauggaacuucccauccucaagaccaacgcuauuacgaccauccucgccgcagucacccucugcuucgcgucaucccaaaacaucaccgaagaauuuuaccaauccacaugcuccgcagucucaaaaggcuaccuaggagcccuacgcaccggaugguacacauccgucaucacaaucgaacucuccaacauaaaagaaaacaaaugcaacggcaccgaugccaaaguaaaacugauuaaacaagaacucgacaaauacaagaacgccgucacagaccuacagcuccucaugcaaucaacucccgccgccggcagcggauccgcuaucugcucaggcaucgccguaugcaaaguccuccaccuagaaggcgaaguaaacaaaaucaagaacgcacuacucucaacaaacaaagccgucgucucccucuccaacggcgucuccguccuuaccuucaaaguccucgaccuuaagaacuacauugacaaacaacuccuacccauccucaacaaacaauccugcucuauaccuaauauagaaaccguaaucgaauuucaacagaaaaacaaccgccuccucgaaauuacccgcgaguucucaguaaacgccggcguaaccacccccgucuccaccuacaugcucacaaauucagaacuccucagccucaucaacgacaugcccauaaccaacgaccaaaagaaacucaugucaaacaacguccaaaucgucaggcaacaaagcuacagcaucaugugcaucauuaaagaagaaguacucgccuacgucgugcaacuaccccucuacggcgucauagacacacccugcuggaaacuucacacaucaccgcucugcaccacaaacaccaaagaaggcaguaacauaugccucacccgaaccgaccgcggaugguacugcgacaacgccggauccgucagcuucuucccacaagccgaaaccugcaaaguacaauccaaccgagucuucugcgacaccaugaacucucuuacgcuccccucagaagucaaccuaugcaacaucgacaucuucaaccccaaauacgacugcaaaaucaugaccuccaaaacagacgucuccuccucagugauaaccucccucggcgccauugucuccugcuacggcaaaaccaaaugcaccgccuccaacaaaaaccgugggaucaucaaaaccuucucaaacggcugcgacuacguauccaauaagggugucgacacagucuccguaggcaauacccucuauugcgucaacaaacaagaaggccaaucccucuacgucaaaggcgaaccuaucaucaacuucuacgacccgcuagucuuccccucagacgaguucgacgcauccaucucacaagucaacgaaaagaucaaccagucccucgcauucauccgaaaauccgacgaacuucuccacaacguuaacgucggcaaauccaccacuaacauaaugaucaccacgaucaucauaguaauuaucgucauacuccuccuccuaaucgcugucggacucuuccucuacugcaaggcccgcuaaggacuaguacuggcugcaucucccuuuccucuguccuccauccuucucccaggauggugaagggggaccugguacccagugauccccaccccaggauccuaaaucaugacuuaccugcuaauaaaaacucauuggaaaagugagaagaucuaaaaaaaaaaaaaaaaaaaaaaaaaaaaaaaaaaaaaaaaaaaaaaaaaaaaaaaaaaaaaaaaugcaucccccccccccccccccccccccccccccccaaaggcucuuuucagagccaccagaauu

SEQ ID NO: 15288 - RNA, 2117 nt, Artificial Sequence
  mRNA product Design f-4 comprising derived and/or modified sequence from HRSV(Memphis-37)__AIY60640.1__F-del_DSCav1_mut2 (opt1)
gggagagucccgcagucggcguccagcggcucugcuuguucgugugugugucguugcaggccuuauucaagcuuaccauggagcugcccauccucaagaccaacgccaucaccacgauccuggccgcggugacccugugcuucgccagcucccagaacaucaccgaggaguucuaccagagcacgugcuccgccgucagcaagggcuaccucggcgcccugcgcaccgggugguacaccagcgugaucaccaucgagcuguccaacaucaaggagaacaagugcaacggcaccgacgccaaggugaagcucaucaagcaggagcuggacaaguacaagaacgcggucacggaccugcagcuccugaugcagagcaccccggccgccggcuccgggagcgcgaucugcuccggcaucgccgucugcaaggugcugcaccucgagggcgaggugaacaagaucaagaacgcccugcuguccaccaacaaggccgucgugagccucuccaacggggugagcguccugaccuucaaggugcuggaccucaagaacuacaucgacaagcagcugcugcccauccugaacaagcagagcugcuccauccccaacaucgagaccgucaucgaguuccagcagaagaacaaccgccuccuggagaucacgcgggaguucagcgugaacgcgggcgugaccacccccgucuccaccuacaugcugacgaacagcgagcuccugucccugaucaacgacaugccgaucaccaacgaccagaagaagcucaugagcaacaacgugcagaucgugcgccagcaguccuacagcaucaugugcaucaucaaggaggagguccuggccuacguggugcagcugccccucuacggggucaucgacacccccugcuggaagcugcacaccagcccccugugcacgaccaacaccaaggagggcuccaacaucugccucacccggacggaccgcgggugguacugcgacaacgccggcagcguguccuucuucccgcaggccgagaccugcaagguccagagcaaccggguguucugcgacaccaugaacucccugacccugcccagcgaggugaaccucugcaacaucgacaucuucaaccccaaguacgacugcaagaucaugacguccaagaccgacgucagcuccagcgugaucaccucccugggcgccaucgugagcugcuacgggaagaccaagugcacggcgagcaacaagaaccgcggcaucaucaagaccuucuccaacgggugcgacuacgucagcaacaagggcguggacaccguguccgucggcaacacccuguacugcgugaacaagcaggagggccagagccucuacgugaagggggagcccaucaucaacuucuacgacccgcuggucuuccccuccgacgaguucgacgccagcaucucccaggugaacgagaagaucaaccagagccuggccuucauccggaaguccgacgagcuccugcacaacgugaacgucggcaagagcaccacgaacaucaugaucaccaccaucaucaucgugaucaucgugauccugcugcuccugaucgccgucgggcuguuccucuacugcaaggcccgcugaggacuagugaagggaacacccaaauuuaauucagccuuaagcacaauuaauuaagagugaaacguaauuguacaagcaguuggucacccaccauagggcaugaucaacaccgcaaccuuuccuuuuucccccagugauucugaaaaaccccucuucccuucagcuugcuuagauguuccaaauuuaguaagcuuaaggcggccuacagaagaaaaagaaaaaaaaggccacaaaaguucccucucacuuucaguaaauaaaauaaaagcagcaacagaaauaaagaaauaaaugaaauucaaaaugaaauaaauauuguguugugcagcauuaaaaaaucaauaaaaauuaaaaaugagcaagaucuaaaaaaaaaaaaaaaaaaaaaaaaaaaaaaaaaaaaaaaaaaaaaaaaaaaaaaaaaaaaaaaaugcaucccccccccccccccccccccccccccccccaaaggcucuuuucagagccaccagaauu

SEQ ID NO: 15289 - RNA, 2117 nt, Artificial Sequence
  mRNA product Design f-4 comprising derived and/or modified sequence from HRSV(Memphis-37)__AIY60640.1__F-del_DSCav1_mut2 (opt1)
gggagagucccgcagucggcguccagcggcucugcuuguucgugugugugucguugcaggccuuauucaagcuuaccauggagcugcccauccucaagaccaacgccaucaccacgauccuggccgcggugacccugugcuucgccagcucccagaacaucaccgaggaguucuaccagagcacgugcuccgccgucagcaagggcuaccucggggcccugcgcaccggcugguacaccuccgugaucaccaucgagcugagcaacaucaaggagaacaagugcaacgggaccgacgccaaggugaagcucaucaagcaggagcuggacaaguacaagaacgcggucacggaccugcagcuccugaugcaguccaccccggccgccggcagcggguccgccaucugcagcggcaucgcggugugcaaggugcugcaccucgagggcgaggucaacaagaucaagaacgcccugcuguccaccaacaaggccguggugagccucuccaacggggucagcgugcugaccuucaaggugcuggaccucaagaacuacaucgacaagcagcugcugcccauccucaacaagcaguccugcagcauccccaacaucgagacggucaucgaguuccagcagaagaacaaccggcugcuggagaucacccgcgaguucuccgugaacgccggcgugaccacccccgucagcacguacaugcucaccaacuccgagcugcugagccucaucaacgacaugccgaucaccaacgaccagaagaagcugaugagcaacaacgugcagaucgugcggcagcaguccuacagcaucaugugcaucaucaaggaggagguccuggccuacguggugcagcucccccuguacggggucaucgacacccccugcuggaagcugcacacgagcccccucugcaccaccaacaccaaggagggcuccaacaucugccugacgcgcaccgaccgggggugguacugcgacaacgcgggcuccgugagcuucuucccgcaggccgagaccugcaaggugcaguccaaccgcgucuucugcgacaccaugaacagccugacgcuccccuccgaggugaaccugugcaacaucgacaucuucaaccccaaguacgacugcaagaucaugaccagcaagaccgacgucuccagcuccgugaucaccagccugggcgccaucguguccugcuacgggaagacgaagugcaccgccagcaacaagaaccggggcaucaucaagaccuucuccaacgggugcgacuacgucagcaacaagggcguggacaccguguccgucggcaacacgcucuacugcgugaacaagcaggaggggcagagccuguacgugaagggcgagcccaucaucaacuucuacgacccgcuggucuuccccagcgacgaguucgacgccuccaucagccaggugaacgagaagaucaaccagucccucgcguucauccgcaagagcgacgagcugcugcacaacgugaacgucgggaaguccaccaccaacaucaugaucaccaccaucaucaucgugaucaucgugauccuccugcugcucaucgccgucggccuguuccuguacugcaaggcccggugaggacuagugaagggaacacccaaauuuaauucagccuuaagcacaauuaauuaagagugaaacguaauuguacaagcaguuggucacccaccauagggcaugaucaacaccgcaaccuuuccuuuuucccccagugauucugaaaaaccccucuucccuucagcuugcuuagauguuccaaauuuaguaagcuuaaggcggccuacagaagaaaaagaaaaaaaaggccacaaaaguucccucucacuuucaguaaauaaaauaaaagcagcaacagaaauaaagaaauaaaugaaauucaaaaugaaauaaauauuguguugugcagcauuaaaaaaucaauaaaaauuaaaaaugagcaagaucuaaaaaaaaaaaaaaaaaaaaaaaaaaaaaaaaaaaaaaaaaaaaaaaaaaaaaaaaaaaaaaaaugcaucccccccccccccccccccccccccccccccaaaggcucuuuucagagccaccagaauu

SEQ ID NO: 15290 - RNA, 2117 nt, Artificial Sequence
  mRNA product Design f-4 comprising derived and/or modified sequence from HRSV(Memphis-37)__AIY60640.1__F-del_DSCav1_mut2 (opt2)
gggagagucccgcagucggcguccagcggcucugcuuguucgugugugugucguugcaggccuuauucaagcuuaccauggagcuccccauccucaagaccaacgccaucaccaccauccucgccgccgucacccucugcuucgccuccucccagaacaucaccgaggaguucuaccaguccaccugcuccgccgucuccaagggcuaccucggcgcccuccgcaccggcugguacaccuccgucaucaccaucgagcucuccaacaucaaggagaacaagugcaacggcaccgacgccaaggucaagcucaucaagcaggagcucgacaaguacaagaacgccgucaccgaccuccagcuccucaugcaguccacccccgccgccggcuccggcuccgccaucugcuccggcaucgccgucugcaagguccuccaccucgagggcgaggucaacaagaucaagaacgcccuccucuccaccaacaaggccgucgucucccucuccaacggcgucuccguccucaccuucaagguccucgaccucaagaacuacaucgacaagcagcuccuccccauccucaacaagcaguccugcuccauccccaacaucgagaccgucaucgaguuccagcagaagaacaaccgccuccucgagaucacccgcgaguucuccgucaacgccggcgucaccacccccgucuccaccuacaugcucaccaacuccgagcuccucucccucaucaacgacaugcccaucaccaacgaccagaagaagcucauguccaacaacguccagaucguccgccagcaguccuacuccaucaugugcaucaucaaggaggagguccucgccuacgucguccagcucccccucuacggcgucaucgacacccccugcuggaagcuccacaccuccccccucugcaccaccaacaccaaggagggcuccaacaucugccucacccgcaccgaccgcggcugguacugcgacaacgccggcuccgucuccuucuucccccaggccgagaccugcaagguccaguccaaccgcgucuucugcgacaccaugaacucccucacccuccccuccgaggucaaccucugcaacaucgacaucuucaaccccaaguacgacugcaagaucaugaccuccaagaccgacgucuccuccuccgucaucaccucccucggcgccaucgucuccugcuacggcaagaccaagugcaccgccuccaacaagaaccgcggcaucaucaagaccuucuccaacggcugcgacuacgucuccaacaagggcgucgacaccgucuccgucggcaacacccucuacugcgucaacaagcaggagggccagucccucuacgucaagggcgagcccaucaucaacuucuacgacccccucgucuuccccuccgacgaguucgacgccuccaucucccaggucaacgagaagaucaaccagucccucgccuucauccgcaaguccgacgagcuccuccacaacgucaacgucggcaaguccaccaccaacaucaugaucaccaccaucaucaucgucaucaucgucauccuccuccuccucaucgccgucggccucuuccucuacugcaaggcccgcugaggacuagugaagggaacacccaaauuuaauucagccuuaagcacaauuaauuaagagugaaacguaauuguacaagcaguuggucacccaccauagggcaugaucaacaccgcaaccuuuccuuuuucccccagugauucugaaaaaccccucuucccuucagcuugcuuagauguuccaaauuuaguaagcuuaaggcggccuacagaagaaaaagaaaaaaaaggccacaaaaguucccucucacuuucaguaaauaaaauaaaagcagcaacagaaauaaagaaauaaaugaaauucaaaaugaaauaaauauuguguugugcagcauuaaaaaaucaauaaaaauuaaaaaugagcaagaucuaaaaaaaaaaaaaaaaaaaaaaaaaaaaaaaaaaaaaaaaaaaaaaaaaaaaaaaaaaaaaaaaugcaucccccccccccccccccccccccccccccccaaaggcucuuuucagagccaccagaauu

SEQ ID NO: 15291 - RNA, 2117 nt, Artificial Sequence
  mRNA product Design f-4 comprising derived and/or modified sequence from HRSV(Memphis-37)__AIY60640.1__F-del_DSCav1_mut2 (opt3)
gggagagucccgcagucggcguccagcggcucugcuuguucgugugugugucguugcaggccuuauucaagcuuaccauggagcugcccauccucaagaccaacgccauuacaacuauacuugcugcagugacgcugugcuucgccagcucccagaauaucaccgaagaguuuuaccaaucuacauguucagcggucaguaaaggcuauuugggggcuuuaagaacuggaugguacaccagcguuauuacaaucgaacuguccaacauuaaggagaauaaaugcaacgguaccgacgccaaggugaaacuaaucaagcaggaacucgauaaguauaaaaaugcaguaacugaccugcagcuucugaugcagucuacuccugccgcuggcucggggucagcaauauguagcggaaucgccgugugcaaggucuugcaccucgagggcgaggugaacaaaauuaagaaugcucugcugaguaccaacaaagccguugugucccucucuaauggugucagcguguuaacguucaagguacuggaucuuaagaacuacaucgacaaacaauugcugccaauucuaaauaagcaguccuguucaaucccgaacauagaaacuguuauugaguuucagcagaaaaauaacaggcuccuggaaaucacccgggaguucagugugaaugcgggggucacaacucccgugagcaccuauaugcuuacaaacucugagcuguugucccucauuaacgauaugccuaucaccaaugaccaaaagaaacugaugucaaacaaugugcagaucguccgccagcagagcuacaguauuaugugcauaaucaaggaagagguuuuagcauaugugguacaacugccacucuacggagugauugauacgcccuguuggaaacuucauacuucuccucugugcacaaccaacacuaaggaaggcuccaauaucuguuugacacgaaccgaccguggcugguacugcgauaacgccgggagcgucucguuuuucccacaggcugagacguguaaggugcagucuaauagaguuuucugcgacaccaugaacucccuaacacugcccucagaagugaaucucugcaacauagauauuuucaauccuaaauaugacuguaagaucaugacaaguaaaaccgaugucagcuccucugugaucacaagccugggagccauuguaucaugcuacgguaagacuaaauguaccgcaaguaacaagaauaggggcaucauuaagacauuuuccaacgggugcgacuauguuagcaauaaaggaguggacaccgucucugugggcaacacucuuuacugugucaacaagcaagagggucagucacuguaugugaaaggggagccaauaaucaauuucuacgauccguugguuuuucccagugacgaauuugaugcuagcauuucccaggugaacgagaagaucaaucagucucucgccuuuauccggaaaucggacgaacuguuacacaacguaaaugucggaaagagcacgacaaacauuaugauaaccacuaucauuaucgugauuaucguuauacugcuacuccugaucgcggugggccuuuucuuguauugcaaggcccgcugaggacuagugaagggaacacccaaauuuaauucagccuuaagcacaauuaauuaagagugaaacguaauuguacaagcaguuggucacccaccauagggcaugaucaacaccgcaaccuuuccuuuuucccccagugauucugaaaaaccccucuucccuucagcuugcuuagauguuccaaauuuaguaagcuuaaggcggccuacagaagaaaaagaaaaaaaaggccacaaaaguucccucucacuuucaguaaauaaaauaaaagcagcaacagaaauaaagaaauaaaugaaauucaaaaugaaauaaauauuguguugugcagcauuaaaaaaucaauaaaaauuaaaaaugagcaagaucuaaaaaaaaaaaaaaaaaaaaaaaaaaaaaaaaaaaaaaaaaaaaaaaaaaaaaaaaaaaaaaaaugcaucccccccccccccccccccccccccccccccaaaggcucuuuucagagccaccagaauu

SEQ ID NO: 15292 - RNA, 2117 nt, Artificial Sequence
  mRNA product Design f-4 comprising derived and/or modified sequence from HRSV(Memphis-37)__AIY60640.1__F-del_DSCav1_mut2 (opt4)
gggagagucccgcagucggcguccagcggcucugcuuguucgugugugugucguugcaggccuuauucaagcuuaccauggagcugcccauccugaagaccaacgccaucaccaccauccuggccgccgugacccugugcuucgccagcagccagaacaucaccgaggaguucuaccagagcaccugcagcgccgugagcaagggcuaccugggcgcccugagaaccggcugguacaccagcgugaucaccaucgagcugagcaacaucaaggagaacaagugcaacggcaccgacgccaaggugaagcugaucaagcaggagcuggacaaguacaagaacgccgugaccgaccugcagcugcugaugcagagcacccccgccgccggcagcggcagcgccaucugcagcggcaucgccgugugcaaggugcugcaccuggagggcgaggugaacaagaucaagaacgcccugcugagcaccaacaaggccguggugagccugagcaacggcgugagcgugcugaccuucaaggugcuggaccugaagaacuacaucgacaagcagcugcugcccauccugaacaagcagagcugcagcauccccaacaucgagaccgugaucgaguuccagcagaagaacaacagacugcuggagaucaccagagaguucagcgugaacgccggcgugaccacccccgugagcaccuacaugcugaccaacagcgagcugcugagccugaucaacgacaugcccaucaccaacgaccagaagaagcugaugagcaacaacgugcagaucgugagacagcagagcuacagcaucaugugcaucaucaaggaggaggugcuggccuacguggugcagcugccccuguacggcgugaucgacacccccugcuggaagcugcacaccagcccccugugcaccaccaacaccaaggagggcagcaacaucugccugaccagaaccgacagaggcugguacugcgacaacgccggcagcgugagcuucuucccccaggccgagaccugcaaggugcagagcaacagaguguucugcgacaccaugaacagccugacccugcccagcgaggugaaccugugcaacaucgacaucuucaaccccaaguacgacugcaagaucaugaccagcaagaccgacgugagcagcagcgugaucaccagccugggcgccaucgugagcugcuacggcaagaccaagugcaccgccagcaacaagaacagaggcaucaucaagaccuucagcaacggcugcgacuacgugagcaacaagggcguggacaccgugagcgugggcaacacccuguacugcgugaacaagcaggagggccagagccuguacgugaagggcgagcccaucaucaacuucuacgacccccugguguuccccagcgacgaguucgacgccagcaucagccaggugaacgagaagaucaaccagagccuggccuucaucagaaagagcgacgagcugcugcacaacgugaacgugggcaagagcaccaccaacaucaugaucaccaccaucaucaucgugaucaucgugauccugcugcugcugaucgccgugggccuguuccuguacugcaaggccagaugaggacuagugaagggaacacccaaauuuaauucagccuuaagcacaauuaauuaagagugaaacguaauuguacaagcaguuggucacccaccauagggcaugaucaacaccgcaaccuuuccuuuuucccccagugauucugaaaaaccccucuucccuucagcuugcuuagauguuccaaauuuaguaagcuuaaggcggccuacagaagaaaaagaaaaaaaaggccacaaaaguucccucucacuuucaguaaauaaaauaaaagcagcaacagaaauaaagaaauaaaugaaauucaaaaugaaauaaauauuguguugugcagcauuaaaaaaucaauaaaaauuaaaaaugagcaagaucuaaaaaaaaaaaaaaaaaaaaaaaaaaaaaaaaaaaaaaaaaaaaaaaaaaaaaaaaaaaaaaaaugcaucccccccccccccccccccccccccccccccaaaggcucuuuucagagccaccagaauu

SEQ ID NO: 15293 - RNA, 2117 nt, Artificial Sequence
  mRNA product Design f-4 comprising derived and/or modified sequence from HRSV(Memphis-37)__AIY60640.1__F-del_DSCav1_mut2 (opt5)
gggagagucccgcagucggcguccagcggcucugcuuguucgugugugugucguugcaggccuuauucaagcuuaccauggagcugcccauccucaagaccaacgccauuacaacgauccuggcugccgugacccuuugcuucgcgagcucccagaauauuacagaagaguuuuaccaaucuaccuguagcgcugucuccaaaggcuaucugggggcccucagaacaggaugguacaccucuguuaucacaauugaacugagcaacaucaaggagaauaaaugcaacggcaccgacgccaaggugaaacuuaucaagcaggaacuggauaaguauaaaaaugcugugacggaccuccagcugcugaugcaguccaccccugccgcugggucuggaagcgccauuuguuccggcaucgcggucugcaaggugcuccaccuggagggggagguuaacaaaauuaagaaugcccuucugagcacaaacaaagcuguggucucucucuccaauggagugagcguucugaccuucaaggugcuugaucugaagaacuacaucgacaaacaacuccugccgauucugaauaagcagucuuguuccauccccaacauugaaacagucaucgaguuucagcagaaaaauaaccggcuccuggaaaucacccgcgaguucagcgugaaugccggcgugacgacaccugucucuaccuauaugcuuacaaacuccgagcugcucagccugauuaacgauaugcccaucaccaaugaccaaaagaaacuuauguccaacaauguucagauugugagacagcagucuuacagcaucaugugcauuaucaaggaagaggugcuggcuuaugucgugcaacucccucuguacggcguuaucgauacccccuguuggaaacugcauacauccccucucugcacgaccaacacaaaggaagggagcaauauuugucugacccggacagaccgcggaugguacugcgauaacgccggcucuguguccuuuuucccgcaggcggagaccuguaagguccagagcaauagaguguuuugcgacacgaugaacucucuuacacugcccagcgaaguuaaucucugcaacaucgauauuuucaauccuaaauaugacuguaagaucaugaccuccaaaaccgaugugucuagcuccgucauuacaagccugggggccaucgugucuugcuacggaaagaccaaauguacagcuuccaacaagaaucggggcaucauuaagacguuuagcaacgggugcgacuaugucucuaauaaaggaguggacaccguuuccgugggcaacacacuuuacugugucaacaagcaagagggccagagccuguaugugaaaggggagcccaucauuaauuucuacgauccucucguuuuucccuccgacgaguucgaugccucuaucagccaggugaacgaaaagauuaaucagucccuggcuuuuauccgcaaaucugacgaacugcuccacaacgucaaugugggaaagagcaccacaaacauuaugaucaccacgaucauuaucgugauuaucguuauucugcuucugcucaucgccgucggccuguuccuguauugcaaggccagaugaggacuagugaagggaacacccaaauuuaauucagccuuaagcacaauuaauuaagagugaaacguaauuguacaagcaguuggucacccaccauagggcaugaucaacaccgcaaccuuuccuuuuucccccagugauucugaaaaaccccucuucccuucagcuugcuuagauguuccaaauuuaguaagcuuaaggcggccuacagaagaaaaagaaaaaaaaggccacaaaaguucccucucacuuucaguaaauaaaauaaaagcagcaacagaaauaaagaaauaaaugaaauucaaaaugaaauaaauauuguguugugcagcauuaaaaaaucaauaaaaauuaaaaaugagcaagaucuaaaaaaaaaaaaaaaaaaaaaaaaaaaaaaaaaaaaaaaaaaaaaaaaaaaaaaaaaaaaaaaaugcaucccccccccccccccccccccccccccccccaaaggcucuuuucagagccaccagaauu

SEQ ID NO: 15294 - RNA, 2117 nt, Artificial Sequence
  mRNA product Design f-4 comprising derived and/or modified sequence from HRSV(Memphis-37)__AIY60640.1__F-del_DSCav1_mut2 (opt6)
gggagagucccgcagucggcguccagcggcucugcuuguucgugugugugucguugcaggccuuauucaagcuuaccauggaacuaccaauacucaaaacaaacgcaauaacaacaauuuuagcugcaguaacacuuuguuucgcauccucccaaaauauaacagaagaauuuuaucaaucaaccugcucagccgucuccaaaggauaucuaggugcacuacgcacuggaugguacacaagugucaucacaauagaacuuuccaacaucaaagaaaauaaauguaauggaacugacgcaaaaguaaaacucauaaaacaagaacuagacaaauacaaaaacgcaguaacagaccuacaacuauuaaugcaaucaacaccagcagcaggauccggcagugccauaugcucuggaauagcagucugcaaaguuuuacacuuagaaggcgaaguaaacaaaaucaaaaacgcccuacuaucuacaaauaaagccgucguaucucucucaaauggaguaucaguacuaacauucaaaguauuagacuuaaaaaacuacaucgauaaacaauuauugccaauauuaaacaaacaaucuugcucaauaccaaauauagaaacagucauagaauuucaacaaaaaaauaaccgauuauuagaaauaacacgagaauuuucaguaaaugccggagucaccacaccaguaucaacauacaugcuaacaaauucagaacuauuaucauuaauaaacgacaugccuauuacaaaugaucaaaaaaaacuaauguccaacaauguacaaauaguccgacaacaaagcuacucaaucauguguauaauaaaagaagaaguacuugcauacguaguacaauuaccacuauacggaguuaucgacacaccaugcuggaaacuccacacuucaccacucugcaccacaaacacaaaagaaggcucaaacauaugccuaacaagaacagaccgaggaugguacugcgacaacgcaggaucaguaucauucuucccacaagcagaaacuugcaaaguacaaucuaacagaguuuucugugacaccaugaauagccuaacacuccccuccgaaguuaaccuauguaacauagauauauuuaaucccaaauaugauugcaaaaucaugacaucuaaaaccgacguaucaucaucuguaaucacaucacuaggugccauagucucaugcuacggcaaaacaaaaugcaccgccucaaacaaaaaccgagguauaauaaaaaccuucaguaauggaugugacuacguaucaaacaaagguguugauaccguaagcgucggcaacacccuauacugcguaaauaaacaagaaggccaaucacuauacgucaaaggcgaaccaauuauuaacuucuaugacccacucgucuuucccuccgacgaauuugacgcaagcauaucacaaguaaacgaaaaaauaaaccaaucacuagcauucauacgcaaaucagaugaacuacuacauaacguaaacguaggaaaauccacuacaaauauaaugaucacaacaauaauaaucguaauuauagucauauuauuacuacuaauagcaguaggacuuuuccuauacuguaaagcaagauaaggacuagugaagggaacacccaaauuuaauucagccuuaagcacaauuaauuaagagugaaacguaauuguacaagcaguuggucacccaccauagggcaugaucaacaccgcaaccuuuccuuuuucccccagugauucugaaaaaccccucuucccuucagcuugcuuagauguuccaaauuuaguaagcuuaaggcggccuacagaagaaaaagaaaaaaaaggccacaaaaguucccucucacuuucaguaaauaaaauaaaagcagcaacagaaauaaagaaauaaaugaaauucaaaaugaaauaaauauuguguugugcagcauuaaaaaaucaauaaaaauuaaaaaugagcaagaucuaaaaaaaaaaaaaaaaaaaaaaaaaaaaaaaaaaaaaaaaaaaaaaaaaaaaaaaaaaaaaaaaugcaucccccccccccccccccccccccccccccccaaaggcucuuuucagagccaccagaauu

SEQ ID NO: 15295 - RNA, 2117 nt, Artificial Sequence
  mRNA product Design f-4 comprising derived and/or modified sequence from HRSV(Memphis-37)__AIY60640.1__F-del_DSCav1_mut2 (opt11)
gggagagucccgcagucggcguccagcggcucugcuuguucgugugugugucguugcaggccuuauucaagcuuaccauggaacuucccauccucaagaccaacgcuauuacgaccauccucgccgcagucacccucugcuucgcgucaucccaaaacaucaccgaagaauuuuaccaauccacaugcuccgcagucucaaaaggcuaccuaggagcccuacgcaccggaugguacacauccgucaucacaaucgaacucuccaacauaaaagaaaacaaaugcaacggcaccgaugccaaaguaaaacugauuaaacaagaacucgacaaauacaagaacgccgucacagaccuacagcuccucaugcaaucaacucccgccgccggcagcggauccgcuaucugcucaggcaucgccguaugcaaaguccuccaccuagaaggcgaaguaaacaaaaucaagaacgcacuacucucaacaaacaaagccgucgucucccucuccaacggcgucuccguccuuaccuucaaaguccucgaccuuaagaacuacauugacaaacaacuccuacccauccucaacaaacaauccugcucuauaccuaauauagaaaccguaaucgaauuucaacagaaaaacaaccgccuccucgaaauuacccgcgaguucucaguaaacgccggcguaaccacccccgucuccaccuacaugcucacaaauucagaacuccucagccucaucaacgacaugcccauaaccaacgaccaaaagaaacucaugucaaacaacguccaaaucgucaggcaacaaagcuacagcaucaugugcaucauuaaagaagaaguacucgccuacgucgugcaacuaccccucuacggcgucauagacacacccugcuggaaacuucacacaucaccgcucugcaccacaaacaccaaagaaggcaguaacauaugccucacccgaaccgaccgcggaugguacugcgacaacgccggauccgucagcuucuucccacaagccgaaaccugcaaaguacaauccaaccgagucuucugcgacaccaugaacucucuuacgcuccccucagaagucaaccuaugcaacaucgacaucuucaaccccaaauacgacugcaaaaucaugaccuccaaaacagacgucuccuccucagugauaaccucccucggcgccauugucuccugcuacggcaaaaccaaaugcaccgccuccaacaaaaaccgugggaucaucaaaaccuucucaaacggcugcgacuacguauccaauaagggugucgacacagucuccguaggcaauacccucuauugcgucaacaaacaagaaggccaaucccucuacgucaaaggcgaaccuaucaucaacuucuacgacccgcuagucuuccccucagacgaguucgacgcauccaucucacaagucaacgaaaagaucaaccagucccucgcauucauccgaaaauccgacgaacuucuccacaacguuaacgucggcaaauccaccacuaacauaaugaucaccacgaucaucauaguaauuaucgucauacuccuccuccuaaucgcugucggacucuuccucuacugcaaggcccgcuaaggacuagugaagggaacacccaaauuuaauucagccuuaagcacaauuaauuaagagugaaacguaauuguacaagcaguuggucacccaccauagggcaugaucaacaccgcaaccuuuccuuuuucccccagugauucugaaaaaccccucuucccuucagcuugcuuagauguuccaaauuuaguaagcuuaaggcggccuacagaagaaaaagaaaaaaaaggccacaaaaguucccucucacuuucaguaaauaaaauaaaagcagcaacagaaauaaagaaauaaaugaaauucaaaaugaaauaaauauuguguugugcagcauuaaaaaaucaauaaaaauuaaaaaugagcaagaucuaaaaaaaaaaaaaaaaaaaaaaaaaaaaaaaaaaaaaaaaaaaaaaaaaaaaaaaaaaaaaaaaugcaucccccccccccccccccccccccccccccccaaaggcucuuuucagagccaccagaauu

SEQ ID NO: 15296 - RNA, 1893 nt, Artificial Sequence
  mRNA product Design f-5 comprising derived and/or modified sequence from HRSV(Memphis-37)__AIY60640.1__F-del_DSCav1_mut2 (opt1)
gggagacuuucccauucuguagcagaauuugguguugccuguggucuuggucccgcggagaagcuuaccauggagcugcccauccucaagaccaacgccaucaccacgauccuggccgcggugacccugugcuucgccagcucccagaacaucaccgaggaguucuaccagagcacgugcuccgccgucagcaagggcuaccucggcgcccugcgcaccgggugguacaccagcgugaucaccaucgagcuguccaacaucaaggagaacaagugcaacggcaccgacgccaaggugaagcucaucaagcaggagcuggacaaguacaagaacgcggucacggaccugcagcuccugaugcagagcaccccggccgccggcuccgggagcgcgaucugcuccggcaucgccgucugcaaggugcugcaccucgagggcgaggugaacaagaucaagaacgcccugcuguccaccaacaaggccgucgugagccucuccaacggggugagcguccugaccuucaaggugcuggaccucaagaacuacaucgacaagcagcugcugcccauccugaacaagcagagcugcuccauccccaacaucgagaccgucaucgaguuccagcagaagaacaaccgccuccuggagaucacgcgggaguucagcgugaacgcgggcgugaccacccccgucuccaccuacaugcugacgaacagcgagcuccugucccugaucaacgacaugccgaucaccaacgaccagaagaagcucaugagcaacaacgugcagaucgugcgccagcaguccuacagcaucaugugcaucaucaaggaggagguccuggccuacguggugcagcugccccucuacggggucaucgacacccccugcuggaagcugcacaccagcccccugugcacgaccaacaccaaggagggcuccaacaucugccucacccggacggaccgcgggugguacugcgacaacgccggcagcguguccuucuucccgcaggccgagaccugcaagguccagagcaaccggguguucugcgacaccaugaacucccugacccugcccagcgaggugaaccucugcaacaucgacaucuucaaccccaaguacgacugcaagaucaugacguccaagaccgacgucagcuccagcgugaucaccucccugggcgccaucgugagcugcuacgggaagaccaagugcacggcgagcaacaagaaccgcggcaucaucaagaccuucuccaacgggugcgacuacgucagcaacaagggcguggacaccguguccgucggcaacacccuguacugcgugaacaagcaggagggccagagccucuacgugaagggggagcccaucaucaacuucuacgacccgcuggucuuccccuccgacgaguucgacgccagcaucucccaggugaacgagaagaucaaccagagccuggccuucauccggaaguccgacgagcuccugcacaacgugaacgucggcaagagcaccacgaacaucaugaucaccaccaucaucaucgugaucaucgugauccugcugcuccugaucgccgucgggcuguuccucuacugcaaggcccgcugaggacuaguacuggcugcaucucccuuuccucuguccuccauccuucucccaggauggugaagggggaccugguacccagugauccccaccccaggauccuaaaucaugacuuaccugcuaauaaaaacucauuggaaaagugagaagaucuaaaaaaaaaaaaaaaaaaaaaaaaaaaaaaaaaaaaaaaaaaaaaaaaaaaaaaaaaaaaaaaaugcaucccccccccccccccccccccccccccccccaaaggcucuuuucagagccaccagaauu

SEQ ID NO: 15297 - RNA, 1893 nt, Artificial Sequence
  mRNA product Design f-5 comprising derived and/or modified sequence from HRSV(Memphis-37)__AIY60640.1__F-del_DSCav1_mut2 (opt1)
gggagacuuucccauucuguagcagaauuugguguugccuguggucuuggucccgcggagaagcuuaccauggagcugcccauccucaagaccaacgccaucaccacgauccuggccgcggugacccugugcuucgccagcucccagaacaucaccgaggaguucuaccagagcacgugcuccgccgucagcaagggcuaccucggggcccugcgcaccggcugguacaccuccgugaucaccaucgagcugagcaacaucaaggagaacaagugcaacgggaccgacgccaaggugaagcucaucaagcaggagcuggacaaguacaagaacgcggucacggaccugcagcuccugaugcaguccaccccggccgccggcagcggguccgccaucugcagcggcaucgcggugugcaaggugcugcaccucgagggcgaggucaacaagaucaagaacgcccugcuguccaccaacaaggccguggugagccucuccaacggggucagcgugcugaccuucaaggugcuggaccucaagaacuacaucgacaagcagcugcugcccauccucaacaagcaguccugcagcauccccaacaucgagacggucaucgaguuccagcagaagaacaaccggcugcuggagaucacccgcgaguucuccgugaacgccggcgugaccacccccgucagcacguacaugcucaccaacuccgagcugcugagccucaucaacgacaugccgaucaccaacgaccagaagaagcugaugagcaacaacgugcagaucgugcggcagcaguccuacagcaucaugugcaucaucaaggaggagguccuggccuacguggugcagcucccccuguacggggucaucgacacccccugcuggaagcugcacacgagcccccucugcaccaccaacaccaaggagggcuccaacaucugccugacgcgcaccgaccgggggugguacugcgacaacgcgggcuccgugagcuucuucccgcaggccgagaccugcaaggugcaguccaaccgcgucuucugcgacaccaugaacagccugacgcuccccuccgaggugaaccugugcaacaucgacaucuucaaccccaaguacgacugcaagaucaugaccagcaagaccgacgucuccagcuccgugaucaccagccugggcgccaucguguccugcuacgggaagacgaagugcaccgccagcaacaagaaccggggcaucaucaagaccuucuccaacgggugcgacuacgucagcaacaagggcguggacaccguguccgucggcaacacgcucuacugcgugaacaagcaggaggggcagagccuguacgugaagggcgagcccaucaucaacuucuacgacccgcuggucuuccccagcgacgaguucgacgccuccaucagccaggugaacgagaagaucaaccagucccucgcguucauccgcaagagcgacgagcugcugcacaacgugaacgucgggaaguccaccaccaacaucaugaucaccaccaucaucaucgugaucaucgugauccuccugcugcucaucgccgucggccuguuccuguacugcaaggcccggugaggacuaguacuggcugcaucucccuuuccucuguccuccauccuucucccaggauggugaagggggaccugguacccagugauccccaccccaggauccuaaaucaugacuuaccugcuaauaaaaacucauuggaaaagugagaagaucuaaaaaaaaaaaaaaaaaaaaaaaaaaaaaaaaaaaaaaaaaaaaaaaaaaaaaaaaaaaaaaaaugcaucccccccccccccccccccccccccccccccaaaggcucuuuucagagccaccagaauu

SEQ ID NO: 15298 - RNA, 1893 nt, Artificial Sequence
  mRNA product Design f-5 comprising derived and/or modified sequence from HRSV(Memphis-37)__AIY60640.1__F-del_DSCav1_mut2 (opt2)
gggagacuuucccauucuguagcagaauuugguguugccuguggucuuggucccgcggagaagcuuaccauggagcuccccauccucaagaccaacgccaucaccaccauccucgccgccgucacccucugcuucgccuccucccagaacaucaccgaggaguucuaccaguccaccugcuccgccgucuccaagggcuaccucggcgcccuccgcaccggcugguacaccuccgucaucaccaucgagcucuccaacaucaaggagaacaagugcaacggcaccgacgccaaggucaagcucaucaagcaggagcucgacaaguacaagaacgccgucaccgaccuccagcuccucaugcaguccacccccgccgccggcuccggcuccgccaucugcuccggcaucgccgucugcaagguccuccaccucgagggcgaggucaacaagaucaagaacgcccuccucuccaccaacaaggccgucgucucccucuccaacggcgucuccguccucaccuucaagguccucgaccucaagaacuacaucgacaagcagcuccuccccauccucaacaagcaguccugcuccauccccaacaucgagaccgucaucgaguuccagcagaagaacaaccgccuccucgagaucacccgcgaguucuccgucaacgccggcgucaccacccccgucuccaccuacaugcucaccaacuccgagcuccucucccucaucaacgacaugcccaucaccaacgaccagaagaagcucauguccaacaacguccagaucguccgccagcaguccuacuccaucaugugcaucaucaaggaggagguccucgccuacgucguccagcucccccucuacggcgucaucgacacccccugcuggaagcuccacaccuccccccucugcaccaccaacaccaaggagggcuccaacaucugccucacccgcaccgaccgcggcugguacugcgacaacgccggcuccgucuccuucuucccccaggccgagaccugcaagguccaguccaaccgcgucuucugcgacaccaugaacucccucacccuccccuccgaggucaaccucugcaacaucgacaucuucaaccccaaguacgacugcaagaucaugaccuccaagaccgacgucuccuccuccgucaucaccucccucggcgccaucgucuccugcuacggcaagaccaagugcaccgccuccaacaagaaccgcggcaucaucaagaccuucuccaacggcugcgacuacgucuccaacaagggcgucgacaccgucuccgucggcaacacccucuacugcgucaacaagcaggagggccagucccucuacgucaagggcgagcccaucaucaacuucuacgacccccucgucuuccccuccgacgaguucgacgccuccaucucccaggucaacgagaagaucaaccagucccucgccuucauccgcaaguccgacgagcuccuccacaacgucaacgucggcaaguccaccaccaacaucaugaucaccaccaucaucaucgucaucaucgucauccuccuccuccucaucgccgucggccucuuccucuacugcaaggcccgcugaggacuaguacuggcugcaucucccuuuccucuguccuccauccuucucccaggauggugaagggggaccugguacccagugauccccaccccaggauccuaaaucaugacuuaccugcuaauaaaaacucauuggaaaagugagaagaucuaaaaaaaaaaaaaaaaaaaaaaaaaaaaaaaaaaaaaaaaaaaaaaaaaaaaaaaaaaaaaaaaugcaucccccccccccccccccccccccccccccccaaaggcucuuuucagagccaccagaauu

SEQ ID NO: 15299 - RNA, 1893 nt, Artificial Sequence
  mRNA product Design f-5 comprising derived and/or modified sequence from HRSV(Memphis-37)__AIY60640.1__F-del_DSCav1_mut2 (opt3)
gggagacuuucccauucuguagcagaauuugguguugccuguggucuuggucccgcggagaagcuuaccauggagcugcccauccucaagaccaacgccauuacaacuauacuugcugcagugacgcugugcuucgccagcucccagaauaucaccgaagaguuuuaccaaucuacauguucagcggucaguaaaggcuauuugggggcuuuaagaacuggaugguacaccagcguuauuacaaucgaacuguccaacauuaaggagaauaaaugcaacgguaccgacgccaaggugaaacuaaucaagcaggaacucgauaaguauaaaaaugcaguaacugaccugcagcuucugaugcagucuacuccugccgcuggcucggggucagcaauauguagcggaaucgccgugugcaaggucuugcaccucgagggcgaggugaacaaaauuaagaaugcucugcugaguaccaacaaagccguugugucccucucuaauggugucagcguguuaacguucaagguacuggaucuuaagaacuacaucgacaaacaauugcugccaauucuaaauaagcaguccuguucaaucccgaacauagaaacuguuauugaguuucagcagaaaaauaacaggcuccuggaaaucacccgggaguucagugugaaugcgggggucacaacucccgugagcaccuauaugcuuacaaacucugagcuguugucccucauuaacgauaugccuaucaccaaugaccaaaagaaacugaugucaaacaaugugcagaucguccgccagcagagcuacaguauuaugugcauaaucaaggaagagguuuuagcauaugugguacaacugccacucuacggagugauugauacgcccuguuggaaacuucauacuucuccucugugcacaaccaacacuaaggaaggcuccaauaucuguuugacacgaaccgaccguggcugguacugcgauaacgccgggagcgucucguuuuucccacaggcugagacguguaaggugcagucuaauagaguuuucugcgacaccaugaacucccuaacacugcccucagaagugaaucucugcaacauagauauuuucaauccuaaauaugacuguaagaucaugacaaguaaaaccgaugucagcuccucugugaucacaagccugggagccauuguaucaugcuacgguaagacuaaauguaccgcaaguaacaagaauaggggcaucauuaagacauuuuccaacgggugcgacuauguuagcaauaaaggaguggacaccgucucugugggcaacacucuuuacugugucaacaagcaagagggucagucacuguaugugaaaggggagccaauaaucaauuucuacgauccguugguuuuucccagugacgaauuugaugcuagcauuucccaggugaacgagaagaucaaucagucucucgccuuuauccggaaaucggacgaacuguuacacaacguaaaugucggaaagagcacgacaaacauuaugauaaccacuaucauuaucgugauuaucguuauacugcuacuccugaucgcggugggccuuuucuuguauugcaaggcccgcugaggacuaguacuggcugcaucucccuuuccucuguccuccauccuucucccaggauggugaagggggaccugguacccagugauccccaccccaggauccuaaaucaugacuuaccugcuaauaaaaacucauuggaaaagugagaagaucuaaaaaaaaaaaaaaaaaaaaaaaaaaaaaaaaaaaaaaaaaaaaaaaaaaaaaaaaaaaaaaaaugcaucccccccccccccccccccccccccccccccaaaggcucuuuucagagccaccagaauu

SEQ ID NO: 15300 - RNA, 1893 nt, Artificial Sequence
  mRNA product Design f-5 comprising derived and/or modified sequence from HRSV(Memphis-37)__AIY60640.1__F-del_DSCav1_mut2 (opt4)
gggagacuuucccauucuguagcagaauuugguguugccuguggucuuggucccgcggagaagcuuaccauggagcugcccauccugaagaccaacgccaucaccaccauccuggccgccgugacccugugcuucgccagcagccagaacaucaccgaggaguucuaccagagcaccugcagcgccgugagcaagggcuaccugggcgcccugagaaccggcugguacaccagcgugaucaccaucgagcugagcaacaucaaggagaacaagugcaacggcaccgacgccaaggugaagcugaucaagcaggagcuggacaaguacaagaacgccgugaccgaccugcagcugcugaugcagagcacccccgccgccggcagcggcagcgccaucugcagcggcaucgccgugugcaaggugcugcaccuggagggcgaggugaacaagaucaagaacgcccugcugagcaccaacaaggccguggugagccugagcaacggcgugagcgugcugaccuucaaggugcuggaccugaagaacuacaucgacaagcagcugcugcccauccugaacaagcagagcugcagcauccccaacaucgagaccgugaucgaguuccagcagaagaacaacagacugcuggagaucaccagagaguucagcgugaacgccggcgugaccacccccgugagcaccuacaugcugaccaacagcgagcugcugagccugaucaacgacaugcccaucaccaacgaccagaagaagcugaugagcaacaacgugcagaucgugagacagcagagcuacagcaucaugugcaucaucaaggaggaggugcuggccuacguggugcagcugccccuguacggcgugaucgacacccccugcuggaagcugcacaccagcccccugugcaccaccaacaccaaggagggcagcaacaucugccugaccagaaccgacagaggcugguacugcgacaacgccggcagcgugagcuucuucccccaggccgagaccugcaaggugcagagcaacagaguguucugcgacaccaugaacagccugacccugcccagcgaggugaaccugugcaacaucgacaucuucaaccccaaguacgacugcaagaucaugaccagcaagaccgacgugagcagcagcgugaucaccagccugggcgccaucgugagcugcuacggcaagaccaagugcaccgccagcaacaagaacagaggcaucaucaagaccuucagcaacggcugcgacuacgugagcaacaagggcguggacaccgugagcgugggcaacacccuguacugcgugaacaagcaggagggccagagccuguacgugaagggcgagcccaucaucaacuucuacgacccccugguguuccccagcgacgaguucgacgccagcaucagccaggugaacgagaagaucaaccagagccuggccuucaucagaaagagcgacgagcugcugcacaacgugaacgugggcaagagcaccaccaacaucaugaucaccaccaucaucaucgugaucaucgugauccugcugcugcugaucgccgugggccuguuccuguacugcaaggccagaugaggacuaguacuggcugcaucucccuuuccucuguccuccauccuucucccaggauggugaagggggaccugguacccagugauccccaccccaggauccuaaaucaugacuuaccugcuaauaaaaacucauuggaaaagugagaagaucuaaaaaaaaaaaaaaaaaaaaaaaaaaaaaaaaaaaaaaaaaaaaaaaaaaaaaaaaaaaaaaaaugcaucccccccccccccccccccccccccccccccaaaggcucuuuucagagccaccagaauu

SEQ ID NO: 15301 - RNA, 1893 nt, Artificial Sequence
  mRNA product Design f-5 comprising derived and/or modified sequence from HRSV(Memphis-37)__AIY60640.1__F-del_DSCav1_mut2 (opt5)
gggagacuuucccauucuguagcagaauuugguguugccuguggucuuggucccgcggagaagcuuaccauggagcugcccauccucaagaccaacgccauuacaacgauccuggcugccgugacccuuugcuucgcgagcucccagaauauuacagaagaguuuuaccaaucuaccuguagcgcugucuccaaaggcuaucugggggcccucagaacaggaugguacaccucuguuaucacaauugaacugagcaacaucaaggagaauaaaugcaacggcaccgacgccaaggugaaacuuaucaagcaggaacuggauaaguauaaaaaugcugugacggaccuccagcugcugaugcaguccaccccugccgcugggucuggaagcgccauuuguuccggcaucgcggucugcaaggugcuccaccuggagggggagguuaacaaaauuaagaaugcccuucugagcacaaacaaagcuguggucucucucuccaauggagugagcguucugaccuucaaggugcuugaucugaagaacuacaucgacaaacaacuccugccgauucugaauaagcagucuuguuccauccccaacauugaaacagucaucgaguuucagcagaaaaauaaccggcuccuggaaaucacccgcgaguucagcgugaaugccggcgugacgacaccugucucuaccuauaugcuuacaaacuccgagcugcucagccugauuaacgauaugcccaucaccaaugaccaaaagaaacuuauguccaacaauguucagauugugagacagcagucuuacagcaucaugugcauuaucaaggaagaggugcuggcuuaugucgugcaacucccucuguacggcguuaucgauacccccuguuggaaacugcauacauccccucucugcacgaccaacacaaaggaagggagcaauauuugucugacccggacagaccgcggaugguacugcgauaacgccggcucuguguccuuuuucccgcaggcggagaccuguaagguccagagcaauagaguguuuugcgacacgaugaacucucuuacacugcccagcgaaguuaaucucugcaacaucgauauuuucaauccuaaauaugacuguaagaucaugaccuccaaaaccgaugugucuagcuccgucauuacaagccugggggccaucgugucuugcuacggaaagaccaaauguacagcuuccaacaagaaucggggcaucauuaagacguuuagcaacgggugcgacuaugucucuaauaaaggaguggacaccguuuccgugggcaacacacuuuacugugucaacaagcaagagggccagagccuguaugugaaaggggagcccaucauuaauuucuacgauccucucguuuuucccuccgacgaguucgaugccucuaucagccaggugaacgaaaagauuaaucagucccuggcuuuuauccgcaaaucugacgaacugcuccacaacgucaaugugggaaagagcaccacaaacauuaugaucaccacgaucauuaucgugauuaucguuauucugcuucugcucaucgccgucggccuguuccuguauugcaaggccagaugaggacuaguacuggcugcaucucccuuuccucuguccuccauccuucucccaggauggugaagggggaccugguacccagugauccccaccccaggauccuaaaucaugacuuaccugcuaauaaaaacucauuggaaaagugagaagaucuaaaaaaaaaaaaaaaaaaaaaaaaaaaaaaaaaaaaaaaaaaaaaaaaaaaaaaaaaaaaaaaaugcaucccccccccccccccccccccccccccccccaaaggcucuuuucagagccaccagaauu

SEQ ID NO: 15302 - RNA, 1893 nt, Artificial Sequence
  mRNA product Design f-5 comprising derived and/or modified sequence from HRSV(Memphis-37)__AIY60640.1__F-del_DSCav1_mut2 (opt6)
gggagacuuucccauucuguagcagaauuugguguugccuguggucuuggucccgcggagaagcuuaccauggaacuaccaauacucaaaacaaacgcaauaacaacaauuuuagcugcaguaacacuuuguuucgcauccucccaaaauauaacagaagaauuuuaucaaucaaccugcucagccgucuccaaaggauaucuaggugcacuacgcacuggaugguacacaagugucaucacaauagaacuuuccaacaucaaagaaaauaaauguaauggaacugacgcaaaaguaaaacucauaaaacaagaacuagacaaauacaaaaacgcaguaacagaccuacaacuauuaaugcaaucaacaccagcagcaggauccggcagugccauaugcucuggaauagcagucugcaaaguuuuacacuuagaaggcgaaguaaacaaaaucaaaaacgcccuacuaucuacaaauaaagccgucguaucucucucaaauggaguaucaguacuaacauucaaaguauuagacuuaaaaaacuacaucgauaaacaauuauugccaauauuaaacaaacaaucuugcucaauaccaaauauagaaacagucauagaauuucaacaaaaaaauaaccgauuauuagaaauaacacgagaauuuucaguaaaugccggagucaccacaccaguaucaacauacaugcuaacaaauucagaacuauuaucauuaauaaacgacaugccuauuacaaaugaucaaaaaaaacuaauguccaacaauguacaaauaguccgacaacaaagcuacucaaucauguguauaauaaaagaagaaguacuugcauacguaguacaauuaccacuauacggaguuaucgacacaccaugcuggaaacuccacacuucaccacucugcaccacaaacacaaaagaaggcucaaacauaugccuaacaagaacagaccgaggaugguacugcgacaacgcaggaucaguaucauucuucccacaagcagaaacuugcaaaguacaaucuaacagaguuuucugugacaccaugaauagccuaacacuccccuccgaaguuaaccuauguaacauagauauauuuaaucccaaauaugauugcaaaaucaugacaucuaaaaccgacguaucaucaucuguaaucacaucacuaggugccauagucucaugcuacggcaaaacaaaaugcaccgccucaaacaaaaaccgagguauaauaaaaaccuucaguaauggaugugacuacguaucaaacaaagguguugauaccguaagcgucggcaacacccuauacugcguaaauaaacaagaaggccaaucacuauacgucaaaggcgaaccaauuauuaacuucuaugacccacucgucuuucccuccgacgaauuugacgcaagcauaucacaaguaaacgaaaaaauaaaccaaucacuagcauucauacgcaaaucagaugaacuacuacauaacguaaacguaggaaaauccacuacaaauauaaugaucacaacaauaauaaucguaauuauagucauauuauuacuacuaauagcaguaggacuuuuccuauacuguaaagcaagauaaggacuaguacuggcugcaucucccuuuccucuguccuccauccuucucccaggauggugaagggggaccugguacccagugauccccaccccaggauccuaaaucaugacuuaccugcuaauaaaaacucauuggaaaagugagaagaucuaaaaaaaaaaaaaaaaaaaaaaaaaaaaaaaaaaaaaaaaaaaaaaaaaaaaaaaaaaaaaaaaugcaucccccccccccccccccccccccccccccccaaaggcucuuuucagagccaccagaauu

SEQ ID NO: 15303 - RNA, 1893 nt, Artificial Sequence
  mRNA product Design f-5 comprising derived and/or modified sequence from HRSV(Memphis-37)__AIY60640.1__F-del_DSCav1_mut2 (opt11)
gggagacuuucccauucuguagcagaauuugguguugccuguggucuuggucccgcggagaagcuuaccauggaacuucccauccucaagaccaacgcuauuacgaccauccucgccgcagucacccucugcuucgcgucaucccaaaacaucaccgaagaauuuuaccaauccacaugcuccgcagucucaaaaggcuaccuaggagcccuacgcaccggaugguacacauccgucaucacaaucgaacucuccaacauaaaagaaaacaaaugcaacggcaccgaugccaaaguaaaacugauuaaacaagaacucgacaaauacaagaacgccgucacagaccuacagcuccucaugcaaucaacucccgccgccggcagcggauccgcuaucugcucaggcaucgccguaugcaaaguccuccaccuagaaggcgaaguaaacaaaaucaagaacgcacuacucucaacaaacaaagccgucgucucccucuccaacggcgucuccguccuuaccuucaaaguccucgaccuuaagaacuacauugacaaacaacuccuacccauccucaacaaacaauccugcucuauaccuaauauagaaaccguaaucgaauuucaacagaaaaacaaccgccuccucgaaauuacccgcgaguucucaguaaacgccggcguaaccacccccgucuccaccuacaugcucacaaauucagaacuccucagccucaucaacgacaugcccauaaccaacgaccaaaagaaacucaugucaaacaacguccaaaucgucaggcaacaaagcuacagcaucaugugcaucauuaaagaagaaguacucgccuacgucgugcaacuaccccucuacggcgucauagacacacccugcuggaaacuucacacaucaccgcucugcaccacaaacaccaaagaaggcaguaacauaugccucacccgaaccgaccgcggaugguacugcgacaacgccggauccgucagcuucuucccacaagccgaaaccugcaaaguacaauccaaccgagucuucugcgacaccaugaacucucuuacgcuccccucagaagucaaccuaugcaacaucgacaucuucaaccccaaauacgacugcaaaaucaugaccuccaaaacagacgucuccuccucagugauaaccucccucggcgccauugucuccugcuacggcaaaaccaaaugcaccgccuccaacaaaaaccgugggaucaucaaaaccuucucaaacggcugcgacuacguauccaauaagggugucgacacagucuccguaggcaauacccucuauugcgucaacaaacaagaaggccaaucccucuacgucaaaggcgaaccuaucaucaacuucuacgacccgcuagucuuccccucagacgaguucgacgcauccaucucacaagucaacgaaaagaucaaccagucccucgcauucauccgaaaauccgacgaacuucuccacaacguuaacgucggcaaauccaccacuaacauaaugaucaccacgaucaucauaguaauuaucgucauacuccuccuccuaaucgcugucggacucuuccucuacugcaaggcccgcuaaggacuaguacuggcugcaucucccuuuccucuguccuccauccuucucccaggauggugaagggggaccugguacccagugauccccaccccaggauccuaaaucaugacuuaccugcuaauaaaaacucauuggaaaagugagaagaucuaaaaaaaaaaaaaaaaaaaaaaaaaaaaaaaaaaaaaaaaaaaaaaaaaaaaaaaaaaaaaaaaugcaucccccccccccccccccccccccccccccccaaaggcucuuuucagagccaccagaauu

SEQ ID NO: 15304 - RNA, 1889 nt, Artificial Sequence
  mRNA product Design g-1 comprising derived and/or modified sequence from HRSV(Memphis-37)__AIY60640.1__F-del_DSCav1_mut2 (opt1)
gggagacuuucccauucuguagcagaauuugguguugccuguggucuuggucccgcggagaagcuuaccauggagcugcccauccucaagaccaacgccaucaccacgauccuggccgcggugacccugugcuucgccagcucccagaacaucaccgaggaguucuaccagagcacgugcuccgccgucagcaagggcuaccucggcgcccugcgcaccgggugguacaccagcgugaucaccaucgagcuguccaacaucaaggagaacaagugcaacggcaccgacgccaaggugaagcucaucaagcaggagcuggacaaguacaagaacgcggucacggaccugcagcuccugaugcagagcaccccggccgccggcuccgggagcgcgaucugcuccggcaucgccgucugcaaggugcugcaccucgagggcgaggugaacaagaucaagaacgcccugcuguccaccaacaaggccgucgugagccucuccaacggggugagcguccugaccuucaaggugcuggaccucaagaacuacaucgacaagcagcugcugcccauccugaacaagcagagcugcuccauccccaacaucgagaccgucaucgaguuccagcagaagaacaaccgccuccuggagaucacgcgggaguucagcgugaacgcgggcgugaccacccccgucuccaccuacaugcugacgaacagcgagcuccugucccugaucaacgacaugccgaucaccaacgaccagaagaagcucaugagcaacaacgugcagaucgugcgccagcaguccuacagcaucaugugcaucaucaaggaggagguccuggccuacguggugcagcugccccucuacggggucaucgacacccccugcuggaagcugcacaccagcccccugugcacgaccaacaccaaggagggcuccaacaucugccucacccggacggaccgcgggugguacugcgacaacgccggcagcguguccuucuucccgcaggccgagaccugcaagguccagagcaaccggguguucugcgacaccaugaacucccugacccugcccagcgaggugaaccucugcaacaucgacaucuucaaccccaaguacgacugcaagaucaugacguccaagaccgacgucagcuccagcgugaucaccucccugggcgccaucgugagcugcuacgggaagaccaagugcacggcgagcaacaagaaccgcggcaucaucaagaccuucuccaacgggugcgacuacgucagcaacaagggcguggacaccguguccgucggcaacacccuguacugcgugaacaagcaggagggccagagccucuacgugaagggggagcccaucaucaacuucuacgacccgcuggucuuccccuccgacgaguucgacgccagcaucucccaggugaacgagaagaucaaccagagccuggccuucauccggaaguccgacgagcuccugcacaacgugaacgucggcaagagcaccacgaacaucaugaucaccaccaucaucaucgugaucaucgugauccugcugcuccugaucgccgucgggcuguuccucuacugcaaggcccgcugaggacuaguggaagcauuuuccuggcugauuaaaagaaauuacucagcuauggucaucuguuccuguuagaaggcuaugcagcauauuauauacuaugcgcauguuaugaaaugcauaauaaaaaauuuuaaaaaaucuaaaagaucuaaaaaaaaaaaaaaaaaaaaaaaaaaaaaaaaaaaaaaaaaaaaaaaaaaaaaaaaaaaaaaaaugcaucccccccccccccccccccccccccccccccaaaggcucuuuucagagccaccagaauu

SEQ ID NO: 15305 - RNA, 1889 nt, Artificial Sequence
  mRNA product Design g-1 comprising derived and/or modified sequence from HRSV(Memphis-37)__AIY60640.1__F-del_DSCav1_mut2 (opt1)
gggagacuuucccauucuguagcagaauuugguguugccuguggucuuggucccgcggagaagcuuaccauggagcugcccauccucaagaccaacgccaucaccacgauccuggccgcggugacccugugcuucgccagcucccagaacaucaccgaggaguucuaccagagcacgugcuccgccgucagcaagggcuaccucggggcccugcgcaccggcugguacaccuccgugaucaccaucgagcugagcaacaucaaggagaacaagugcaacgggaccgacgccaaggugaagcucaucaagcaggagcuggacaaguacaagaacgcggucacggaccugcagcuccugaugcaguccaccccggccgccggcagcggguccgccaucugcagcggcaucgcggugugcaaggugcugcaccucgagggcgaggucaacaagaucaagaacgcccugcuguccaccaacaaggccguggugagccucuccaacggggucagcgugcugaccuucaaggugcuggaccucaagaacuacaucgacaagcagcugcugcccauccucaacaagcaguccugcagcauccccaacaucgagacggucaucgaguuccagcagaagaacaaccggcugcuggagaucacccgcgaguucuccgugaacgccggcgugaccacccccgucagcacguacaugcucaccaacuccgagcugcugagccucaucaacgacaugccgaucaccaacgaccagaagaagcugaugagcaacaacgugcagaucgugcggcagcaguccuacagcaucaugugcaucaucaaggaggagguccuggccuacguggugcagcucccccuguacggggucaucgacacccccugcuggaagcugcacacgagcccccucugcaccaccaacaccaaggagggcuccaacaucugccugacgcgcaccgaccgggggugguacugcgacaacgcgggcuccgugagcuucuucccgcaggccgagaccugcaaggugcaguccaaccgcgucuucugcgacaccaugaacagccugacgcuccccuccgaggugaaccugugcaacaucgacaucuucaaccccaaguacgacugcaagaucaugaccagcaagaccgacgucuccagcuccgugaucaccagccugggcgccaucguguccugcuacgggaagacgaagugcaccgccagcaacaagaaccggggcaucaucaagaccuucuccaacgggugcgacuacgucagcaacaagggcguggacaccguguccgucggcaacacgcucuacugcgugaacaagcaggaggggcagagccuguacgugaagggcgagcccaucaucaacuucuacgacccgcuggucuuccccagcgacgaguucgacgccuccaucagccaggugaacgagaagaucaaccagucccucgcguucauccgcaagagcgacgagcugcugcacaacgugaacgucgggaaguccaccaccaacaucaugaucaccaccaucaucaucgugaucaucgugauccuccugcugcucaucgccgucggccuguuccuguacugcaaggcccggugaggacuaguggaagcauuuuccuggcugauuaaaagaaauuacucagcuauggucaucuguuccuguuagaaggcuaugcagcauauuauauacuaugcgcauguuaugaaaugcauaauaaaaaauuuuaaaaaaucuaaaagaucuaaaaaaaaaaaaaaaaaaaaaaaaaaaaaaaaaaaaaaaaaaaaaaaaaaaaaaaaaaaaaaaaugcaucccccccccccccccccccccccccccccccaaaggcucuuuucagagccaccagaauu

SEQ ID NO: 15306 - RNA, 1889 nt, Artificial Sequence
  mRNA product Design g-1 comprising derived and/or modified sequence from HRSV(Memphis-37)__AIY60640.1__F-del_DSCav1_mut2 (opt2)
gggagacuuucccauucuguagcagaauuugguguugccuguggucuuggucccgcggagaagcuuaccauggagcuccccauccucaagaccaacgccaucaccaccauccucgccgccgucacccucugcuucgccuccucccagaacaucaccgaggaguucuaccaguccaccugcuccgccgucuccaagggcuaccucggcgcccuccgcaccggcugguacaccuccgucaucaccaucgagcucuccaacaucaaggagaacaagugcaacggcaccgacgccaaggucaagcucaucaagcaggagcucgacaaguacaagaacgccgucaccgaccuccagcuccucaugcaguccacccccgccgccggcuccggcuccgccaucugcuccggcaucgccgucugcaagguccuccaccucgagggcgaggucaacaagaucaagaacgcccuccucuccaccaacaaggccgucgucucccucuccaacggcgucuccguccucaccuucaagguccucgaccucaagaacuacaucgacaagcagcuccuccccauccucaacaagcaguccugcuccauccccaacaucgagaccgucaucgaguuccagcagaagaacaaccgccuccucgagaucacccgcgaguucuccgucaacgccggcgucaccacccccgucuccaccuacaugcucaccaacuccgagcuccucucccucaucaacgacaugcccaucaccaacgaccagaagaagcucauguccaacaacguccagaucguccgccagcaguccuacuccaucaugugcaucaucaaggaggagguccucgccuacgucguccagcucccccucuacggcgucaucgacacccccugcuggaagcuccacaccuccccccucugcaccaccaacaccaaggagggcuccaacaucugccucacccgcaccgaccgcggcugguacugcgacaacgccggcuccgucuccuucuucccccaggccgagaccugcaagguccaguccaaccgcgucuucugcgacaccaugaacucccucacccuccccuccgaggucaaccucugcaacaucgacaucuucaaccccaaguacgacugcaagaucaugaccuccaagaccgacgucuccuccuccgucaucaccucccucggcgccaucgucuccugcuacggcaagaccaagugcaccgccuccaacaagaaccgcggcaucaucaagaccuucuccaacggcugcgacuacgucuccaacaagggcgucgacaccgucuccgucggcaacacccucuacugcgucaacaagcaggagggccagucccucuacgucaagggcgagcccaucaucaacuucuacgacccccucgucuuccccuccgacgaguucgacgccuccaucucccaggucaacgagaagaucaaccagucccucgccuucauccgcaaguccgacgagcuccuccacaacgucaacgucggcaaguccaccaccaacaucaugaucaccaccaucaucaucgucaucaucgucauccuccuccuccucaucgccgucggccucuuccucuacugcaaggcccgcugaggacuaguggaagcauuuuccuggcugauuaaaagaaauuacucagcuauggucaucuguuccuguuagaaggcuaugcagcauauuauauacuaugcgcauguuaugaaaugcauaauaaaaaauuuuaaaaaaucuaaaagaucuaaaaaaaaaaaaaaaaaaaaaaaaaaaaaaaaaaaaaaaaaaaaaaaaaaaaaaaaaaaaaaaaugcaucccccccccccccccccccccccccccccccaaaggcucuuuucagagccaccagaauu

SEQ ID NO: 15307 - RNA, 1889 nt, Artificial Sequence
  mRNA product Design g-1 comprising derived and/or modified sequence from HRSV(Memphis-37)__AIY60640.1__F-del_DSCav1_mut2 (opt3)
gggagacuuucccauucuguagcagaauuugguguugccuguggucuuggucccgcggagaagcuuaccauggagcugcccauccucaagaccaacgccauuacaacuauacuugcugcagugacgcugugcuucgccagcucccagaauaucaccgaagaguuuuaccaaucuacauguucagcggucaguaaaggcuauuugggggcuuuaagaacuggaugguacaccagcguuauuacaaucgaacuguccaacauuaaggagaauaaaugcaacgguaccgacgccaaggugaaacuaaucaagcaggaacucgauaaguauaaaaaugcaguaacugaccugcagcuucugaugcagucuacuccugccgcuggcucggggucagcaauauguagcggaaucgccgugugcaaggucuugcaccucgagggcgaggugaacaaaauuaagaaugcucugcugaguaccaacaaagccguugugucccucucuaauggugucagcguguuaacguucaagguacuggaucuuaagaacuacaucgacaaacaauugcugccaauucuaaauaagcaguccuguucaaucccgaacauagaaacuguuauugaguuucagcagaaaaauaacaggcuccuggaaaucacccgggaguucagugugaaugcgggggucacaacucccgugagcaccuauaugcuuacaaacucugagcuguugucccucauuaacgauaugccuaucaccaaugaccaaaagaaacugaugucaaacaaugugcagaucguccgccagcagagcuacaguauuaugugcauaaucaaggaagagguuuuagcauaugugguacaacugccacucuacggagugauugauacgcccuguuggaaacuucauacuucuccucugugcacaaccaacacuaaggaaggcuccaauaucuguuugacacgaaccgaccguggcugguacugcgauaacgccgggagcgucucguuuuucccacaggcugagacguguaaggugcagucuaauagaguuuucugcgacaccaugaacucccuaacacugcccucagaagugaaucucugcaacauagauauuuucaauccuaaauaugacuguaagaucaugacaaguaaaaccgaugucagcuccucugugaucacaagccugggagccauuguaucaugcuacgguaagacuaaauguaccgcaaguaacaagaauaggggcaucauuaagacauuuuccaacgggugcgacuauguuagcaauaaaggaguggacaccgucucugugggcaacacucuuuacugugucaacaagcaagagggucagucacuguaugugaaaggggagccaauaaucaauuucuacgauccguugguuuuucccagugacgaauuugaugcuagcauuucccaggugaacgagaagaucaaucagucucucgccuuuauccggaaaucggacgaacuguuacacaacguaaaugucggaaagagcacgacaaacauuaugauaaccacuaucauuaucgugauuaucguuauacugcuacuccugaucgcggugggccuuuucuuguauugcaaggcccgcugaggacuaguggaagcauuuuccuggcugauuaaaagaaauuacucagcuauggucaucuguuccuguuagaaggcuaugcagcauauuauauacuaugcgcauguuaugaaaugcauaauaaaaaauuuuaaaaaaucuaaaagaucuaaaaaaaaaaaaaaaaaaaaaaaaaaaaaaaaaaaaaaaaaaaaaaaaaaaaaaaaaaaaaaaaugcaucccccccccccccccccccccccccccccccaaaggcucuuuucagagccaccagaauu

SEQ ID NO: 15308 - RNA, 1889 nt, Artificial Sequence
  mRNA product Design g-1 comprising derived and/or modified sequence from HRSV(Memphis-37)__AIY60640.1__F-del_DSCav1_mut2 (opt4)
gggagacuuucccauucuguagcagaauuugguguugccuguggucuuggucccgcggagaagcuuaccauggagcugcccauccugaagaccaacgccaucaccaccauccuggccgccgugacccugugcuucgccagcagccagaacaucaccgaggaguucuaccagagcaccugcagcgccgugagcaagggcuaccugggcgcccugagaaccggcugguacaccagcgugaucaccaucgagcugagcaacaucaaggagaacaagugcaacggcaccgacgccaaggugaagcugaucaagcaggagcuggacaaguacaagaacgccgugaccgaccugcagcugcugaugcagagcacccccgccgccggcagcggcagcgccaucugcagcggcaucgccgugugcaaggugcugcaccuggagggcgaggugaacaagaucaagaacgcccugcugagcaccaacaaggccguggugagccugagcaacggcgugagcgugcugaccuucaaggugcuggaccugaagaacuacaucgacaagcagcugcugcccauccugaacaagcagagcugcagcauccccaacaucgagaccgugaucgaguuccagcagaagaacaacagacugcuggagaucaccagagaguucagcgugaacgccggcgugaccacccccgugagcaccuacaugcugaccaacagcgagcugcugagccugaucaacgacaugcccaucaccaacgaccagaagaagcugaugagcaacaacgugcagaucgugagacagcagagcuacagcaucaugugcaucaucaaggaggaggugcuggccuacguggugcagcugccccuguacggcgugaucgacacccccugcuggaagcugcacaccagcccccugugcaccaccaacaccaaggagggcagcaacaucugccugaccagaaccgacagaggcugguacugcgacaacgccggcagcgugagcuucuucccccaggccgagaccugcaaggugcagagcaacagaguguucugcgacaccaugaacagccugacccugcccagcgaggugaaccugugcaacaucgacaucuucaaccccaaguacgacugcaagaucaugaccagcaagaccgacgugagcagcagcgugaucaccagccugggcgccaucgugagcugcuacggcaagaccaagugcaccgccagcaacaagaacagaggcaucaucaagaccuucagcaacggcugcgacuacgugagcaacaagggcguggacaccgugagcgugggcaacacccuguacugcgugaacaagcaggagggccagagccuguacgugaagggcgagcccaucaucaacuucuacgacccccugguguuccccagcgacgaguucgacgccagcaucagccaggugaacgagaagaucaaccagagccuggccuucaucagaaagagcgacgagcugcugcacaacgugaacgugggcaagagcaccaccaacaucaugaucaccaccaucaucaucgugaucaucgugauccugcugcugcugaucgccgugggccuguuccuguacugcaaggccagaugaggacuaguggaagcauuuuccuggcugauuaaaagaaauuacucagcuauggucaucuguuccuguuagaaggcuaugcagcauauuauauacuaugcgcauguuaugaaaugcauaauaaaaaauuuuaaaaaaucuaaaagaucuaaaaaaaaaaaaaaaaaaaaaaaaaaaaaaaaaaaaaaaaaaaaaaaaaaaaaaaaaaaaaaaaugcaucccccccccccccccccccccccccccccccaaaggcucuuuucagagccaccagaauu

SEQ ID NO: 15309 - RNA, 1889 nt, Artificial Sequence
  mRNA product Design g-1 comprising derived and/or modified sequence from HRSV(Memphis-37)__AIY60640.1__F-del_DSCav1_mut2 (opt5)
gggagacuuucccauucuguagcagaauuugguguugccuguggucuuggucccgcggagaagcuuaccauggagcugcccauccucaagaccaacgccauuacaacgauccuggcugccgugacccuuugcuucgcgagcucccagaauauuacagaagaguuuuaccaaucuaccuguagcgcugucuccaaaggcuaucugggggcccucagaacaggaugguacaccucuguuaucacaauugaacugagcaacaucaaggagaauaaaugcaacggcaccgacgccaaggugaaacuuaucaagcaggaacuggauaaguauaaaaaugcugugacggaccuccagcugcugaugcaguccaccccugccgcugggucuggaagcgccauuuguuccggcaucgcggucugcaaggugcuccaccuggagggggagguuaacaaaauuaagaaugcccuucugagcacaaacaaagcuguggucucucucuccaauggagugagcguucugaccuucaaggugcuugaucugaagaacuacaucgacaaacaacuccugccgauucugaauaagcagucuuguuccauccccaacauugaaacagucaucgaguuucagcagaaaaauaaccggcuccuggaaaucacccgcgaguucagcgugaaugccggcgugacgacaccugucucuaccuauaugcuuacaaacuccgagcugcucagccugauuaacgauaugcccaucaccaaugaccaaaagaaacuuauguccaacaauguucagauugugagacagcagucuuacagcaucaugugcauuaucaaggaagaggugcuggcuuaugucgugcaacucccucuguacggcguuaucgauacccccuguuggaaacugcauacauccccucucugcacgaccaacacaaaggaagggagcaauauuugucugacccggacagaccgcggaugguacugcgauaacgccggcucuguguccuuuuucccgcaggcggagaccuguaagguccagagcaauagaguguuuugcgacacgaugaacucucuuacacugcccagcgaaguuaaucucugcaacaucgauauuuucaauccuaaauaugacuguaagaucaugaccuccaaaaccgaugugucuagcuccgucauuacaagccugggggccaucgugucuugcuacggaaagaccaaauguacagcuuccaacaagaaucggggcaucauuaagacguuuagcaacgggugcgacuaugucucuaauaaaggaguggacaccguuuccgugggcaacacacuuuacugugucaacaagcaagagggccagagccuguaugugaaaggggagcccaucauuaauuucuacgauccucucguuuuucccuccgacgaguucgaugccucuaucagccaggugaacgaaaagauuaaucagucccuggcuuuuauccgcaaaucugacgaacugcuccacaacgucaaugugggaaagagcaccacaaacauuaugaucaccacgaucauuaucgugauuaucguuauucugcuucugcucaucgccgucggccuguuccuguauugcaaggccagaugaggacuaguggaagcauuuuccuggcugauuaaaagaaauuacucagcuauggucaucuguuccuguuagaaggcuaugcagcauauuauauacuaugcgcauguuaugaaaugcauaauaaaaaauuuuaaaaaaucuaaaagaucuaaaaaaaaaaaaaaaaaaaaaaaaaaaaaaaaaaaaaaaaaaaaaaaaaaaaaaaaaaaaaaaaugcaucccccccccccccccccccccccccccccccaaaggcucuuuucagagccaccagaauu

SEQ ID NO: 15310 - RNA, 1889 nt, Artificial Sequence
  mRNA product Design g-1 comprising derived and/or modified sequence from HRSV(Memphis-37)__AIY60640.1__F-del_DSCav1_mut2 (opt6)
gggagacuuucccauucuguagcagaauuugguguugccuguggucuuggucccgcggagaagcuuaccauggaacuaccaauacucaaaacaaacgcaauaacaacaauuuuagcugcaguaacacuuuguuucgcauccucccaaaauauaacagaagaauuuuaucaaucaaccugcucagccgucuccaaaggauaucuaggugcacuacgcacuggaugguacacaagugucaucacaauagaacuuuccaacaucaaagaaaauaaauguaauggaacugacgcaaaaguaaaacucauaaaacaagaacuagacaaauacaaaaacgcaguaacagaccuacaacuauuaaugcaaucaacaccagcagcaggauccggcagugccauaugcucuggaauagcagucugcaaaguuuuacacuuagaaggcgaaguaaacaaaaucaaaaacgcccuacuaucuacaaauaaagccgucguaucucucucaaauggaguaucaguacuaacauucaaaguauuagacuuaaaaaacuacaucgauaaacaauuauugccaauauuaaacaaacaaucuugcucaauaccaaauauagaaacagucauagaauuucaacaaaaaaauaaccgauuauuagaaauaacacgagaauuuucaguaaaugccggagucaccacaccaguaucaacauacaugcuaacaaauucagaacuauuaucauuaauaaacgacaugccuauuacaaaugaucaaaaaaaacuaauguccaacaauguacaaauaguccgacaacaaagcuacucaaucauguguauaauaaaagaagaaguacuugcauacguaguacaauuaccacuauacggaguuaucgacacaccaugcuggaaacuccacacuucaccacucugcaccacaaacacaaaagaaggcucaaacauaugccuaacaagaacagaccgaggaugguacugcgacaacgcaggaucaguaucauucuucccacaagcagaaacuugcaaaguacaaucuaacagaguuuucugugacaccaugaauagccuaacacuccccuccgaaguuaaccuauguaacauagauauauuuaaucccaaauaugauugcaaaaucaugacaucuaaaaccgacguaucaucaucuguaaucacaucacuaggugccauagucucaugcuacggcaaaacaaaaugcaccgccucaaacaaaaaccgagguauaauaaaaaccuucaguaauggaugugacuacguaucaaacaaagguguugauaccguaagcgucggcaacacccuauacugcguaaauaaacaagaaggccaaucacuauacgucaaaggcgaaccaauuauuaacuucuaugacccacucgucuuucccuccgacgaauuugacgcaagcauaucacaaguaaacgaaaaaauaaaccaaucacuagcauucauacgcaaaucagaugaacuacuacauaacguaaacguaggaaaauccacuacaaauauaaugaucacaacaauaauaaucguaauuauagucauauuauuacuacuaauagcaguaggacuuuuccuauacuguaaagcaagauaaggacuaguggaagcauuuuccuggcugauuaaaagaaauuacucagcuauggucaucuguuccuguuagaaggcuaugcagcauauuauauacuaugcgcauguuaugaaaugcauaauaaaaaauuuuaaaaaaucuaaaagaucuaaaaaaaaaaaaaaaaaaaaaaaaaaaaaaaaaaaaaaaaaaaaaaaaaaaaaaaaaaaaaaaaugcaucccccccccccccccccccccccccccccccaaaggcucuuuucagagccaccagaauu

SEQ ID NO: 15311 - RNA, 1889 nt, Artificial Sequence
  mRNA product Design g-1 comprising derived and/or modified sequence from HRSV(Memphis-37)__AIY60640.1__F-del_DSCav1_mut2 (opt11)
gggagacuuucccauucuguagcagaauuugguguugccuguggucuuggucccgcggagaagcuuaccauggaacuucccauccucaagaccaacgcuauuacgaccauccucgccgcagucacccucugcuucgcgucaucccaaaacaucaccgaagaauuuuaccaauccacaugcuccgcagucucaaaaggcuaccuaggagcccuacgcaccggaugguacacauccgucaucacaaucgaacucuccaacauaaaagaaaacaaaugcaacggcaccgaugccaaaguaaaacugauuaaacaagaacucgacaaauacaagaacgccgucacagaccuacagcuccucaugcaaucaacucccgccgccggcagcggauccgcuaucugcucaggcaucgccguaugcaaaguccuccaccuagaaggcgaaguaaacaaaaucaagaacgcacuacucucaacaaacaaagccgucgucucccucuccaacggcgucuccguccuuaccuucaaaguccucgaccuuaagaacuacauugacaaacaacuccuacccauccucaacaaacaauccugcucuauaccuaauauagaaaccguaaucgaauuucaacagaaaaacaaccgccuccucgaaauuacccgcgaguucucaguaaacgccggcguaaccacccccgucuccaccuacaugcucacaaauucagaacuccucagccucaucaacgacaugcccauaaccaacgaccaaaagaaacucaugucaaacaacguccaaaucgucaggcaacaaagcuacagcaucaugugcaucauuaaagaagaaguacucgccuacgucgugcaacuaccccucuacggcgucauagacacacccugcuggaaacuucacacaucaccgcucugcaccacaaacaccaaagaaggcaguaacauaugccucacccgaaccgaccgcggaugguacugcgacaacgccggauccgucagcuucuucccacaagccgaaaccugcaaaguacaauccaaccgagucuucugcgacaccaugaacucucuuacgcuccccucagaagucaaccuaugcaacaucgacaucuucaaccccaaauacgacugcaaaaucaugaccuccaaaacagacgucuccuccucagugauaaccucccucggcgccauugucuccugcuacggcaaaaccaaaugcaccgccuccaacaaaaaccgugggaucaucaaaaccuucucaaacggcugcgacuacguauccaauaagggugucgacacagucuccguaggcaauacccucuauugcgucaacaaacaagaaggccaaucccucuacgucaaaggcgaaccuaucaucaacuucuacgacccgcuagucuuccccucagacgaguucgacgcauccaucucacaagucaacgaaaagaucaaccagucccucgcauucauccgaaaauccgacgaacuucuccacaacguuaacgucggcaaauccaccacuaacauaaugaucaccacgaucaucauaguaauuaucgucauacuccuccuccuaaucgcugucggacucuuccucuacugcaaggcccgcuaaggacuaguggaagcauuuuccuggcugauuaaaagaaauuacucagcuauggucaucuguuccuguuagaaggcuaugcagcauauuauauacuaugcgcauguuaugaaaugcauaauaaaaaauuuuaaaaaaucuaaaagaucuaaaaaaaaaaaaaaaaaaaaaaaaaaaaaaaaaaaaaaaaaaaaaaaaaaaaaaaaaaaaaaaaugcaucccccccccccccccccccccccccccccccaaaggcucuuuucagagccaccagaauu

SEQ ID NO: 15312 - RNA, 1904 nt, Artificial Sequence
  mRNA product Design g-2 comprising derived and/or modified sequence from HRSV(Memphis-37)__AIY60640.1__F-del_DSCav1_mut2 (opt1)
gggagaguccgcucagccagguugcagaagcggcuuagcguguguccuaaucuucucucugcguguagguaggccugugccgcaaacaagcuuaccauggagcugcccauccucaagaccaacgccaucaccacgauccuggccgcggugacccugugcuucgccagcucccagaacaucaccgaggaguucuaccagagcacgugcuccgccgucagcaagggcuaccucggcgcccugcgcaccgggugguacaccagcgugaucaccaucgagcuguccaacaucaaggagaacaagugcaacggcaccgacgccaaggugaagcucaucaagcaggagcuggacaaguacaagaacgcggucacggaccugcagcuccugaugcagagcaccccggccgccggcuccgggagcgcgaucugcuccggcaucgccgucugcaaggugcugcaccucgagggcgaggugaacaagaucaagaacgcccugcuguccaccaacaaggccgucgugagccucuccaacggggugagcguccugaccuucaaggugcuggaccucaagaacuacaucgacaagcagcugcugcccauccugaacaagcagagcugcuccauccccaacaucgagaccgucaucgaguuccagcagaagaacaaccgccuccuggagaucacgcgggaguucagcgugaacgcgggcgugaccacccccgucuccaccuacaugcugacgaacagcgagcuccugucccugaucaacgacaugccgaucaccaacgaccagaagaagcucaugagcaacaacgugcagaucgugcgccagcaguccuacagcaucaugugcaucaucaaggaggagguccuggccuacguggugcagcugccccucuacggggucaucgacacccccugcuggaagcugcacaccagcccccugugcacgaccaacaccaaggagggcuccaacaucugccucacccggacggaccgcgggugguacugcgacaacgccggcagcguguccuucuucccgcaggccgagaccugcaagguccagagcaaccggguguucugcgacaccaugaacucccugacccugcccagcgaggugaaccucugcaacaucgacaucuucaaccccaaguacgacugcaagaucaugacguccaagaccgacgucagcuccagcgugaucaccucccugggcgccaucgugagcugcuacgggaagaccaagugcacggcgagcaacaagaaccgcggcaucaucaagaccuucuccaacgggugcgacuacgucagcaacaagggcguggacaccguguccgucggcaacacccuguacugcgugaacaagcaggagggccagagccucuacgugaagggggagcccaucaucaacuucuacgacccgcuggucuuccccuccgacgaguucgacgccagcaucucccaggugaacgagaagaucaaccagagccuggccuucauccggaaguccgacgagcuccugcacaacgugaacgucggcaagagcaccacgaacaucaugaucaccaccaucaucaucgugaucaucgugauccugcugcuccugaucgccgucgggcuguuccucuacugcaaggcccgcugaggacuaguaauaaggaaacuguaugaaugucugugggcaggaagugaagagauccuucuguaaagguuuuuggaauuaugucugcugaauaauaaacuuuuuugaaauaauaaaucugguagaaaaaugagaucuaaaaaaaaaaaaaaaaaaaaaaaaaaaaaaaaaaaaaaaaaaaaaaaaaaaaaaaaaaaaaaaaugcaucccccccccccccccccccccccccccccccaaaggcucuuuucagagccaccagaauu

SEQ ID NO: 15313 - RNA, 1904 nt, Artificial Sequence
  mRNA product Design g-2 comprising derived and/or modified sequence from HRSV(Memphis-37)__AIY60640.1__F-del_DSCav1_mut2 (opt1)
gggagaguccgcucagccagguugcagaagcggcuuagcguguguccuaaucuucucucugcguguagguaggccugugccgcaaacaagcuuaccauggagcugcccauccucaagaccaacgccaucaccacgauccuggccgcggugacccugugcuucgccagcucccagaacaucaccgaggaguucuaccagagcacgugcuccgccgucagcaagggcuaccucggggcccugcgcaccggcugguacaccuccgugaucaccaucgagcugagcaacaucaaggagaacaagugcaacgggaccgacgccaaggugaagcucaucaagcaggagcuggacaaguacaagaacgcggucacggaccugcagcuccugaugcaguccaccccggccgccggcagcggguccgccaucugcagcggcaucgcggugugcaaggugcugcaccucgagggcgaggucaacaagaucaagaacgcccugcuguccaccaacaaggccguggugagccucuccaacggggucagcgugcugaccuucaaggugcuggaccucaagaacuacaucgacaagcagcugcugcccauccucaacaagcaguccugcagcauccccaacaucgagacggucaucgaguuccagcagaagaacaaccggcugcuggagaucacccgcgaguucuccgugaacgccggcgugaccacccccgucagcacguacaugcucaccaacuccgagcugcugagccucaucaacgacaugccgaucaccaacgaccagaagaagcugaugagcaacaacgugcagaucgugcggcagcaguccuacagcaucaugugcaucaucaaggaggagguccuggccuacguggugcagcucccccuguacggggucaucgacacccccugcuggaagcugcacacgagcccccucugcaccaccaacaccaaggagggcuccaacaucugccugacgcgcaccgaccgggggugguacugcgacaacgcgggcuccgugagcuucuucccgcaggccgagaccugcaaggugcaguccaaccgcgucuucugcgacaccaugaacagccugacgcuccccuccgaggugaaccugugcaacaucgacaucuucaaccccaaguacgacugcaagaucaugaccagcaagaccgacgucuccagcuccgugaucaccagccugggcgccaucguguccugcuacgggaagacgaagugcaccgccagcaacaagaaccggggcaucaucaagaccuucuccaacgggugcgacuacgucagcaacaagggcguggacaccguguccgucggcaacacgcucuacugcgugaacaagcaggaggggcagagccuguacgugaagggcgagcccaucaucaacuucuacgacccgcuggucuuccccagcgacgaguucgacgccuccaucagccaggugaacgagaagaucaaccagucccucgcguucauccgcaagagcgacgagcugcugcacaacgugaacgucgggaaguccaccaccaacaucaugaucaccaccaucaucaucgugaucaucgugauccuccugcugcucaucgccgucggccuguuccuguacugcaaggcccggugaggacuaguaauaaggaaacuguaugaaugucugugggcaggaagugaagagauccuucuguaaagguuuuuggaauuaugucugcugaauaauaaacuuuuuugaaauaauaaaucugguagaaaaaugagaucuaaaaaaaaaaaaaaaaaaaaaaaaaaaaaaaaaaaaaaaaaaaaaaaaaaaaaaaaaaaaaaaaugcaucccccccccccccccccccccccccccccccaaaggcucuuuucagagccaccagaauu

SEQ ID NO: 15314 - RNA, 1904 nt, Artificial Sequence
  mRNA product Design g-2 comprising derived and/or modified sequence from HRSV(Memphis-37)__AIY60640.1__F-del_DSCav1_mut2 (opt2)
gggagaguccgcucagccagguugcagaagcggcuuagcguguguccuaaucuucucucugcguguagguaggccugugccgcaaacaagcuuaccauggagcuccccauccucaagaccaacgccaucaccaccauccucgccgccgucacccucugcuucgccuccucccagaacaucaccgaggaguucuaccaguccaccugcuccgccgucuccaagggcuaccucggcgcccuccgcaccggcugguacaccuccgucaucaccaucgagcucuccaacaucaaggagaacaagugcaacggcaccgacgccaaggucaagcucaucaagcaggagcucgacaaguacaagaacgccgucaccgaccuccagcuccucaugcaguccacccccgccgccggcuccggcuccgccaucugcuccggcaucgccgucugcaagguccuccaccucgagggcgaggucaacaagaucaagaacgcccuccucuccaccaacaaggccgucgucucccucuccaacggcgucuccguccucaccuucaagguccucgaccucaagaacuacaucgacaagcagcuccuccccauccucaacaagcaguccugcuccauccccaacaucgagaccgucaucgaguuccagcagaagaacaaccgccuccucgagaucacccgcgaguucuccgucaacgccggcgucaccacccccgucuccaccuacaugcucaccaacuccgagcuccucucccucaucaacgacaugcccaucaccaacgaccagaagaagcucauguccaacaacguccagaucguccgccagcaguccuacuccaucaugugcaucaucaaggaggagguccucgccuacgucguccagcucccccucuacggcgucaucgacacccccugcuggaagcuccacaccuccccccucugcaccaccaacaccaaggagggcuccaacaucugccucacccgcaccgaccgcggcugguacugcgacaacgccggcuccgucuccuucuucccccaggccgagaccugcaagguccaguccaaccgcgucuucugcgacaccaugaacucccucacccuccccuccgaggucaaccucugcaacaucgacaucuucaaccccaaguacgacugcaagaucaugaccuccaagaccgacgucuccuccuccgucaucaccucccucggcgccaucgucuccugcuacggcaagaccaagugcaccgccuccaacaagaaccgcggcaucaucaagaccuucuccaacggcugcgacuacgucuccaacaagggcgucgacaccgucuccgucggcaacacccucuacugcgucaacaagcaggagggccagucccucuacgucaagggcgagcccaucaucaacuucuacgacccccucgucuuccccuccgacgaguucgacgccuccaucucccaggucaacgagaagaucaaccagucccucgccuucauccgcaaguccgacgagcuccuccacaacgucaacgucggcaaguccaccaccaacaucaugaucaccaccaucaucaucgucaucaucgucauccuccuccuccucaucgccgucggccucuuccucuacugcaaggcccgcugaggacuaguaauaaggaaacuguaugaaugucugugggcaggaagugaagagauccuucuguaaagguuuuuggaauuaugucugcugaauaauaaacuuuuuugaaauaauaaaucugguagaaaaaugagaucuaaaaaaaaaaaaaaaaaaaaaaaaaaaaaaaaaaaaaaaaaaaaaaaaaaaaaaaaaaaaaaaaugcaucccccccccccccccccccccccccccccccaaaggcucuuuucagagccaccagaauu

SEQ ID NO: 15315 - RNA, 1904 nt, Artificial Sequence
  mRNA product Design g-2 comprising derived and/or modified sequence from HRSV(Memphis-37)__AIY60640.1__F-del_DSCav1_mut2 (opt3)
gggagaguccgcucagccagguugcagaagcggcuuagcguguguccuaaucuucucucugcguguagguaggccugugccgcaaacaagcuuaccauggagcugcccauccucaagaccaacgccauuacaacuauacuugcugcagugacgcugugcuucgccagcucccagaauaucaccgaagaguuuuaccaaucuacauguucagcggucaguaaaggcuauuugggggcuuuaagaacuggaugguacaccagcguuauuacaaucgaacuguccaacauuaaggagaauaaaugcaacgguaccgacgccaaggugaaacuaaucaagcaggaacucgauaaguauaaaaaugcaguaacugaccugcagcuucugaugcagucuacuccugccgcuggcucggggucagcaauauguagcggaaucgccgugugcaaggucuugcaccucgagggcgaggugaacaaaauuaagaaugcucugcugaguaccaacaaagccguugugucccucucuaauggugucagcguguuaacguucaagguacuggaucuuaagaacuacaucgacaaacaauugcugccaauucuaaauaagcaguccuguucaaucccgaacauagaaacuguuauugaguuucagcagaaaaauaacaggcuccuggaaaucacccgggaguucagugugaaugcgggggucacaacucccgugagcaccuauaugcuuacaaacucugagcuguugucccucauuaacgauaugccuaucaccaaugaccaaaagaaacugaugucaaacaaugugcagaucguccgccagcagagcuacaguauuaugugcauaaucaaggaagagguuuuagcauaugugguacaacugccacucuacggagugauugauacgcccuguuggaaacuucauacuucuccucugugcacaaccaacacuaaggaaggcuccaauaucuguuugacacgaaccgaccguggcugguacugcgauaacgccgggagcgucucguuuuucccacaggcugagacguguaaggugcagucuaauagaguuuucugcgacaccaugaacucccuaacacugcccucagaagugaaucucugcaacauagauauuuucaauccuaaauaugacuguaagaucaugacaaguaaaaccgaugucagcuccucugugaucacaagccugggagccauuguaucaugcuacgguaagacuaaauguaccgcaaguaacaagaauaggggcaucauuaagacauuuuccaacgggugcgacuauguuagcaauaaaggaguggacaccgucucugugggcaacacucuuuacugugucaacaagcaagagggucagucacuguaugugaaaggggagccaauaaucaauuucuacgauccguugguuuuucccagugacgaauuugaugcuagcauuucccaggugaacgagaagaucaaucagucucucgccuuuauccggaaaucggacgaacuguuacacaacguaaaugucggaaagagcacgacaaacauuaugauaaccacuaucauuaucgugauuaucguuauacugcuacuccugaucgcggugggccuuuucuuguauugcaaggcccgcugaggacuaguaauaaggaaacuguaugaaugucugugggcaggaagugaagagauccuucuguaaagguuuuuggaauuaugucugcugaauaauaaacuuuuuugaaauaauaaaucugguagaaaaaugagaucuaaaaaaaaaaaaaaaaaaaaaaaaaaaaaaaaaaaaaaaaaaaaaaaaaaaaaaaaaaaaaaaaugcaucccccccccccccccccccccccccccccccaaaggcucuuuucagagccaccagaauu

SEQ ID NO: 15316 - RNA, 1904 nt, Artificial Sequence
  mRNA product Design g-2 comprising derived and/or modified sequence from HRSV(Memphis-37)__AIY60640.1__F-del_DSCav1_mut2 (opt4)
gggagaguccgcucagccagguugcagaagcggcuuagcguguguccuaaucuucucucugcguguagguaggccugugccgcaaacaagcuuaccauggagcugcccauccugaagaccaacgccaucaccaccauccuggccgccgugacccugugcuucgccagcagccagaacaucaccgaggaguucuaccagagcaccugcagcgccgugagcaagggcuaccugggcgcccugagaaccggcugguacaccagcgugaucaccaucgagcugagcaacaucaaggagaacaagugcaacggcaccgacgccaaggugaagcugaucaagcaggagcuggacaaguacaagaacgccgugaccgaccugcagcugcugaugcagagcacccccgccgccggcagcggcagcgccaucugcagcggcaucgccgugugcaaggugcugcaccuggagggcgaggugaacaagaucaagaacgcccugcugagcaccaacaaggccguggugagccugagcaacggcgugagcgugcugaccuucaaggugcuggaccugaagaacuacaucgacaagcagcugcugcccauccugaacaagcagagcugcagcauccccaacaucgagaccgugaucgaguuccagcagaagaacaacagacugcuggagaucaccagagaguucagcgugaacgccggcgugaccacccccgugagcaccuacaugcugaccaacagcgagcugcugagccugaucaacgacaugcccaucaccaacgaccagaagaagcugaugagcaacaacgugcagaucgugagacagcagagcuacagcaucaugugcaucaucaaggaggaggugcuggccuacguggugcagcugccccuguacggcgugaucgacacccccugcuggaagcugcacaccagcccccugugcaccaccaacaccaaggagggcagcaacaucugccugaccagaaccgacagaggcugguacugcgacaacgccggcagcgugagcuucuucccccaggccgagaccugcaaggugcagagcaacagaguguucugcgacaccaugaacagccugacccugcccagcgaggugaaccugugcaacaucgacaucuucaaccccaaguacgacugcaagaucaugaccagcaagaccgacgugagcagcagcgugaucaccagccugggcgccaucgugagcugcuacggcaagaccaagugcaccgccagcaacaagaacagaggcaucaucaagaccuucagcaacggcugcgacuacgugagcaacaagggcguggacaccgugagcgugggcaacacccuguacugcgugaacaagcaggagggccagagccuguacgugaagggcgagcccaucaucaacuucuacgacccccugguguuccccagcgacgaguucgacgccagcaucagccaggugaacgagaagaucaaccagagccuggccuucaucagaaagagcgacgagcugcugcacaacgugaacgugggcaagagcaccaccaacaucaugaucaccaccaucaucaucgugaucaucgugauccugcugcugcugaucgccgugggccuguuccuguacugcaaggccagaugaggacuaguaauaaggaaacuguaugaaugucugugggcaggaagugaagagauccuucuguaaagguuuuuggaauuaugucugcugaauaauaaacuuuuuugaaauaauaaaucugguagaaaaaugagaucuaaaaaaaaaaaaaaaaaaaaaaaaaaaaaaaaaaaaaaaaaaaaaaaaaaaaaaaaaaaaaaaaugcaucccccccccccccccccccccccccccccccaaaggcucuuuucagagccaccagaauu

SEQ ID NO: 15317 - RNA, 1904 nt, Artificial Sequence
  mRNA product Design g-2 comprising derived and/or modified sequence from HRSV(Memphis-37)__AIY60640.1__F-del_DSCav1_mut2 (opt5)
gggagaguccgcucagccagguugcagaagcggcuuagcguguguccuaaucuucucucugcguguagguaggccugugccgcaaacaagcuuaccauggagcugcccauccucaagaccaacgccauuacaacgauccuggcugccgugacccuuugcuucgcgagcucccagaauauuacagaagaguuuuaccaaucuaccuguagcgcugucuccaaaggcuaucugggggcccucagaacaggaugguacaccucuguuaucacaauugaacugagcaacaucaaggagaauaaaugcaacggcaccgacgccaaggugaaacuuaucaagcaggaacuggauaaguauaaaaaugcugugacggaccuccagcugcugaugcaguccaccccugccgcugggucuggaagcgccauuuguuccggcaucgcggucugcaaggugcuccaccuggagggggagguuaacaaaauuaagaaugcccuucugagcacaaacaaagcuguggucucucucuccaauggagugagcguucugaccuucaaggugcuugaucugaagaacuacaucgacaaacaacuccugccgauucugaauaagcagucuuguuccauccccaacauugaaacagucaucgaguuucagcagaaaaauaaccggcuccuggaaaucacccgcgaguucagcgugaaugccggcgugacgacaccugucucuaccuauaugcuuacaaacuccgagcugcucagccugauuaacgauaugcccaucaccaaugaccaaaagaaacuuauguccaacaauguucagauugugagacagcagucuuacagcaucaugugcauuaucaaggaagaggugcuggcuuaugucgugcaacucccucuguacggcguuaucgauacccccuguuggaaacugcauacauccccucucugcacgaccaacacaaaggaagggagcaauauuugucugacccggacagaccgcggaugguacugcgauaacgccggcucuguguccuuuuucccgcaggcggagaccuguaagguccagagcaauagaguguuuugcgacacgaugaacucucuuacacugcccagcgaaguuaaucucugcaacaucgauauuuucaauccuaaauaugacuguaagaucaugaccuccaaaaccgaugugucuagcuccgucauuacaagccugggggccaucgugucuugcuacggaaagaccaaauguacagcuuccaacaagaaucggggcaucauuaagacguuuagcaacgggugcgacuaugucucuaauaaaggaguggacaccguuuccgugggcaacacacuuuacugugucaacaagcaagagggccagagccuguaugugaaaggggagcccaucauuaauuucuacgauccucucguuuuucccuccgacgaguucgaugccucuaucagccaggugaacgaaaagauuaaucagucccuggcuuuuauccgcaaaucugacgaacugcuccacaacgucaaugugggaaagagcaccacaaacauuaugaucaccacgaucauuaucgugauuaucguuauucugcuucugcucaucgccgucggccuguuccuguauugcaaggccagaugaggacuaguaauaaggaaacuguaugaaugucugugggcaggaagugaagagauccuucuguaaagguuuuuggaauuaugucugcugaauaauaaacuuuuuugaaauaauaaaucugguagaaaaaugagaucuaaaaaaaaaaaaaaaaaaaaaaaaaaaaaaaaaaaaaaaaaaaaaaaaaaaaaaaaaaaaaaaaugcaucccccccccccccccccccccccccccccccaaaggcucuuuucagagccaccagaauu

SEQ ID NO: 15318 - RNA, 1904 nt, Artificial Sequence
  mRNA product Design g-2 comprising derived and/or modified sequence from HRSV(Memphis-37)__AIY60640.1__F-del_DSCav1_mut2 (opt6)
gggagaguccgcucagccagguugcagaagcggcuuagcguguguccuaaucuucucucugcguguagguaggccugugccgcaaacaagcuuaccauggaacuaccaauacucaaaacaaacgcaauaacaacaauuuuagcugcaguaacacuuuguuucgcauccucccaaaauauaacagaagaauuuuaucaaucaaccugcucagccgucuccaaaggauaucuaggugcacuacgcacuggaugguacacaagugucaucacaauagaacuuuccaacaucaaagaaaauaaauguaauggaacugacgcaaaaguaaaacucauaaaacaagaacuagacaaauacaaaaacgcaguaacagaccuacaacuauuaaugcaaucaacaccagcagcaggauccggcagugccauaugcucuggaauagcagucugcaaaguuuuacacuuagaaggcgaaguaaacaaaaucaaaaacgcccuacuaucuacaaauaaagccgucguaucucucucaaauggaguaucaguacuaacauucaaaguauuagacuuaaaaaacuacaucgauaaacaauuauugccaauauuaaacaaacaaucuugcucaauaccaaauauagaaacagucauagaauuucaacaaaaaaauaaccgauuauuagaaauaacacgagaauuuucaguaaaugccggagucaccacaccaguaucaacauacaugcuaacaaauucagaacuauuaucauuaauaaacgacaugccuauuacaaaugaucaaaaaaaacuaauguccaacaauguacaaauaguccgacaacaaagcuacucaaucauguguauaauaaaagaagaaguacuugcauacguaguacaauuaccacuauacggaguuaucgacacaccaugcuggaaacuccacacuucaccacucugcaccacaaacacaaaagaaggcucaaacauaugccuaacaagaacagaccgaggaugguacugcgacaacgcaggaucaguaucauucuucccacaagcagaaacuugcaaaguacaaucuaacagaguuuucugugacaccaugaauagccuaacacuccccuccgaaguuaaccuauguaacauagauauauuuaaucccaaauaugauugcaaaaucaugacaucuaaaaccgacguaucaucaucuguaaucacaucacuaggugccauagucucaugcuacggcaaaacaaaaugcaccgccucaaacaaaaaccgagguauaauaaaaaccuucaguaauggaugugacuacguaucaaacaaagguguugauaccguaagcgucggcaacacccuauacugcguaaauaaacaagaaggccaaucacuauacgucaaaggcgaaccaauuauuaacuucuaugacccacucgucuuucccuccgacgaauuugacgcaagcauaucacaaguaaacgaaaaaauaaaccaaucacuagcauucauacgcaaaucagaugaacuacuacauaacguaaacguaggaaaauccacuacaaauauaaugaucacaacaauaauaaucguaauuauagucauauuauuacuacuaauagcaguaggacuuuuccuauacuguaaagcaagauaaggacuaguaauaaggaaacuguaugaaugucugugggcaggaagugaagagauccuucuguaaagguuuuuggaauuaugucugcugaauaauaaacuuuuuugaaauaauaaaucugguagaaaaaugagaucuaaaaaaaaaaaaaaaaaaaaaaaaaaaaaaaaaaaaaaaaaaaaaaaaaaaaaaaaaaaaaaaaugcaucccccccccccccccccccccccccccccccaaaggcucuuuucagagccaccagaauu

SEQ ID NO: 15319 - RNA, 1904 nt, Artificial Sequence
  mRNA product Design g-2 comprising derived and/or modified sequence from HRSV(Memphis-37)__AIY60640.1__F-del_DSCav1_mut2 (opt11)
gggagaguccgcucagccagguugcagaagcggcuuagcguguguccuaaucuucucucugcguguagguaggccugugccgcaaacaagcuuaccauggaacuucccauccucaagaccaacgcuauuacgaccauccucgccgcagucacccucugcuucgcgucaucccaaaacaucaccgaagaauuuuaccaauccacaugcuccgcagucucaaaaggcuaccuaggagcccuacgcaccggaugguacacauccgucaucacaaucgaacucuccaacauaaaagaaaacaaaugcaacggcaccgaugccaaaguaaaacugauuaaacaagaacucgacaaauacaagaacgccgucacagaccuacagcuccucaugcaaucaacucccgccgccggcagcggauccgcuaucugcucaggcaucgccguaugcaaaguccuccaccuagaaggcgaaguaaacaaaaucaagaacgcacuacucucaacaaacaaagccgucgucucccucuccaacggcgucuccguccuuaccuucaaaguccucgaccuuaagaacuacauugacaaacaacuccuacccauccucaacaaacaauccugcucuauaccuaauauagaaaccguaaucgaauuucaacagaaaaacaaccgccuccucgaaauuacccgcgaguucucaguaaacgccggcguaaccacccccgucuccaccuacaugcucacaaauucagaacuccucagccucaucaacgacaugcccauaaccaacgaccaaaagaaacucaugucaaacaacguccaaaucgucaggcaacaaagcuacagcaucaugugcaucauuaaagaagaaguacucgccuacgucgugcaacuaccccucuacggcgucauagacacacccugcuggaaacuucacacaucaccgcucugcaccacaaacaccaaagaaggcaguaacauaugccucacccgaaccgaccgcggaugguacugcgacaacgccggauccgucagcuucuucccacaagccgaaaccugcaaaguacaauccaaccgagucuucugcgacaccaugaacucucuuacgcuccccucagaagucaaccuaugcaacaucgacaucuucaaccccaaauacgacugcaaaaucaugaccuccaaaacagacgucuccuccucagugauaaccucccucggcgccauugucuccugcuacggcaaaaccaaaugcaccgccuccaacaaaaaccgugggaucaucaaaaccuucucaaacggcugcgacuacguauccaauaagggugucgacacagucuccguaggcaauacccucuauugcgucaacaaacaagaaggccaaucccucuacgucaaaggcgaaccuaucaucaacuucuacgacccgcuagucuuccccucagacgaguucgacgcauccaucucacaagucaacgaaaagaucaaccagucccucgcauucauccgaaaauccgacgaacuucuccacaacguuaacgucggcaaauccaccacuaacauaaugaucaccacgaucaucauaguaauuaucgucauacuccuccuccuaaucgcugucggacucuuccucuacugcaaggcccgcuaaggacuaguaauaaggaaacuguaugaaugucugugggcaggaagugaagagauccuucuguaaagguuuuuggaauuaugucugcugaauaauaaacuuuuuugaaauaauaaaucugguagaaaaaugagaucuaaaaaaaaaaaaaaaaaaaaaaaaaaaaaaaaaaaaaaaaaaaaaaaaaaaaaaaaaaaaaaaaugcaucccccccccccccccccccccccccccccccaaaggcucuuuucagagccaccagaauu

SEQ ID NO: 15320 - RNA, 2136 nt, Artificial Sequence
  mRNA product Design g-3 comprising derived and/or modified sequence from HRSV(Memphis-37)__AIY60640.1__F-del_DSCav1_mut2 (opt1)
gggagaguccgcucagccagguugcagaagcggcuuagcguguguccuaaucuucucucugcguguagguaggccugugccgcaaacaagcuuaccauggagcugcccauccucaagaccaacgccaucaccacgauccuggccgcggugacccugugcuucgccagcucccagaacaucaccgaggaguucuaccagagcacgugcuccgccgucagcaagggcuaccucggcgcccugcgcaccgggugguacaccagcgugaucaccaucgagcuguccaacaucaaggagaacaagugcaacggcaccgacgccaaggugaagcucaucaagcaggagcuggacaaguacaagaacgcggucacggaccugcagcuccugaugcagagcaccccggccgccggcuccgggagcgcgaucugcuccggcaucgccgucugcaaggugcugcaccucgagggcgaggugaacaagaucaagaacgcccugcuguccaccaacaaggccgucgugagccucuccaacggggugagcguccugaccuucaaggugcuggaccucaagaacuacaucgacaagcagcugcugcccauccugaacaagcagagcugcuccauccccaacaucgagaccgucaucgaguuccagcagaagaacaaccgccuccuggagaucacgcgggaguucagcgugaacgcgggcgugaccacccccgucuccaccuacaugcugacgaacagcgagcuccugucccugaucaacgacaugccgaucaccaacgaccagaagaagcucaugagcaacaacgugcagaucgugcgccagcaguccuacagcaucaugugcaucaucaaggaggagguccuggccuacguggugcagcugccccucuacggggucaucgacacccccugcuggaagcugcacaccagcccccugugcacgaccaacaccaaggagggcuccaacaucugccucacccggacggaccgcgggugguacugcgacaacgccggcagcguguccuucuucccgcaggccgagaccugcaagguccagagcaaccggguguucugcgacaccaugaacucccugacccugcccagcgaggugaaccucugcaacaucgacaucuucaaccccaaguacgacugcaagaucaugacguccaagaccgacgucagcuccagcgugaucaccucccugggcgccaucgugagcugcuacgggaagaccaagugcacggcgagcaacaagaaccgcggcaucaucaagaccuucuccaacgggugcgacuacgucagcaacaagggcguggacaccguguccgucggcaacacccuguacugcgugaacaagcaggagggccagagccucuacgugaagggggagcccaucaucaacuucuacgacccgcuggucuuccccuccgacgaguucgacgccagcaucucccaggugaacgagaagaucaaccagagccuggccuucauccggaaguccgacgagcuccugcacaacgugaacgucggcaagagcaccacgaacaucaugaucaccaccaucaucaucgugaucaucgugauccugcugcuccugaucgccgucgggcuguuccucuacugcaaggcccgcugaggacuagugaagggaacacccaaauuuaauucagccuuaagcacaauuaauuaagagugaaacguaauuguacaagcaguuggucacccaccauagggcaugaucaacaccgcaaccuuuccuuuuucccccagugauucugaaaaaccccucuucccuucagcuugcuuagauguuccaaauuuaguaagcuuaaggcggccuacagaagaaaaagaaaaaaaaggccacaaaaguucccucucacuuucaguaaauaaaauaaaagcagcaacagaaauaaagaaauaaaugaaauucaaaaugaaauaaauauuguguugugcagcauuaaaaaaucaauaaaaauuaaaaaugagcaagaucuaaaaaaaaaaaaaaaaaaaaaaaaaaaaaaaaaaaaaaaaaaaaaaaaaaaaaaaaaaaaaaaaugcaucccccccccccccccccccccccccccccccaaaggcucuuuucagagccaccagaauu

SEQ ID NO: 15321 - RNA, 2136 nt, Artificial Sequence
  mRNA product Design g-3 comprising derived and/or modified sequence from HRSV(Memphis-37)__AIY60640.1__F-del_DSCav1_mut2 (opt1)
gggagaguccgcucagccagguugcagaagcggcuuagcguguguccuaaucuucucucugcguguagguaggccugugccgcaaacaagcuuaccauggagcugcccauccucaagaccaacgccaucaccacgauccuggccgcggugacccugugcuucgccagcucccagaacaucaccgaggaguucuaccagagcacgugcuccgccgucagcaagggcuaccucggggcccugcgcaccggcugguacaccuccgugaucaccaucgagcugagcaacaucaaggagaacaagugcaacgggaccgacgccaaggugaagcucaucaagcaggagcuggacaaguacaagaacgcggucacggaccugcagcuccugaugcaguccaccccggccgccggcagcggguccgccaucugcagcggcaucgcggugugcaaggugcugcaccucgagggcgaggucaacaagaucaagaacgcccugcuguccaccaacaaggccguggugagccucuccaacggggucagcgugcugaccuucaaggugcuggaccucaagaacuacaucgacaagcagcugcugcccauccucaacaagcaguccugcagcauccccaacaucgagacggucaucgaguuccagcagaagaacaaccggcugcuggagaucacccgcgaguucuccgugaacgccggcgugaccacccccgucagcacguacaugcucaccaacuccgagcugcugagccucaucaacgacaugccgaucaccaacgaccagaagaagcugaugagcaacaacgugcagaucgugcggcagcaguccuacagcaucaugugcaucaucaaggaggagguccuggccuacguggugcagcucccccuguacggggucaucgacacccccugcuggaagcugcacacgagcccccucugcaccaccaacaccaaggagggcuccaacaucugccugacgcgcaccgaccgggggugguacugcgacaacgcgggcuccgugagcuucuucccgcaggccgagaccugcaaggugcaguccaaccgcgucuucugcgacaccaugaacagccugacgcuccccuccgaggugaaccugugcaacaucgacaucuucaaccccaaguacgacugcaagaucaugaccagcaagaccgacgucuccagcuccgugaucaccagccugggcgccaucguguccugcuacgggaagacgaagugcaccgccagcaacaagaaccggggcaucaucaagaccuucuccaacgggugcgacuacgucagcaacaagggcguggacaccguguccgucggcaacacgcucuacugcgugaacaagcaggaggggcagagccuguacgugaagggcgagcccaucaucaacuucuacgacccgcuggucuuccccagcgacgaguucgacgccuccaucagccaggugaacgagaagaucaaccagucccucgcguucauccgcaagagcgacgagcugcugcacaacgugaacgucgggaaguccaccaccaacaucaugaucaccaccaucaucaucgugaucaucgugauccuccugcugcucaucgccgucggccuguuccuguacugcaaggcccggugaggacuagugaagggaacacccaaauuuaauucagccuuaagcacaauuaauuaagagugaaacguaauuguacaagcaguuggucacccaccauagggcaugaucaacaccgcaaccuuuccuuuuucccccagugauucugaaaaaccccucuucccuucagcuugcuuagauguuccaaauuuaguaagcuuaaggcggccuacagaagaaaaagaaaaaaaaggccacaaaaguucccucucacuuucaguaaauaaaauaaaagcagcaacagaaauaaagaaauaaaugaaauucaaaaugaaauaaauauuguguugugcagcauuaaaaaaucaauaaaaauuaaaaaugagcaagaucuaaaaaaaaaaaaaaaaaaaaaaaaaaaaaaaaaaaaaaaaaaaaaaaaaaaaaaaaaaaaaaaaugcaucccccccccccccccccccccccccccccccaaaggcucuuuucagagccaccagaauu

SEQ ID NO: 15322 - RNA, 2136 nt, Artificial Sequence
  mRNA product Design g-3 comprising derived and/or modified sequence from HRSV(Memphis-37)__AIY60640.1__F-del_DSCav1_mut2 (opt2)
gggagaguccgcucagccagguugcagaagcggcuuagcguguguccuaaucuucucucugcguguagguaggccugugccgcaaacaagcuuaccauggagcuccccauccucaagaccaacgccaucaccaccauccucgccgccgucacccucugcuucgccuccucccagaacaucaccgaggaguucuaccaguccaccugcuccgccgucuccaagggcuaccucggcgcccuccgcaccggcugguacaccuccgucaucaccaucgagcucuccaacaucaaggagaacaagugcaacggcaccgacgccaaggucaagcucaucaagcaggagcucgacaaguacaagaacgccgucaccgaccuccagcuccucaugcaguccacccccgccgccggcuccggcuccgccaucugcuccggcaucgccgucugcaagguccuccaccucgagggcgaggucaacaagaucaagaacgcccuccucuccaccaacaaggccgucgucucccucuccaacggcgucuccguccucaccuucaagguccucgaccucaagaacuacaucgacaagcagcuccuccccauccucaacaagcaguccugcuccauccccaacaucgagaccgucaucgaguuccagcagaagaacaaccgccuccucgagaucacccgcgaguucuccgucaacgccggcgucaccacccccgucuccaccuacaugcucaccaacuccgagcuccucucccucaucaacgacaugcccaucaccaacgaccagaagaagcucauguccaacaacguccagaucguccgccagcaguccuacuccaucaugugcaucaucaaggaggagguccucgccuacgucguccagcucccccucuacggcgucaucgacacccccugcuggaagcuccacaccuccccccucugcaccaccaacaccaaggagggcuccaacaucugccucacccgcaccgaccgcggcugguacugcgacaacgccggcuccgucuccuucuucccccaggccgagaccugcaagguccaguccaaccgcgucuucugcgacaccaugaacucccucacccuccccuccgaggucaaccucugcaacaucgacaucuucaaccccaaguacgacugcaagaucaugaccuccaagaccgacgucuccuccuccgucaucaccucccucggcgccaucgucuccugcuacggcaagaccaagugcaccgccuccaacaagaaccgcggcaucaucaagaccuucuccaacggcugcgacuacgucuccaacaagggcgucgacaccgucuccgucggcaacacccucuacugcgucaacaagcaggagggccagucccucuacgucaagggcgagcccaucaucaacuucuacgacccccucgucuuccccuccgacgaguucgacgccuccaucucccaggucaacgagaagaucaaccagucccucgccuucauccgcaaguccgacgagcuccuccacaacgucaacgucggcaaguccaccaccaacaucaugaucaccaccaucaucaucgucaucaucgucauccuccuccuccucaucgccgucggccucuuccucuacugcaaggcccgcugaggacuagugaagggaacacccaaauuuaauucagccuuaagcacaauuaauuaagagugaaacguaauuguacaagcaguuggucacccaccauagggcaugaucaacaccgcaaccuuuccuuuuucccccagugauucugaaaaaccccucuucccuucagcuugcuuagauguuccaaauuuaguaagcuuaaggcggccuacagaagaaaaagaaaaaaaaggccacaaaaguucccucucacuuucaguaaauaaaauaaaagcagcaacagaaauaaagaaauaaaugaaauucaaaaugaaauaaauauuguguugugcagcauuaaaaaaucaauaaaaauuaaaaaugagcaagaucuaaaaaaaaaaaaaaaaaaaaaaaaaaaaaaaaaaaaaaaaaaaaaaaaaaaaaaaaaaaaaaaaugcaucccccccccccccccccccccccccccccccaaaggcucuuuucagagccaccagaauu

SEQ ID NO: 15323 - RNA, 2136 nt, Artificial Sequence
  mRNA product Design g-3 comprising derived and/or modified sequence from HRSV(Memphis-37)__AIY60640.1__F-del_DSCav1_mut2 (opt3)
gggagaguccgcucagccagguugcagaagcggcuuagcguguguccuaaucuucucucugcguguagguaggccugugccgcaaacaagcuuaccauggagcugcccauccucaagaccaacgccauuacaacuauacuugcugcagugacgcugugcuucgccagcucccagaauaucaccgaagaguuuuaccaaucuacauguucagcggucaguaaaggcuauuugggggcuuuaagaacuggaugguacaccagcguuauuacaaucgaacuguccaacauuaaggagaauaaaugcaacgguaccgacgccaaggugaaacuaaucaagcaggaacucgauaaguauaaaaaugcaguaacugaccugcagcuucugaugcagucuacuccugccgcuggcucggggucagcaauauguagcggaaucgccgugugcaaggucuugcaccucgagggcgaggugaacaaaauuaagaaugcucugcugaguaccaacaaagccguugugucccucucuaauggugucagcguguuaacguucaagguacuggaucuuaagaacuacaucgacaaacaauugcugccaauucuaaauaagcaguccuguucaaucccgaacauagaaacuguuauugaguuucagcagaaaaauaacaggcuccuggaaaucacccgggaguucagugugaaugcgggggucacaacucccgugagcaccuauaugcuuacaaacucugagcuguugucccucauuaacgauaugccuaucaccaaugaccaaaagaaacugaugucaaacaaugugcagaucguccgccagcagagcuacaguauuaugugcauaaucaaggaagagguuuuagcauaugugguacaacugccacucuacggagugauugauacgcccuguuggaaacuucauacuucuccucugugcacaaccaacacuaaggaaggcuccaauaucuguuugacacgaaccgaccguggcugguacugcgauaacgccgggagcgucucguuuuucccacaggcugagacguguaaggugcagucuaauagaguuuucugcgacaccaugaacucccuaacacugcccucagaagugaaucucugcaacauagauauuuucaauccuaaauaugacuguaagaucaugacaaguaaaaccgaugucagcuccucugugaucacaagccugggagccauuguaucaugcuacgguaagacuaaauguaccgcaaguaacaagaauaggggcaucauuaagacauuuuccaacgggugcgacuauguuagcaauaaaggaguggacaccgucucugugggcaacacucuuuacugugucaacaagcaagagggucagucacuguaugugaaaggggagccaauaaucaauuucuacgauccguugguuuuucccagugacgaauuugaugcuagcauuucccaggugaacgagaagaucaaucagucucucgccuuuauccggaaaucggacgaacuguuacacaacguaaaugucggaaagagcacgacaaacauuaugauaaccacuaucauuaucgugauuaucguuauacugcuacuccugaucgcggugggccuuuucuuguauugcaaggcccgcugaggacuagugaagggaacacccaaauuuaauucagccuuaagcacaauuaauuaagagugaaacguaauuguacaagcaguuggucacccaccauagggcaugaucaacaccgcaaccuuuccuuuuucccccagugauucugaaaaaccccucuucccuucagcuugcuuagauguuccaaauuuaguaagcuuaaggcggccuacagaagaaaaagaaaaaaaaggccacaaaaguucccucucacuuucaguaaauaaaauaaaagcagcaacagaaauaaagaaauaaaugaaauucaaaaugaaauaaauauuguguugugcagcauuaaaaaaucaauaaaaauuaaaaaugagcaagaucuaaaaaaaaaaaaaaaaaaaaaaaaaaaaaaaaaaaaaaaaaaaaaaaaaaaaaaaaaaaaaaaaugcaucccccccccccccccccccccccccccccccaaaggcucuuuucagagccaccagaauu

SEQ ID NO: 15324 - RNA, 2136 nt, Artificial Sequence
  mRNA product Design g-3 comprising derived and/or modified sequence from HRSV(Memphis-37)__AIY60640.1__F-del_DSCav1_mut2 (opt4)
gggagaguccgcucagccagguugcagaagcggcuuagcguguguccuaaucuucucucugcguguagguaggccugugccgcaaacaagcuuaccauggagcugcccauccugaagaccaacgccaucaccaccauccuggccgccgugacccugugcuucgccagcagccagaacaucaccgaggaguucuaccagagcaccugcagcgccgugagcaagggcuaccugggcgcccugagaaccggcugguacaccagcgugaucaccaucgagcugagcaacaucaaggagaacaagugcaacggcaccgacgccaaggugaagcugaucaagcaggagcuggacaaguacaagaacgccgugaccgaccugcagcugcugaugcagagcacccccgccgccggcagcggcagcgccaucugcagcggcaucgccgugugcaaggugcugcaccuggagggcgaggugaacaagaucaagaacgcccugcugagcaccaacaaggccguggugagccugagcaacggcgugagcgugcugaccuucaaggugcuggaccugaagaacuacaucgacaagcagcugcugcccauccugaacaagcagagcugcagcauccccaacaucgagaccgugaucgaguuccagcagaagaacaacagacugcuggagaucaccagagaguucagcgugaacgccggcgugaccacccccgugagcaccuacaugcugaccaacagcgagcugcugagccugaucaacgacaugcccaucaccaacgaccagaagaagcugaugagcaacaacgugcagaucgugagacagcagagcuacagcaucaugugcaucaucaaggaggaggugcuggccuacguggugcagcugccccuguacggcgugaucgacacccccugcuggaagcugcacaccagcccccugugcaccaccaacaccaaggagggcagcaacaucugccugaccagaaccgacagaggcugguacugcgacaacgccggcagcgugagcuucuucccccaggccgagaccugcaaggugcagagcaacagaguguucugcgacaccaugaacagccugacccugcccagcgaggugaaccugugcaacaucgacaucuucaaccccaaguacgacugcaagaucaugaccagcaagaccgacgugagcagcagcgugaucaccagccugggcgccaucgugagcugcuacggcaagaccaagugcaccgccagcaacaagaacagaggcaucaucaagaccuucagcaacggcugcgacuacgugagcaacaagggcguggacaccgugagcgugggcaacacccuguacugcgugaacaagcaggagggccagagccuguacgugaagggcgagcccaucaucaacuucuacgacccccugguguuccccagcgacgaguucgacgccagcaucagccaggugaacgagaagaucaaccagagccuggccuucaucagaaagagcgacgagcugcugcacaacgugaacgugggcaagagcaccaccaacaucaugaucaccaccaucaucaucgugaucaucgugauccugcugcugcugaucgccgugggccuguuccuguacugcaaggccagaugaggacuagugaagggaacacccaaauuuaauucagccuuaagcacaauuaauuaagagugaaacguaauuguacaagcaguuggucacccaccauagggcaugaucaacaccgcaaccuuuccuuuuucccccagugauucugaaaaaccccucuucccuucagcuugcuuagauguuccaaauuuaguaagcuuaaggcggccuacagaagaaaaagaaaaaaaaggccacaaaaguucccucucacuuucaguaaauaaaauaaaagcagcaacagaaauaaagaaauaaaugaaauucaaaaugaaauaaauauuguguugugcagcauuaaaaaaucaauaaaaauuaaaaaugagcaagaucuaaaaaaaaaaaaaaaaaaaaaaaaaaaaaaaaaaaaaaaaaaaaaaaaaaaaaaaaaaaaaaaaugcaucccccccccccccccccccccccccccccccaaaggcucuuuucagagccaccagaauu

SEQ ID NO: 15325 - RNA, 2136 nt, Artificial Sequence
  mRNA product Design g-3 comprising derived and/or modified sequence from HRSV(Memphis-37)__AIY60640.1__F-del_DSCav1_mut2 (opt5)
gggagaguccgcucagccagguugcagaagcggcuuagcguguguccuaaucuucucucugcguguagguaggccugugccgcaaacaagcuuaccauggagcugcccauccucaagaccaacgccauuacaacgauccuggcugccgugacccuuugcuucgcgagcucccagaauauuacagaagaguuuuaccaaucuaccuguagcgcugucuccaaaggcuaucugggggcccucagaacaggaugguacaccucuguuaucacaauugaacugagcaacaucaaggagaauaaaugcaacggcaccgacgccaaggugaaacuuaucaagcaggaacuggauaaguauaaaaaugcugugacggaccuccagcugcugaugcaguccaccccugccgcugggucuggaagcgccauuuguuccggcaucgcggucugcaaggugcuccaccuggagggggagguuaacaaaauuaagaaugcccuucugagcacaaacaaagcuguggucucucucuccaauggagugagcguucugaccuucaaggugcuugaucugaagaacuacaucgacaaacaacuccugccgauucugaauaagcagucuuguuccauccccaacauugaaacagucaucgaguuucagcagaaaaauaaccggcuccuggaaaucacccgcgaguucagcgugaaugccggcgugacgacaccugucucuaccuauaugcuuacaaacuccgagcugcucagccugauuaacgauaugcccaucaccaaugaccaaaagaaacuuauguccaacaauguucagauugugagacagcagucuuacagcaucaugugcauuaucaaggaagaggugcuggcuuaugucgugcaacucccucuguacggcguuaucgauacccccuguuggaaacugcauacauccccucucugcacgaccaacacaaaggaagggagcaauauuugucugacccggacagaccgcggaugguacugcgauaacgccggcucuguguccuuuuucccgcaggcggagaccuguaagguccagagcaauagaguguuuugcgacacgaugaacucucuuacacugcccagcgaaguuaaucucugcaacaucgauauuuucaauccuaaauaugacuguaagaucaugaccuccaaaaccgaugugucuagcuccgucauuacaagccugggggccaucgugucuugcuacggaaagaccaaauguacagcuuccaacaagaaucggggcaucauuaagacguuuagcaacgggugcgacuaugucucuaauaaaggaguggacaccguuuccgugggcaacacacuuuacugugucaacaagcaagagggccagagccuguaugugaaaggggagcccaucauuaauuucuacgauccucucguuuuucccuccgacgaguucgaugccucuaucagccaggugaacgaaaagauuaaucagucccuggcuuuuauccgcaaaucugacgaacugcuccacaacgucaaugugggaaagagcaccacaaacauuaugaucaccacgaucauuaucgugauuaucguuauucugcuucugcucaucgccgucggccuguuccuguauugcaaggccagaugaggacuagugaagggaacacccaaauuuaauucagccuuaagcacaauuaauuaagagugaaacguaauuguacaagcaguuggucacccaccauagggcaugaucaacaccgcaaccuuuccuuuuucccccagugauucugaaaaaccccucuucccuucagcuugcuuagauguuccaaauuuaguaagcuuaaggcggccuacagaagaaaaagaaaaaaaaggccacaaaaguucccucucacuuucaguaaauaaaauaaaagcagcaacagaaauaaagaaauaaaugaaauucaaaaugaaauaaauauuguguugugcagcauuaaaaaaucaauaaaaauuaaaaaugagcaagaucuaaaaaaaaaaaaaaaaaaaaaaaaaaaaaaaaaaaaaaaaaaaaaaaaaaaaaaaaaaaaaaaaugcaucccccccccccccccccccccccccccccccaaaggcucuuuucagagccaccagaauu

SEQ ID NO: 15326 - RNA, 2136 nt, Artificial Sequence
  mRNA product Design g-3 comprising derived and/or modified sequence from HRSV(Memphis-37)__AIY60640.1__F-del_DSCav1_mut2 (opt6)
gggagaguccgcucagccagguugcagaagcggcuuagcguguguccuaaucuucucucugcguguagguaggccugugccgcaaacaagcuuaccauggaacuaccaauacucaaaacaaacgcaauaacaacaauuuuagcugcaguaacacuuuguuucgcauccucccaaaauauaacagaagaauuuuaucaaucaaccugcucagccgucuccaaaggauaucuaggugcacuacgcacuggaugguacacaagugucaucacaauagaacuuuccaacaucaaagaaaauaaauguaauggaacugacgcaaaaguaaaacucauaaaacaagaacuagacaaauacaaaaacgcaguaacagaccuacaacuauuaaugcaaucaacaccagcagcaggauccggcagugccauaugcucuggaauagcagucugcaaaguuuuacacuuagaaggcgaaguaaacaaaaucaaaaacgcccuacuaucuacaaauaaagccgucguaucucucucaaauggaguaucaguacuaacauucaaaguauuagacuuaaaaaacuacaucgauaaacaauuauugccaauauuaaacaaacaaucuugcucaauaccaaauauagaaacagucauagaauuucaacaaaaaaauaaccgauuauuagaaauaacacgagaauuuucaguaaaugccggagucaccacaccaguaucaacauacaugcuaacaaauucagaacuauuaucauuaauaaacgacaugccuauuacaaaugaucaaaaaaaacuaauguccaacaauguacaaauaguccgacaacaaagcuacucaaucauguguauaauaaaagaagaaguacuugcauacguaguacaauuaccacuauacggaguuaucgacacaccaugcuggaaacuccacacuucaccacucugcaccacaaacacaaaagaaggcucaaacauaugccuaacaagaacagaccgaggaugguacugcgacaacgcaggaucaguaucauucuucccacaagcagaaacuugcaaaguacaaucuaacagaguuuucugugacaccaugaauagccuaacacuccccuccgaaguuaaccuauguaacauagauauauuuaaucccaaauaugauugcaaaaucaugacaucuaaaaccgacguaucaucaucuguaaucacaucacuaggugccauagucucaugcuacggcaaaacaaaaugcaccgccucaaacaaaaaccgagguauaauaaaaaccuucaguaauggaugugacuacguaucaaacaaagguguugauaccguaagcgucggcaacacccuauacugcguaaauaaacaagaaggccaaucacuauacgucaaaggcgaaccaauuauuaacuucuaugacccacucgucuuucccuccgacgaauuugacgcaagcauaucacaaguaaacgaaaaaauaaaccaaucacuagcauucauacgcaaaucagaugaacuacuacauaacguaaacguaggaaaauccacuacaaauauaaugaucacaacaauaauaaucguaauuauagucauauuauuacuacuaauagcaguaggacuuuuccuauacuguaaagcaagauaaggacuagugaagggaacacccaaauuuaauucagccuuaagcacaauuaauuaagagugaaacguaauuguacaagcaguuggucacccaccauagggcaugaucaacaccgcaaccuuuccuuuuucccccagugauucugaaaaaccccucuucccuucagcuugcuuagauguuccaaauuuaguaagcuuaaggcggccuacagaagaaaaagaaaaaaaaggccacaaaaguucccucucacuuucaguaaauaaaauaaaagcagcaacagaaauaaagaaauaaaugaaauucaaaaugaaauaaauauuguguugugcagcauuaaaaaaucaauaaaaauuaaaaaugagcaagaucuaaaaaaaaaaaaaaaaaaaaaaaaaaaaaaaaaaaaaaaaaaaaaaaaaaaaaaaaaaaaaaaaugcaucccccccccccccccccccccccccccccccaaaggcucuuuucagagccaccagaauu

SEQ ID NO: 15327 - RNA, 2136 nt, Artificial Sequence
  mRNA product Design g-3 comprising derived and/or modified sequence from HRSV(Memphis-37)__AIY60640.1__F-del_DSCav1_mut2 (opt11)
gggagaguccgcucagccagguugcagaagcggcuuagcguguguccuaaucuucucucugcguguagguaggccugugccgcaaacaagcuuaccauggaacuucccauccucaagaccaacgcuauuacgaccauccucgccgcagucacccucugcuucgcgucaucccaaaacaucaccgaagaauuuuaccaauccacaugcuccgcagucucaaaaggcuaccuaggagcccuacgcaccggaugguacacauccgucaucacaaucgaacucuccaacauaaaagaaaacaaaugcaacggcaccgaugccaaaguaaaacugauuaaacaagaacucgacaaauacaagaacgccgucacagaccuacagcuccucaugcaaucaacucccgccgccggcagcggauccgcuaucugcucaggcaucgccguaugcaaaguccuccaccuagaaggcgaaguaaacaaaaucaagaacgcacuacucucaacaaacaaagccgucgucucccucuccaacggcgucuccguccuuaccuucaaaguccucgaccuuaagaacuacauugacaaacaacuccuacccauccucaacaaacaauccugcucuauaccuaauauagaaaccguaaucgaauuucaacagaaaaacaaccgccuccucgaaauuacccgcgaguucucaguaaacgccggcguaaccacccccgucuccaccuacaugcucacaaauucagaacuccucagccucaucaacgacaugcccauaaccaacgaccaaaagaaacucaugucaaacaacguccaaaucgucaggcaacaaagcuacagcaucaugugcaucauuaaagaagaaguacucgccuacgucgugcaacuaccccucuacggcgucauagacacacccugcuggaaacuucacacaucaccgcucugcaccacaaacaccaaagaaggcaguaacauaugccucacccgaaccgaccgcggaugguacugcgacaacgccggauccgucagcuucuucccacaagccgaaaccugcaaaguacaauccaaccgagucuucugcgacaccaugaacucucuuacgcuccccucagaagucaaccuaugcaacaucgacaucuucaaccccaaauacgacugcaaaaucaugaccuccaaaacagacgucuccuccucagugauaaccucccucggcgccauugucuccugcuacggcaaaaccaaaugcaccgccuccaacaaaaaccgugggaucaucaaaaccuucucaaacggcugcgacuacguauccaauaagggugucgacacagucuccguaggcaauacccucuauugcgucaacaaacaagaaggccaaucccucuacgucaaaggcgaaccuaucaucaacuucuacgacccgcuagucuuccccucagacgaguucgacgcauccaucucacaagucaacgaaaagaucaaccagucccucgcauucauccgaaaauccgacgaacuucuccacaacguuaacgucggcaaauccaccacuaacauaaugaucaccacgaucaucauaguaauuaucgucauacuccuccuccuaaucgcugucggacucuuccucuacugcaaggcccgcuaaggacuagugaagggaacacccaaauuuaauucagccuuaagcacaauuaauuaagagugaaacguaauuguacaagcaguuggucacccaccauagggcaugaucaacaccgcaaccuuuccuuuuucccccagugauucugaaaaaccccucuucccuucagcuugcuuagauguuccaaauuuaguaagcuuaaggcggccuacagaagaaaaagaaaaaaaaggccacaaaaguucccucucacuuucaguaaauaaaauaaaagcagcaacagaaauaaagaaauaaaugaaauucaaaaugaaauaaauauuguguugugcagcauuaaaaaaucaauaaaaauuaaaaaugagcaagaucuaaaaaaaaaaaaaaaaaaaaaaaaaaaaaaaaaaaaaaaaaaaaaaaaaaaaaaaaaaaaaaaaugcaucccccccccccccccccccccccccccccccaaaggcucuuuucagagccaccagaauu

SEQ ID NO: 15328 - RNA, 1931 nt, Artificial Sequence
  mRNA product Design g-4 comprising derived and/or modified sequence from HRSV(Memphis-37)__AIY60640.1__F-del_DSCav1_mut2 (opt1)
gggagacuccugucgggcggaaguaggaggaguagaguuuaaaaacaguacucuuuuuccgguucgggacguaguugaagcaacgacaagccggauaaccgcucuugagacaggaagcuuaccauggagcugcccauccucaagaccaacgccaucaccacgauccuggccgcggugacccugugcuucgccagcucccagaacaucaccgaggaguucuaccagagcacgugcuccgccgucagcaagggcuaccucggcgcccugcgcaccgggugguacaccagcgugaucaccaucgagcuguccaacaucaaggagaacaagugcaacggcaccgacgccaaggugaagcucaucaagcaggagcuggacaaguacaagaacgcggucacggaccugcagcuccugaugcagagcaccccggccgccggcuccgggagcgcgaucugcuccggcaucgccgucugcaaggugcugcaccucgagggcgaggugaacaagaucaagaacgcccugcuguccaccaacaaggccgucgugagccucuccaacggggugagcguccugaccuucaaggugcuggaccucaagaacuacaucgacaagcagcugcugcccauccugaacaagcagagcugcuccauccccaacaucgagaccgucaucgaguuccagcagaagaacaaccgccuccuggagaucacgcgggaguucagcgugaacgcgggcgugaccacccccgucuccaccuacaugcugacgaacagcgagcuccugucccugaucaacgacaugccgaucaccaacgaccagaagaagcucaugagcaacaacgugcagaucgugcgccagcaguccuacagcaucaugugcaucaucaaggaggagguccuggccuacguggugcagcugccccucuacggggucaucgacacccccugcuggaagcugcacaccagcccccugugcacgaccaacaccaaggagggcuccaacaucugccucacccggacggaccgcgggugguacugcgacaacgccggcagcguguccuucuucccgcaggccgagaccugcaagguccagagcaaccggguguucugcgacaccaugaacucccugacccugcccagcgaggugaaccucugcaacaucgacaucuucaaccccaaguacgacugcaagaucaugacguccaagaccgacgucagcuccagcgugaucaccucccugggcgccaucgugagcugcuacgggaagaccaagugcacggcgagcaacaagaaccgcggcaucaucaagaccuucuccaacgggugcgacuacgucagcaacaagggcguggacaccguguccgucggcaacacccuguacugcgugaacaagcaggagggccagagccucuacgugaagggggagcccaucaucaacuucuacgacccgcuggucuuccccuccgacgaguucgacgccagcaucucccaggugaacgagaagaucaaccagagccuggccuucauccggaaguccgacgagcuccugcacaacgugaacgucggcaagagcaccacgaacaucaugaucaccaccaucaucaucgugaucaucgugauccugcugcuccugaucgccgucgggcuguuccucuacugcaaggcccgcugaggacuaguaauaaggaaacuguaugaaugucugugggcaggaagugaagagauccuucuguaaagguuuuuggaauuaugucugcugaauaauaaacuuuuuugaaauaauaaaucugguagaaaaaugagaucuaaaaaaaaaaaaaaaaaaaaaaaaaaaaaaaaaaaaaaaaaaaaaaaaaaaaaaaaaaaaaaaaugcaucccccccccccccccccccccccccccccccaaaggcucuuuucagagccaccagaauu

SEQ ID NO: 15329 - RNA, 1931 nt, Artificial Sequence
  mRNA product Design g-4 comprising derived and/or modified sequence from HRSV(Memphis-37)__AIY60640.1__F-del_DSCav1_mut2 (opt1)
gggagacuccugucgggcggaaguaggaggaguagaguuuaaaaacaguacucuuuuuccgguucgggacguaguugaagcaacgacaagccggauaaccgcucuugagacaggaagcuuaccauggagcugcccauccucaagaccaacgccaucaccacgauccuggccgcggugacccugugcuucgccagcucccagaacaucaccgaggaguucuaccagagcacgugcuccgccgucagcaagggcuaccucggggcccugcgcaccggcugguacaccuccgugaucaccaucgagcugagcaacaucaaggagaacaagugcaacgggaccgacgccaaggugaagcucaucaagcaggagcuggacaaguacaagaacgcggucacggaccugcagcuccugaugcaguccaccccggccgccggcagcggguccgccaucugcagcggcaucgcggugugcaaggugcugcaccucgagggcgaggucaacaagaucaagaacgcccugcuguccaccaacaaggccguggugagccucuccaacggggucagcgugcugaccuucaaggugcuggaccucaagaacuacaucgacaagcagcugcugcccauccucaacaagcaguccugcagcauccccaacaucgagacggucaucgaguuccagcagaagaacaaccggcugcuggagaucacccgcgaguucuccgugaacgccggcgugaccacccccgucagcacguacaugcucaccaacuccgagcugcugagccucaucaacgacaugccgaucaccaacgaccagaagaagcugaugagcaacaacgugcagaucgugcggcagcaguccuacagcaucaugugcaucaucaaggaggagguccuggccuacguggugcagcucccccuguacggggucaucgacacccccugcuggaagcugcacacgagcccccucugcaccaccaacaccaaggagggcuccaacaucugccugacgcgcaccgaccgggggugguacugcgacaacgcgggcuccgugagcuucuucccgcaggccgagaccugcaaggugcaguccaaccgcgucuucugcgacaccaugaacagccugacgcuccccuccgaggugaaccugugcaacaucgacaucuucaaccccaaguacgacugcaagaucaugaccagcaagaccgacgucuccagcuccgugaucaccagccugggcgccaucguguccugcuacgggaagacgaagugcaccgccagcaacaagaaccggggcaucaucaagaccuucuccaacgggugcgacuacgucagcaacaagggcguggacaccguguccgucggcaacacgcucuacugcgugaacaagcaggaggggcagagccuguacgugaagggcgagcccaucaucaacuucuacgacccgcuggucuuccccagcgacgaguucgacgccuccaucagccaggugaacgagaagaucaaccagucccucgcguucauccgcaagagcgacgagcugcugcacaacgugaacgucgggaaguccaccaccaacaucaugaucaccaccaucaucaucgugaucaucgugauccuccugcugcucaucgccgucggccuguuccuguacugcaaggcccggugaggacuaguaauaaggaaacuguaugaaugucugugggcaggaagugaagagauccuucuguaaagguuuuuggaauuaugucugcugaauaauaaacuuuuuugaaauaauaaaucugguagaaaaaugagaucuaaaaaaaaaaaaaaaaaaaaaaaaaaaaaaaaaaaaaaaaaaaaaaaaaaaaaaaaaaaaaaaaugcaucccccccccccccccccccccccccccccccaaaggcucuuuucagagccaccagaauu

SEQ ID NO: 15330 - RNA, 1931 nt, Artificial Sequence
  mRNA product Design g-4 comprising derived and/or modified sequence from HRSV(Memphis-37)__AIY60640.1__F-del_DSCav1_mut2 (opt2)
gggagacuccugucgggcggaaguaggaggaguagaguuuaaaaacaguacucuuuuuccgguucgggacguaguugaagcaacgacaagccggauaaccgcucuugagacaggaagcuuaccauggagcuccccauccucaagaccaacgccaucaccaccauccucgccgccgucacccucugcuucgccuccucccagaacaucaccgaggaguucuaccaguccaccugcuccgccgucuccaagggcuaccucggcgcccuccgcaccggcugguacaccuccgucaucaccaucgagcucuccaacaucaaggagaacaagugcaacggcaccgacgccaaggucaagcucaucaagcaggagcucgacaaguacaagaacgccgucaccgaccuccagcuccucaugcaguccacccccgccgccggcuccggcuccgccaucugcuccggcaucgccgucugcaagguccuccaccucgagggcgaggucaacaagaucaagaacgcccuccucuccaccaacaaggccgucgucucccucuccaacggcgucuccguccucaccuucaagguccucgaccucaagaacuacaucgacaagcagcuccuccccauccucaacaagcaguccugcuccauccccaacaucgagaccgucaucgaguuccagcagaagaacaaccgccuccucgagaucacccgcgaguucuccgucaacgccggcgucaccacccccgucuccaccuacaugcucaccaacuccgagcuccucucccucaucaacgacaugcccaucaccaacgaccagaagaagcucauguccaacaacguccagaucguccgccagcaguccuacuccaucaugugcaucaucaaggaggagguccucgccuacgucguccagcucccccucuacggcgucaucgacacccccugcuggaagcuccacaccuccccccucugcaccaccaacaccaaggagggcuccaacaucugccucacccgcaccgaccgcggcugguacugcgacaacgccggcuccgucuccuucuucccccaggccgagaccugcaagguccaguccaaccgcgucuucugcgacaccaugaacucccucacccuccccuccgaggucaaccucugcaacaucgacaucuucaaccccaaguacgacugcaagaucaugaccuccaagaccgacgucuccuccuccgucaucaccucccucggcgccaucgucuccugcuacggcaagaccaagugcaccgccuccaacaagaaccgcggcaucaucaagaccuucuccaacggcugcgacuacgucuccaacaagggcgucgacaccgucuccgucggcaacacccucuacugcgucaacaagcaggagggccagucccucuacgucaagggcgagcccaucaucaacuucuacgacccccucgucuuccccuccgacgaguucgacgccuccaucucccaggucaacgagaagaucaaccagucccucgccuucauccgcaaguccgacgagcuccuccacaacgucaacgucggcaaguccaccaccaacaucaugaucaccaccaucaucaucgucaucaucgucauccuccuccuccucaucgccgucggccucuuccucuacugcaaggcccgcugaggacuaguaauaaggaaacuguaugaaugucugugggcaggaagugaagagauccuucuguaaagguuuuuggaauuaugucugcugaauaauaaacuuuuuugaaauaauaaaucugguagaaaaaugagaucuaaaaaaaaaaaaaaaaaaaaaaaaaaaaaaaaaaaaaaaaaaaaaaaaaaaaaaaaaaaaaaaaugcaucccccccccccccccccccccccccccccccaaaggcucuuuucagagccaccagaauu

SEQ ID NO: 15331 - RNA, 1931 nt, Artificial Sequence
  mRNA product Design g-4 comprising derived and/or modified sequence from HRSV(Memphis-37)__AIY60640.1__F-del_DSCav1_mut2 (opt3)
gggagacuccugucgggcggaaguaggaggaguagaguuuaaaaacaguacucuuuuuccgguucgggacguaguugaagcaacgacaagccggauaaccgcucuugagacaggaagcuuaccauggagcugcccauccucaagaccaacgccauuacaacuauacuugcugcagugacgcugugcuucgccagcucccagaauaucaccgaagaguuuuaccaaucuacauguucagcggucaguaaaggcuauuugggggcuuuaagaacuggaugguacaccagcguuauuacaaucgaacuguccaacauuaaggagaauaaaugcaacgguaccgacgccaaggugaaacuaaucaagcaggaacucgauaaguauaaaaaugcaguaacugaccugcagcuucugaugcagucuacuccugccgcuggcucggggucagcaauauguagcggaaucgccgugugcaaggucuugcaccucgagggcgaggugaacaaaauuaagaaugcucugcugaguaccaacaaagccguugugucccucucuaauggugucagcguguuaacguucaagguacuggaucuuaagaacuacaucgacaaacaauugcugccaauucuaaauaagcaguccuguucaaucccgaacauagaaacuguuauugaguuucagcagaaaaauaacaggcuccuggaaaucacccgggaguucagugugaaugcgggggucacaacucccgugagcaccuauaugcuuacaaacucugagcuguugucccucauuaacgauaugccuaucaccaaugaccaaaagaaacugaugucaaacaaugugcagaucguccgccagcagagcuacaguauuaugugcauaaucaaggaagagguuuuagcauaugugguacaacugccacucuacggagugauugauacgcccuguuggaaacuucauacuucuccucugugcacaaccaacacuaaggaaggcuccaauaucuguuugacacgaaccgaccguggcugguacugcgauaacgccgggagcgucucguuuuucccacaggcugagacguguaaggugcagucuaauagaguuuucugcgacaccaugaacucccuaacacugcccucagaagugaaucucugcaacauagauauuuucaauccuaaauaugacuguaagaucaugacaaguaaaaccgaugucagcuccucugugaucacaagccugggagccauuguaucaugcuacgguaagacuaaauguaccgcaaguaacaagaauaggggcaucauuaagacauuuuccaacgggugcgacuauguuagcaauaaaggaguggacaccgucucugugggcaacacucuuuacugugucaacaagcaagagggucagucacuguaugugaaaggggagccaauaaucaauuucuacgauccguugguuuuucccagugacgaauuugaugcuagcauuucccaggugaacgagaagaucaaucagucucucgccuuuauccggaaaucggacgaacuguuacacaacguaaaugucggaaagagcacgacaaacauuaugauaaccacuaucauuaucgugauuaucguuauacugcuacuccugaucgcggugggccuuuucuuguauugcaaggcccgcugaggacuaguaauaaggaaacuguaugaaugucugugggcaggaagugaagagauccuucuguaaagguuuuuggaauuaugucugcugaauaauaaacuuuuuugaaauaauaaaucugguagaaaaaugagaucuaaaaaaaaaaaaaaaaaaaaaaaaaaaaaaaaaaaaaaaaaaaaaaaaaaaaaaaaaaaaaaaaugcaucccccccccccccccccccccccccccccccaaaggcucuuuucagagccaccagaauu

SEQ ID NO: 15332 - RNA, 1931 nt, Artificial Sequence
  mRNA product Design g-4 comprising derived and/or modified sequence from HRSV(Memphis-37)__AIY60640.1__F-del_DSCav1_mut2 (opt4)
gggagacuccugucgggcggaaguaggaggaguagaguuuaaaaacaguacucuuuuuccgguucgggacguaguugaagcaacgacaagccggauaaccgcucuugagacaggaagcuuaccauggagcugcccauccugaagaccaacgccaucaccaccauccuggccgccgugacccugugcuucgccagcagccagaacaucaccgaggaguucuaccagagcaccugcagcgccgugagcaagggcuaccugggcgcccugagaaccggcugguacaccagcgugaucaccaucgagcugagcaacaucaaggagaacaagugcaacggcaccgacgccaaggugaagcugaucaagcaggagcuggacaaguacaagaacgccgugaccgaccugcagcugcugaugcagagcacccccgccgccggcagcggcagcgccaucugcagcggcaucgccgugugcaaggugcugcaccuggagggcgaggugaacaagaucaagaacgcccugcugagcaccaacaaggccguggugagccugagcaacggcgugagcgugcugaccuucaaggugcuggaccugaagaacuacaucgacaagcagcugcugcccauccugaacaagcagagcugcagcauccccaacaucgagaccgugaucgaguuccagcagaagaacaacagacugcuggagaucaccagagaguucagcgugaacgccggcgugaccacccccgugagcaccuacaugcugaccaacagcgagcugcugagccugaucaacgacaugcccaucaccaacgaccagaagaagcugaugagcaacaacgugcagaucgugagacagcagagcuacagcaucaugugcaucaucaaggaggaggugcuggccuacguggugcagcugccccuguacggcgugaucgacacccccugcuggaagcugcacaccagcccccugugcaccaccaacaccaaggagggcagcaacaucugccugaccagaaccgacagaggcugguacugcgacaacgccggcagcgugagcuucuucccccaggccgagaccugcaaggugcagagcaacagaguguucugcgacaccaugaacagccugacccugcccagcgaggugaaccugugcaacaucgacaucuucaaccccaaguacgacugcaagaucaugaccagcaagaccgacgugagcagcagcgugaucaccagccugggcgccaucgugagcugcuacggcaagaccaagugcaccgccagcaacaagaacagaggcaucaucaagaccuucagcaacggcugcgacuacgugagcaacaagggcguggacaccgugagcgugggcaacacccuguacugcgugaacaagcaggagggccagagccuguacgugaagggcgagcccaucaucaacuucuacgacccccugguguuccccagcgacgaguucgacgccagcaucagccaggugaacgagaagaucaaccagagccuggccuucaucagaaagagcgacgagcugcugcacaacgugaacgugggcaagagcaccaccaacaucaugaucaccaccaucaucaucgugaucaucgugauccugcugcugcugaucgccgugggccuguuccuguacugcaaggccagaugaggacuaguaauaaggaaacuguaugaaugucugugggcaggaagugaagagauccuucuguaaagguuuuuggaauuaugucugcugaauaauaaacuuuuuugaaauaauaaaucugguagaaaaaugagaucuaaaaaaaaaaaaaaaaaaaaaaaaaaaaaaaaaaaaaaaaaaaaaaaaaaaaaaaaaaaaaaaaugcaucccccccccccccccccccccccccccccccaaaggcucuuuucagagccaccagaauu

SEQ ID NO: 15333 - RNA, 1931 nt, Artificial Sequence
  mRNA product Design g-4 comprising derived and/or modified sequence from HRSV(Memphis-37)__AIY60640.1__F-del_DSCav1_mut2 (opt5)
gggagacuccugucgggcggaaguaggaggaguagaguuuaaaaacaguacucuuuuuccgguucgggacguaguugaagcaacgacaagccggauaaccgcucuugagacaggaagcuuaccauggagcugcccauccucaagaccaacgccauuacaacgauccuggcugccgugacccuuugcuucgcgagcucccagaauauuacagaagaguuuuaccaaucuaccuguagcgcugucuccaaaggcuaucugggggcccucagaacaggaugguacaccucuguuaucacaauugaacugagcaacaucaaggagaauaaaugcaacggcaccgacgccaaggugaaacuuaucaagcaggaacuggauaaguauaaaaaugcugugacggaccuccagcugcugaugcaguccaccccugccgcugggucuggaagcgccauuuguuccggcaucgcggucugcaaggugcuccaccuggagggggagguuaacaaaauuaagaaugcccuucugagcacaaacaaagcuguggucucucucuccaauggagugagcguucugaccuucaaggugcuugaucugaagaacuacaucgacaaacaacuccugccgauucugaauaagcagucuuguuccauccccaacauugaaacagucaucgaguuucagcagaaaaauaaccggcuccuggaaaucacccgcgaguucagcgugaaugccggcgugacgacaccugucucuaccuauaugcuuacaaacuccgagcugcucagccugauuaacgauaugcccaucaccaaugaccaaaagaaacuuauguccaacaauguucagauugugagacagcagucuuacagcaucaugugcauuaucaaggaagaggugcuggcuuaugucgugcaacucccucuguacggcguuaucgauacccccuguuggaaacugcauacauccccucucugcacgaccaacacaaaggaagggagcaauauuugucugacccggacagaccgcggaugguacugcgauaacgccggcucuguguccuuuuucccgcaggcggagaccuguaagguccagagcaauagaguguuuugcgacacgaugaacucucuuacacugcccagcgaaguuaaucucugcaacaucgauauuuucaauccuaaauaugacuguaagaucaugaccuccaaaaccgaugugucuagcuccgucauuacaagccugggggccaucgugucuugcuacggaaagaccaaauguacagcuuccaacaagaaucggggcaucauuaagacguuuagcaacgggugcgacuaugucucuaauaaaggaguggacaccguuuccgugggcaacacacuuuacugugucaacaagcaagagggccagagccuguaugugaaaggggagcccaucauuaauuucuacgauccucucguuuuucccuccgacgaguucgaugccucuaucagccaggugaacgaaaagauuaaucagucccuggcuuuuauccgcaaaucugacgaacugcuccacaacgucaaugugggaaagagcaccacaaacauuaugaucaccacgaucauuaucgugauuaucguuauucugcuucugcucaucgccgucggccuguuccuguauugcaaggccagaugaggacuaguaauaaggaaacuguaugaaugucugugggcaggaagugaagagauccuucuguaaagguuuuuggaauuaugucugcugaauaauaaacuuuuuugaaauaauaaaucugguagaaaaaugagaucuaaaaaaaaaaaaaaaaaaaaaaaaaaaaaaaaaaaaaaaaaaaaaaaaaaaaaaaaaaaaaaaaugcaucccccccccccccccccccccccccccccccaaaggcucuuuucagagccaccagaauu

SEQ ID NO: 15334 - RNA, 1931 nt, Artificial Sequence
  mRNA product Design g-4 comprising derived and/or modified sequence from HRSV(Memphis-37)__AIY60640.1__F-del_DSCav1_mut2 (opt6)
gggagacuccugucgggcggaaguaggaggaguagaguuuaaaaacaguacucuuuuuccgguucgggacguaguugaagcaacgacaagccggauaaccgcucuugagacaggaagcuuaccauggaacuaccaauacucaaaacaaacgcaauaacaacaauuuuagcugcaguaacacuuuguuucgcauccucccaaaauauaacagaagaauuuuaucaaucaaccugcucagccgucuccaaaggauaucuaggugcacuacgcacuggaugguacacaagugucaucacaauagaacuuuccaacaucaaagaaaauaaauguaauggaacugacgcaaaaguaaaacucauaaaacaagaacuagacaaauacaaaaacgcaguaacagaccuacaacuauuaaugcaaucaacaccagcagcaggauccggcagugccauaugcucuggaauagcagucugcaaaguuuuacacuuagaaggcgaaguaaacaaaaucaaaaacgcccuacuaucuacaaauaaagccgucguaucucucucaaauggaguaucaguacuaacauucaaaguauuagacuuaaaaaacuacaucgauaaacaauuauugccaauauuaaacaaacaaucuugcucaauaccaaauauagaaacagucauagaauuucaacaaaaaaauaaccgauuauuagaaauaacacgagaauuuucaguaaaugccggagucaccacaccaguaucaacauacaugcuaacaaauucagaacuauuaucauuaauaaacgacaugccuauuacaaaugaucaaaaaaaacuaauguccaacaauguacaaauaguccgacaacaaagcuacucaaucauguguauaauaaaagaagaaguacuugcauacguaguacaauuaccacuauacggaguuaucgacacaccaugcuggaaacuccacacuucaccacucugcaccacaaacacaaaagaaggcucaaacauaugccuaacaagaacagaccgaggaugguacugcgacaacgcaggaucaguaucauucuucccacaagcagaaacuugcaaaguacaaucuaacagaguuuucugugacaccaugaauagccuaacacuccccuccgaaguuaaccuauguaacauagauauauuuaaucccaaauaugauugcaaaaucaugacaucuaaaaccgacguaucaucaucuguaaucacaucacuaggugccauagucucaugcuacggcaaaacaaaaugcaccgccucaaacaaaaaccgagguauaauaaaaaccuucaguaauggaugugacuacguaucaaacaaagguguugauaccguaagcgucggcaacacccuauacugcguaaauaaacaagaaggccaaucacuauacgucaaaggcgaaccaauuauuaacuucuaugacccacucgucuuucccuccgacgaauuugacgcaagcauaucacaaguaaacgaaaaaauaaaccaaucacuagcauucauacgcaaaucagaugaacuacuacauaacguaaacguaggaaaauccacuacaaauauaaugaucacaacaauaauaaucguaauuauagucauauuauuacuacuaauagcaguaggacuuuuccuauacuguaaagcaagauaaggacuaguaauaaggaaacuguaugaaugucugugggcaggaagugaagagauccuucuguaaagguuuuuggaauuaugucugcugaauaauaaacuuuuuugaaauaauaaaucugguagaaaaaugagaucuaaaaaaaaaaaaaaaaaaaaaaaaaaaaaaaaaaaaaaaaaaaaaaaaaaaaaaaaaaaaaaaaugcaucccccccccccccccccccccccccccccccaaaggcucuuuucagagccaccagaauu

SEQ ID NO: 15335 - RNA, 1931 nt, Artificial Sequence
  mRNA product Design g-4 comprising derived and/or modified sequence from HRSV(Memphis-37)__AIY60640.1__F-del_DSCav1_mut2 (opt11)
gggagacuccugucgggcggaaguaggaggaguagaguuuaaaaacaguacucuuuuuccgguucgggacguaguugaagcaacgacaagccggauaaccgcucuugagacaggaagcuuaccauggaacuucccauccucaagaccaacgcuauuacgaccauccucgccgcagucacccucugcuucgcgucaucccaaaacaucaccgaagaauuuuaccaauccacaugcuccgcagucucaaaaggcuaccuaggagcccuacgcaccggaugguacacauccgucaucacaaucgaacucuccaacauaaaagaaaacaaaugcaacggcaccgaugccaaaguaaaacugauuaaacaagaacucgacaaauacaagaacgccgucacagaccuacagcuccucaugcaaucaacucccgccgccggcagcggauccgcuaucugcucaggcaucgccguaugcaaaguccuccaccuagaaggcgaaguaaacaaaaucaagaacgcacuacucucaacaaacaaagccgucgucucccucuccaacggcgucuccguccuuaccuucaaaguccucgaccuuaagaacuacauugacaaacaacuccuacccauccucaacaaacaauccugcucuauaccuaauauagaaaccguaaucgaauuucaacagaaaaacaaccgccuccucgaaauuacccgcgaguucucaguaaacgccggcguaaccacccccgucuccaccuacaugcucacaaauucagaacuccucagccucaucaacgacaugcccauaaccaacgaccaaaagaaacucaugucaaacaacguccaaaucgucaggcaacaaagcuacagcaucaugugcaucauuaaagaagaaguacucgccuacgucgugcaacuaccccucuacggcgucauagacacacccugcuggaaacuucacacaucaccgcucugcaccacaaacaccaaagaaggcaguaacauaugccucacccgaaccgaccgcggaugguacugcgacaacgccggauccgucagcuucuucccacaagccgaaaccugcaaaguacaauccaaccgagucuucugcgacaccaugaacucucuuacgcuccccucagaagucaaccuaugcaacaucgacaucuucaaccccaaauacgacugcaaaaucaugaccuccaaaacagacgucuccuccucagugauaaccucccucggcgccauugucuccugcuacggcaaaaccaaaugcaccgccuccaacaaaaaccgugggaucaucaaaaccuucucaaacggcugcgacuacguauccaauaagggugucgacacagucuccguaggcaauacccucuauugcgucaacaaacaagaaggccaaucccucuacgucaaaggcgaaccuaucaucaacuucuacgacccgcuagucuuccccucagacgaguucgacgcauccaucucacaagucaacgaaaagaucaaccagucccucgcauucauccgaaaauccgacgaacuucuccacaacguuaacgucggcaaauccaccacuaacauaaugaucaccacgaucaucauaguaauuaucgucauacuccuccuccuaaucgcugucggacucuuccucuacugcaaggcccgcuaaggacuaguaauaaggaaacuguaugaaugucugugggcaggaagugaagagauccuucuguaaagguuuuuggaauuaugucugcugaauaauaaacuuuuuugaaauaauaaaucugguagaaaaaugagaucuaaaaaaaaaaaaaaaaaaaaaaaaaaaaaaaaaaaaaaaaaaaaaaaaaaaaaaaaaaaaaaaaugcaucccccccccccccccccccccccccccccccaaaggcucuuuucagagccaccagaauu

SEQ ID NO: 15336 - RNA, 1907 nt, Artificial Sequence
  mRNA product Design g-5 comprising derived and/or modified sequence from HRSV(Memphis-37)__AIY60640.1__F-del_DSCav1_mut2 (opt1)
gggagacccgugacccggaaguuguacggcuacgcgacuuucccucccacaaacccucgcgcccuuccuuuccuacuugggcccggcagaaagcuuaccauggagcugcccauccucaagaccaacgccaucaccacgauccuggccgcggugacccugugcuucgccagcucccagaacaucaccgaggaguucuaccagagcacgugcuccgccgucagcaagggcuaccucggcgcccugcgcaccgggugguacaccagcgugaucaccaucgagcuguccaacaucaaggagaacaagugcaacggcaccgacgccaaggugaagcucaucaagcaggagcuggacaaguacaagaacgcggucacggaccugcagcuccugaugcagagcaccccggccgccggcuccgggagcgcgaucugcuccggcaucgccgucugcaaggugcugcaccucgagggcgaggugaacaagaucaagaacgcccugcuguccaccaacaaggccgucgugagccucuccaacggggugagcguccugaccuucaaggugcuggaccucaagaacuacaucgacaagcagcugcugcccauccugaacaagcagagcugcuccauccccaacaucgagaccgucaucgaguuccagcagaagaacaaccgccuccuggagaucacgcgggaguucagcgugaacgcgggcgugaccacccccgucuccaccuacaugcugacgaacagcgagcuccugucccugaucaacgacaugccgaucaccaacgaccagaagaagcucaugagcaacaacgugcagaucgugcgccagcaguccuacagcaucaugugcaucaucaaggaggagguccuggccuacguggugcagcugccccucuacggggucaucgacacccccugcuggaagcugcacaccagcccccugugcacgaccaacaccaaggagggcuccaacaucugccucacccggacggaccgcgggugguacugcgacaacgccggcagcguguccuucuucccgcaggccgagaccugcaagguccagagcaaccggguguucugcgacaccaugaacucccugacccugcccagcgaggugaaccucugcaacaucgacaucuucaaccccaaguacgacugcaagaucaugacguccaagaccgacgucagcuccagcgugaucaccucccugggcgccaucgugagcugcuacgggaagaccaagugcacggcgagcaacaagaaccgcggcaucaucaagaccuucuccaacgggugcgacuacgucagcaacaagggcguggacaccguguccgucggcaacacccuguacugcgugaacaagcaggagggccagagccucuacgugaagggggagcccaucaucaacuucuacgacccgcuggucuuccccuccgacgaguucgacgccagcaucucccaggugaacgagaagaucaaccagagccuggccuucauccggaaguccgacgagcuccugcacaacgugaacgucggcaagagcaccacgaacaucaugaucaccaccaucaucaucgugaucaucgugauccugcugcuccugaucgccgucgggcuguuccucuacugcaaggcccgcugaggacuaguaauaaggaaacuguaugaaugucugugggcaggaagugaagagauccuucuguaaagguuuuuggaauuaugucugcugaauaauaaacuuuuuugaaauaauaaaucugguagaaaaaugagaucuaaaaaaaaaaaaaaaaaaaaaaaaaaaaaaaaaaaaaaaaaaaaaaaaaaaaaaaaaaaaaaaaugcaucccccccccccccccccccccccccccccccaaaggcucuuuucagagccaccagaauu

SEQ ID NO: 15337 - RNA, 1907 nt, Artificial Sequence
  mRNA product Design g-5 comprising derived and/or modified sequence from HRSV(Memphis-37)__AIY60640.1__F-del_DSCav1_mut2 (opt1)
gggagacccgugacccggaaguuguacggcuacgcgacuuucccucccacaaacccucgcgcccuuccuuuccuacuugggcccggcagaaagcuuaccauggagcugcccauccucaagaccaacgccaucaccacgauccuggccgcggugacccugugcuucgccagcucccagaacaucaccgaggaguucuaccagagcacgugcuccgccgucagcaagggcuaccucggggcccugcgcaccggcugguacaccuccgugaucaccaucgagcugagcaacaucaaggagaacaagugcaacgggaccgacgccaaggugaagcucaucaagcaggagcuggacaaguacaagaacgcggucacggaccugcagcuccugaugcaguccaccccggccgccggcagcggguccgccaucugcagcggcaucgcggugugcaaggugcugcaccucgagggcgaggucaacaagaucaagaacgcccugcuguccaccaacaaggccguggugagccucuccaacggggucagcgugcugaccuucaaggugcuggaccucaagaacuacaucgacaagcagcugcugcccauccucaacaagcaguccugcagcauccccaacaucgagacggucaucgaguuccagcagaagaacaaccggcugcuggagaucacccgcgaguucuccgugaacgccggcgugaccacccccgucagcacguacaugcucaccaacuccgagcugcugagccucaucaacgacaugccgaucaccaacgaccagaagaagcugaugagcaacaacgugcagaucgugcggcagcaguccuacagcaucaugugcaucaucaaggaggagguccuggccuacguggugcagcucccccuguacggggucaucgacacccccugcuggaagcugcacacgagcccccucugcaccaccaacaccaaggagggcuccaacaucugccugacgcgcaccgaccgggggugguacugcgacaacgcgggcuccgugagcuucuucccgcaggccgagaccugcaaggugcaguccaaccgcgucuucugcgacaccaugaacagccugacgcuccccuccgaggugaaccugugcaacaucgacaucuucaaccccaaguacgacugcaagaucaugaccagcaagaccgacgucuccagcuccgugaucaccagccugggcgccaucguguccugcuacgggaagacgaagugcaccgccagcaacaagaaccggggcaucaucaagaccuucuccaacgggugcgacuacgucagcaacaagggcguggacaccguguccgucggcaacacgcucuacugcgugaacaagcaggaggggcagagccuguacgugaagggcgagcccaucaucaacuucuacgacccgcuggucuuccccagcgacgaguucgacgccuccaucagccaggugaacgagaagaucaaccagucccucgcguucauccgcaagagcgacgagcugcugcacaacgugaacgucgggaaguccaccaccaacaucaugaucaccaccaucaucaucgugaucaucgugauccuccugcugcucaucgccgucggccuguuccuguacugcaaggcccggugaggacuaguaauaaggaaacuguaugaaugucugugggcaggaagugaagagauccuucuguaaagguuuuuggaauuaugucugcugaauaauaaacuuuuuugaaauaauaaaucugguagaaaaaugagaucuaaaaaaaaaaaaaaaaaaaaaaaaaaaaaaaaaaaaaaaaaaaaaaaaaaaaaaaaaaaaaaaaugcaucccccccccccccccccccccccccccccccaaaggcucuuuucagagccaccagaauu

SEQ ID NO: 15338 - RNA, 1907 nt, Artificial Sequence
  mRNA product Design g-5 comprising derived and/or modified sequence from HRSV(Memphis-37)__AIY60640.1__F-del_DSCav1_mut2 (opt2)
gggagacccgugacccggaaguuguacggcuacgcgacuuucccucccacaaacccucgcgcccuuccuuuccuacuugggcccggcagaaagcuuaccauggagcuccccauccucaagaccaacgccaucaccaccauccucgccgccgucacccucugcuucgccuccucccagaacaucaccgaggaguucuaccaguccaccugcuccgccgucuccaagggcuaccucggcgcccuccgcaccggcugguacaccuccgucaucaccaucgagcucuccaacaucaaggagaacaagugcaacggcaccgacgccaaggucaagcucaucaagcaggagcucgacaaguacaagaacgccgucaccgaccuccagcuccucaugcaguccacccccgccgccggcuccggcuccgccaucugcuccggcaucgccgucugcaagguccuccaccucgagggcgaggucaacaagaucaagaacgcccuccucuccaccaacaaggccgucgucucccucuccaacggcgucuccguccucaccuucaagguccucgaccucaagaacuacaucgacaagcagcuccuccccauccucaacaagcaguccugcuccauccccaacaucgagaccgucaucgaguuccagcagaagaacaaccgccuccucgagaucacccgcgaguucuccgucaacgccggcgucaccacccccgucuccaccuacaugcucaccaacuccgagcuccucucccucaucaacgacaugcccaucaccaacgaccagaagaagcucauguccaacaacguccagaucguccgccagcaguccuacuccaucaugugcaucaucaaggaggagguccucgccuacgucguccagcucccccucuacggcgucaucgacacccccugcuggaagcuccacaccuccccccucugcaccaccaacaccaaggagggcuccaacaucugccucacccgcaccgaccgcggcugguacugcgacaacgccggcuccgucuccuucuucccccaggccgagaccugcaagguccaguccaaccgcgucuucugcgacaccaugaacucccucacccuccccuccgaggucaaccucugcaacaucgacaucuucaaccccaaguacgacugcaagaucaugaccuccaagaccgacgucuccuccuccgucaucaccucccucggcgccaucgucuccugcuacggcaagaccaagugcaccgccuccaacaagaaccgcggcaucaucaagaccuucuccaacggcugcgacuacgucuccaacaagggcgucgacaccgucuccgucggcaacacccucuacugcgucaacaagcaggagggccagucccucuacgucaagggcgagcccaucaucaacuucuacgacccccucgucuuccccuccgacgaguucgacgccuccaucucccaggucaacgagaagaucaaccagucccucgccuucauccgcaaguccgacgagcuccuccacaacgucaacgucggcaaguccaccaccaacaucaugaucaccaccaucaucaucgucaucaucgucauccuccuccuccucaucgccgucggccucuuccucuacugcaaggcccgcugaggacuaguaauaaggaaacuguaugaaugucugugggcaggaagugaagagauccuucuguaaagguuuuuggaauuaugucugcugaauaauaaacuuuuuugaaauaauaaaucugguagaaaaaugagaucuaaaaaaaaaaaaaaaaaaaaaaaaaaaaaaaaaaaaaaaaaaaaaaaaaaaaaaaaaaaaaaaaugcaucccccccccccccccccccccccccccccccaaaggcucuuuucagagccaccagaauu

SEQ ID NO: 15339 - RNA, 1907 nt, Artificial Sequence
  mRNA product Design g-5 comprising derived and/or modified sequence from HRSV(Memphis-37)__AIY60640.1__F-del_DSCav1_mut2 (opt3)
gggagacccgugacccggaaguuguacggcuacgcgacuuucccucccacaaacccucgcgcccuuccuuuccuacuugggcccggcagaaagcuuaccauggagcugcccauccucaagaccaacgccauuacaacuauacuugcugcagugacgcugugcuucgccagcucccagaauaucaccgaagaguuuuaccaaucuacauguucagcggucaguaaaggcuauuugggggcuuuaagaacuggaugguacaccagcguuauuacaaucgaacuguccaacauuaaggagaauaaaugcaacgguaccgacgccaaggugaaacuaaucaagcaggaacucgauaaguauaaaaaugcaguaacugaccugcagcuucugaugcagucuacuccugccgcuggcucggggucagcaauauguagcggaaucgccgugugcaaggucuugcaccucgagggcgaggugaacaaaauuaagaaugcucugcugaguaccaacaaagccguugugucccucucuaauggugucagcguguuaacguucaagguacuggaucuuaagaacuacaucgacaaacaauugcugccaauucuaaauaagcaguccuguucaaucccgaacauagaaacuguuauugaguuucagcagaaaaauaacaggcuccuggaaaucacccgggaguucagugugaaugcgggggucacaacucccgugagcaccuauaugcuuacaaacucugagcuguugucccucauuaacgauaugccuaucaccaaugaccaaaagaaacugaugucaaacaaugugcagaucguccgccagcagagcuacaguauuaugugcauaaucaaggaagagguuuuagcauaugugguacaacugccacucuacggagugauugauacgcccuguuggaaacuucauacuucuccucugugcacaaccaacacuaaggaaggcuccaauaucuguuugacacgaaccgaccguggcugguacugcgauaacgccgggagcgucucguuuuucccacaggcugagacguguaaggugcagucuaauagaguuuucugcgacaccaugaacucccuaacacugcccucagaagugaaucucugcaacauagauauuuucaauccuaaauaugacuguaagaucaugacaaguaaaaccgaugucagcuccucugugaucacaagccugggagccauuguaucaugcuacgguaagacuaaauguaccgcaaguaacaagaauaggggcaucauuaagacauuuuccaacgggugcgacuauguuagcaauaaaggaguggacaccgucucugugggcaacacucuuuacugugucaacaagcaagagggucagucacuguaugugaaaggggagccaauaaucaauuucuacgauccguugguuuuucccagugacgaauuugaugcuagcauuucccaggugaacgagaagaucaaucagucucucgccuuuauccggaaaucggacgaacuguuacacaacguaaaugucggaaagagcacgacaaacauuaugauaaccacuaucauuaucgugauuaucguuauacugcuacuccugaucgcggugggccuuuucuuguauugcaaggcccgcugaggacuaguaauaaggaaacuguaugaaugucugugggcaggaagugaagagauccuucuguaaagguuuuuggaauuaugucugcugaauaauaaacuuuuuugaaauaauaaaucugguagaaaaaugagaucuaaaaaaaaaaaaaaaaaaaaaaaaaaaaaaaaaaaaaaaaaaaaaaaaaaaaaaaaaaaaaaaaugcaucccccccccccccccccccccccccccccccaaaggcucuuuucagagccaccagaauu

SEQ ID NO: 15340 - RNA, 1907 nt, Artificial Sequence
  mRNA product Design g-5 comprising derived and/or modified sequence from HRSV(Memphis-37)__AIY60640.1__F-del_DSCav1_mut2 (opt4)
gggagacccgugacccggaaguuguacggcuacgcgacuuucccucccacaaacccucgcgcccuuccuuuccuacuugggcccggcagaaagcuuaccauggagcugcccauccugaagaccaacgccaucaccaccauccuggccgccgugacccugugcuucgccagcagccagaacaucaccgaggaguucuaccagagcaccugcagcgccgugagcaagggcuaccugggcgcccugagaaccggcugguacaccagcgugaucaccaucgagcugagcaacaucaaggagaacaagugcaacggcaccgacgccaaggugaagcugaucaagcaggagcuggacaaguacaagaacgccgugaccgaccugcagcugcugaugcagagcacccccgccgccggcagcggcagcgccaucugcagcggcaucgccgugugcaaggugcugcaccuggagggcgaggugaacaagaucaagaacgcccugcugagcaccaacaaggccguggugagccugagcaacggcgugagcgugcugaccuucaaggugcuggaccugaagaacuacaucgacaagcagcugcugcccauccugaacaagcagagcugcagcauccccaacaucgagaccgugaucgaguuccagcagaagaacaacagacugcuggagaucaccagagaguucagcgugaacgccggcgugaccacccccgugagcaccuacaugcugaccaacagcgagcugcugagccugaucaacgacaugcccaucaccaacgaccagaagaagcugaugagcaacaacgugcagaucgugagacagcagagcuacagcaucaugugcaucaucaaggaggaggugcuggccuacguggugcagcugccccuguacggcgugaucgacacccccugcuggaagcugcacaccagcccccugugcaccaccaacaccaaggagggcagcaacaucugccugaccagaaccgacagaggcugguacugcgacaacgccggcagcgugagcuucuucccccaggccgagaccugcaaggugcagagcaacagaguguucugcgacaccaugaacagccugacccugcccagcgaggugaaccugugcaacaucgacaucuucaaccccaaguacgacugcaagaucaugaccagcaagaccgacgugagcagcagcgugaucaccagccugggcgccaucgugagcugcuacggcaagaccaagugcaccgccagcaacaagaacagaggcaucaucaagaccuucagcaacggcugcgacuacgugagcaacaagggcguggacaccgugagcgugggcaacacccuguacugcgugaacaagcaggagggccagagccuguacgugaagggcgagcccaucaucaacuucuacgacccccugguguuccccagcgacgaguucgacgccagcaucagccaggugaacgagaagaucaaccagagccuggccuucaucagaaagagcgacgagcugcugcacaacgugaacgugggcaagagcaccaccaacaucaugaucaccaccaucaucaucgugaucaucgugauccugcugcugcugaucgccgugggccuguuccuguacugcaaggccagaugaggacuaguaauaaggaaacuguaugaaugucugugggcaggaagugaagagauccuucuguaaagguuuuuggaauuaugucugcugaauaauaaacuuuuuugaaauaauaaaucugguagaaaaaugagaucuaaaaaaaaaaaaaaaaaaaaaaaaaaaaaaaaaaaaaaaaaaaaaaaaaaaaaaaaaaaaaaaaugcaucccccccccccccccccccccccccccccccaaaggcucuuuucagagccaccagaauu

SEQ ID NO: 15341 - RNA, 1907 nt, Artificial Sequence
  mRNA product Design g-5 comprising derived and/or modified sequence from HRSV(Memphis-37)__AIY60640.1__F-del_DSCav1_mut2 (opt5)
gggagacccgugacccggaaguuguacggcuacgcgacuuucccucccacaaacccucgcgcccuuccuuuccuacuugggcccggcagaaagcuuaccauggagcugcccauccucaagaccaacgccauuacaacgauccuggcugccgugacccuuugcuucgcgagcucccagaauauuacagaagaguuuuaccaaucuaccuguagcgcugucuccaaaggcuaucugggggcccucagaacaggaugguacaccucuguuaucacaauugaacugagcaacaucaaggagaauaaaugcaacggcaccgacgccaaggugaaacuuaucaagcaggaacuggauaaguauaaaaaugcugugacggaccuccagcugcugaugcaguccaccccugccgcugggucuggaagcgccauuuguuccggcaucgcggucugcaaggugcuccaccuggagggggagguuaacaaaauuaagaaugcccuucugagcacaaacaaagcuguggucucucucuccaauggagugagcguucugaccuucaaggugcuugaucugaagaacuacaucgacaaacaacuccugccgauucugaauaagcagucuuguuccauccccaacauugaaacagucaucgaguuucagcagaaaaauaaccggcuccuggaaaucacccgcgaguucagcgugaaugccggcgugacgacaccugucucuaccuauaugcuuacaaacuccgagcugcucagccugauuaacgauaugcccaucaccaaugaccaaaagaaacuuauguccaacaauguucagauugugagacagcagucuuacagcaucaugugcauuaucaaggaagaggugcuggcuuaugucgugcaacucccucuguacggcguuaucgauacccccuguuggaaacugcauacauccccucucugcacgaccaacacaaaggaagggagcaauauuugucugacccggacagaccgcggaugguacugcgauaacgccggcucuguguccuuuuucccgcaggcggagaccuguaagguccagagcaauagaguguuuugcgacacgaugaacucucuuacacugcccagcgaaguuaaucucugcaacaucgauauuuucaauccuaaauaugacuguaagaucaugaccuccaaaaccgaugugucuagcuccgucauuacaagccugggggccaucgugucuugcuacggaaagaccaaauguacagcuuccaacaagaaucggggcaucauuaagacguuuagcaacgggugcgacuaugucucuaauaaaggaguggacaccguuuccgugggcaacacacuuuacugugucaacaagcaagagggccagagccuguaugugaaaggggagcccaucauuaauuucuacgauccucucguuuuucccuccgacgaguucgaugccucuaucagccaggugaacgaaaagauuaaucagucccuggcuuuuauccgcaaaucugacgaacugcuccacaacgucaaugugggaaagagcaccacaaacauuaugaucaccacgaucauuaucgugauuaucguuauucugcuucugcucaucgccgucggccuguuccuguauugcaaggccagaugaggacuaguaauaaggaaacuguaugaaugucugugggcaggaagugaagagauccuucuguaaagguuuuuggaauuaugucugcugaauaauaaacuuuuuugaaauaauaaaucugguagaaaaaugagaucuaaaaaaaaaaaaaaaaaaaaaaaaaaaaaaaaaaaaaaaaaaaaaaaaaaaaaaaaaaaaaaaaugcaucccccccccccccccccccccccccccccccaaaggcucuuuucagagccaccagaauu

SEQ ID NO: 15342 - RNA, 1907 nt, Artificial Sequence
  mRNA product Design g-5 comprising derived and/or modified sequence from HRSV(Memphis-37)__AIY60640.1__F-del_DSCav1_mut2 (opt6)
gggagacccgugacccggaaguuguacggcuacgcgacuuucccucccacaaacccucgcgcccuuccuuuccuacuugggcccggcagaaagcuuaccauggaacuaccaauacucaaaacaaacgcaauaacaacaauuuuagcugcaguaacacuuuguuucgcauccucccaaaauauaacagaagaauuuuaucaaucaaccugcucagccgucuccaaaggauaucuaggugcacuacgcacuggaugguacacaagugucaucacaauagaacuuuccaacaucaaagaaaauaaauguaauggaacugacgcaaaaguaaaacucauaaaacaagaacuagacaaauacaaaaacgcaguaacagaccuacaacuauuaaugcaaucaacaccagcagcaggauccggcagugccauaugcucuggaauagcagucugcaaaguuuuacacuuagaaggcgaaguaaacaaaaucaaaaacgcccuacuaucuacaaauaaagccgucguaucucucucaaauggaguaucaguacuaacauucaaaguauuagacuuaaaaaacuacaucgauaaacaauuauugccaauauuaaacaaacaaucuugcucaauaccaaauauagaaacagucauagaauuucaacaaaaaaauaaccgauuauuagaaauaacacgagaauuuucaguaaaugccggagucaccacaccaguaucaacauacaugcuaacaaauucagaacuauuaucauuaauaaacgacaugccuauuacaaaugaucaaaaaaaacuaauguccaacaauguacaaauaguccgacaacaaagcuacucaaucauguguauaauaaaagaagaaguacuugcauacguaguacaauuaccacuauacggaguuaucgacacaccaugcuggaaacuccacacuucaccacucugcaccacaaacacaaaagaaggcucaaacauaugccuaacaagaacagaccgaggaugguacugcgacaacgcaggaucaguaucauucuucccacaagcagaaacuugcaaaguacaaucuaacagaguuuucugugacaccaugaauagccuaacacuccccuccgaaguuaaccuauguaacauagauauauuuaaucccaaauaugauugcaaaaucaugacaucuaaaaccgacguaucaucaucuguaaucacaucacuaggugccauagucucaugcuacggcaaaacaaaaugcaccgccucaaacaaaaaccgagguauaauaaaaaccuucaguaauggaugugacuacguaucaaacaaagguguugauaccguaagcgucggcaacacccuauacugcguaaauaaacaagaaggccaaucacuauacgucaaaggcgaaccaauuauuaacuucuaugacccacucgucuuucccuccgacgaauuugacgcaagcauaucacaaguaaacgaaaaaauaaaccaaucacuagcauucauacgcaaaucagaugaacuacuacauaacguaaacguaggaaaauccacuacaaauauaaugaucacaacaauaauaaucguaauuauagucauauuauuacuacuaauagcaguaggacuuuuccuauacuguaaagcaagauaaggacuaguaauaaggaaacuguaugaaugucugugggcaggaagugaagagauccuucuguaaagguuuuuggaauuaugucugcugaauaauaaacuuuuuugaaauaauaaaucugguagaaaaaugagaucuaaaaaaaaaaaaaaaaaaaaaaaaaaaaaaaaaaaaaaaaaaaaaaaaaaaaaaaaaaaaaaaaugcaucccccccccccccccccccccccccccccccaaaggcucuuuucagagccaccagaauu

SEQ ID NO: 15343 - RNA, 1907 nt, Artificial Sequence
  mRNA product Design g-5 comprising derived and/or modified sequence from HRSV(Memphis-37)__AIY60640.1__F-del_DSCav1_mut2 (opt11)
gggagacccgugacccggaaguuguacggcuacgcgacuuucccucccacaaacccucgcgcccuuccuuuccuacuugggcccggcagaaagcuuaccauggaacuucccauccucaagaccaacgcuauuacgaccauccucgccgcagucacccucugcuucgcgucaucccaaaacaucaccgaagaauuuuaccaauccacaugcuccgcagucucaaaaggcuaccuaggagcccuacgcaccggaugguacacauccgucaucacaaucgaacucuccaacauaaaagaaaacaaaugcaacggcaccgaugccaaaguaaaacugauuaaacaagaacucgacaaauacaagaacgccgucacagaccuacagcuccucaugcaaucaacucccgccgccggcagcggauccgcuaucugcucaggcaucgccguaugcaaaguccuccaccuagaaggcgaaguaaacaaaaucaagaacgcacuacucucaacaaacaaagccgucgucucccucuccaacggcgucuccguccuuaccuucaaaguccucgaccuuaagaacuacauugacaaacaacuccuacccauccucaacaaacaauccugcucuauaccuaauauagaaaccguaaucgaauuucaacagaaaaacaaccgccuccucgaaauuacccgcgaguucucaguaaacgccggcguaaccacccccgucuccaccuacaugcucacaaauucagaacuccucagccucaucaacgacaugcccauaaccaacgaccaaaagaaacucaugucaaacaacguccaaaucgucaggcaacaaagcuacagcaucaugugcaucauuaaagaagaaguacucgccuacgucgugcaacuaccccucuacggcgucauagacacacccugcuggaaacuucacacaucaccgcucugcaccacaaacaccaaagaaggcaguaacauaugccucacccgaaccgaccgcggaugguacugcgacaacgccggauccgucagcuucuucccacaagccgaaaccugcaaaguacaauccaaccgagucuucugcgacaccaugaacucucuuacgcuccccucagaagucaaccuaugcaacaucgacaucuucaaccccaaauacgacugcaaaaucaugaccuccaaaacagacgucuccuccucagugauaaccucccucggcgccauugucuccugcuacggcaaaaccaaaugcaccgccuccaacaaaaaccgugggaucaucaaaaccuucucaaacggcugcgacuacguauccaauaagggugucgacacagucuccguaggcaauacccucuauugcgucaacaaacaagaaggccaaucccucuacgucaaaggcgaaccuaucaucaacuucuacgacccgcuagucuuccccucagacgaguucgacgcauccaucucacaagucaacgaaaagaucaaccagucccucgcauucauccgaaaauccgacgaacuucuccacaacguuaacgucggcaaauccaccacuaacauaaugaucaccacgaucaucauaguaauuaucgucauacuccuccuccuaaucgcugucggacucuuccucuacugcaaggcccgcuaaggacuaguaauaaggaaacuguaugaaugucugugggcaggaagugaagagauccuucuguaaagguuuuuggaauuaugucugcugaauaauaaacuuuuuugaaauaauaaaucugguagaaaaaugagaucuaaaaaaaaaaaaaaaaaaaaaaaaaaaaaaaaaaaaaaaaaaaaaaaaaaaaaaaaaaaaaaaaugcaucccccccccccccccccccccccccccccccaaaggcucuuuucagagccaccagaauu

SEQ ID NO: 15344 - RNA, 1923 nt, Artificial Sequence
  mRNA product Design h-1 comprising derived and/or modified sequence from HRSV(Memphis-37)__AIY60640.1__F-del_DSCav1_mut2 (opt1)
gggagacccgugacccggaaguuguacggcuacgcgacuuucccucccacaaacccucgcgcccuuccuuuccuacuugggcccggcagaaagcuuaccauggagcugcccauccucaagaccaacgccaucaccacgauccuggccgcggugacccugugcuucgccagcucccagaacaucaccgaggaguucuaccagagcacgugcuccgccgucagcaagggcuaccucggcgcccugcgcaccgggugguacaccagcgugaucaccaucgagcuguccaacaucaaggagaacaagugcaacggcaccgacgccaaggugaagcucaucaagcaggagcuggacaaguacaagaacgcggucacggaccugcagcuccugaugcagagcaccccggccgccggcuccgggagcgcgaucugcuccggcaucgccgucugcaaggugcugcaccucgagggcgaggugaacaagaucaagaacgcccugcuguccaccaacaaggccgucgugagccucuccaacggggugagcguccugaccuucaaggugcuggaccucaagaacuacaucgacaagcagcugcugcccauccugaacaagcagagcugcuccauccccaacaucgagaccgucaucgaguuccagcagaagaacaaccgccuccuggagaucacgcgggaguucagcgugaacgcgggcgugaccacccccgucuccaccuacaugcugacgaacagcgagcuccugucccugaucaacgacaugccgaucaccaacgaccagaagaagcucaugagcaacaacgugcagaucgugcgccagcaguccuacagcaucaugugcaucaucaaggaggagguccuggccuacguggugcagcugccccucuacggggucaucgacacccccugcuggaagcugcacaccagcccccugugcacgaccaacaccaaggagggcuccaacaucugccucacccggacggaccgcgggugguacugcgacaacgccggcagcguguccuucuucccgcaggccgagaccugcaagguccagagcaaccggguguucugcgacaccaugaacucccugacccugcccagcgaggugaaccucugcaacaucgacaucuucaaccccaaguacgacugcaagaucaugacguccaagaccgacgucagcuccagcgugaucaccucccugggcgccaucgugagcugcuacgggaagaccaagugcacggcgagcaacaagaaccgcggcaucaucaagaccuucuccaacgggugcgacuacgucagcaacaagggcguggacaccguguccgucggcaacacccuguacugcgugaacaagcaggagggccagagccucuacgugaagggggagcccaucaucaacuucuacgacccgcuggucuuccccuccgacgaguucgacgccagcaucucccaggugaacgagaagaucaaccagagccuggccuucauccggaaguccgacgagcuccugcacaacgugaacgucggcaagagcaccacgaacaucaugaucaccaccaucaucaucgugaucaucgugauccugcugcuccugaucgccgucgggcuguuccucuacugcaaggcccgcugaggacuaguacuggcugcaucucccuuuccucuguccuccauccuucucccaggauggugaagggggaccugguacccagugauccccaccccaggauccuaaaucaugacuuaccugcuaauaaaaacucauuggaaaagugagaagaucuaaaaaaaaaaaaaaaaaaaaaaaaaaaaaaaaaaaaaaaaaaaaaaaaaaaaaaaaaaaaaaaaugcaucccccccccccccccccccccccccccccccaaaggcucuuuucagagccaccagaauu

SEQ ID NO: 15345 - RNA, 1923 nt, Artificial Sequence
  mRNA product Design h-1 comprising derived and/or modified sequence from HRSV(Memphis-37)__AIY60640.1__F-del_DSCav1_mut2 (opt1)
gggagacccgugacccggaaguuguacggcuacgcgacuuucccucccacaaacccucgcgcccuuccuuuccuacuugggcccggcagaaagcuuaccauggagcugcccauccucaagaccaacgccaucaccacgauccuggccgcggugacccugugcuucgccagcucccagaacaucaccgaggaguucuaccagagcacgugcuccgccgucagcaagggcuaccucggggcccugcgcaccggcugguacaccuccgugaucaccaucgagcugagcaacaucaaggagaacaagugcaacgggaccgacgccaaggugaagcucaucaagcaggagcuggacaaguacaagaacgcggucacggaccugcagcuccugaugcaguccaccccggccgccggcagcggguccgccaucugcagcggcaucgcggugugcaaggugcugcaccucgagggcgaggucaacaagaucaagaacgcccugcuguccaccaacaaggccguggugagccucuccaacggggucagcgugcugaccuucaaggugcuggaccucaagaacuacaucgacaagcagcugcugcccauccucaacaagcaguccugcagcauccccaacaucgagacggucaucgaguuccagcagaagaacaaccggcugcuggagaucacccgcgaguucuccgugaacgccggcgugaccacccccgucagcacguacaugcucaccaacuccgagcugcugagccucaucaacgacaugccgaucaccaacgaccagaagaagcugaugagcaacaacgugcagaucgugcggcagcaguccuacagcaucaugugcaucaucaaggaggagguccuggccuacguggugcagcucccccuguacggggucaucgacacccccugcuggaagcugcacacgagcccccucugcaccaccaacaccaaggagggcuccaacaucugccugacgcgcaccgaccgggggugguacugcgacaacgcgggcuccgugagcuucuucccgcaggccgagaccugcaaggugcaguccaaccgcgucuucugcgacaccaugaacagccugacgcuccccuccgaggugaaccugugcaacaucgacaucuucaaccccaaguacgacugcaagaucaugaccagcaagaccgacgucuccagcuccgugaucaccagccugggcgccaucguguccugcuacgggaagacgaagugcaccgccagcaacaagaaccggggcaucaucaagaccuucuccaacgggugcgacuacgucagcaacaagggcguggacaccguguccgucggcaacacgcucuacugcgugaacaagcaggaggggcagagccuguacgugaagggcgagcccaucaucaacuucuacgacccgcuggucuuccccagcgacgaguucgacgccuccaucagccaggugaacgagaagaucaaccagucccucgcguucauccgcaagagcgacgagcugcugcacaacgugaacgucgggaaguccaccaccaacaucaugaucaccaccaucaucaucgugaucaucgugauccuccugcugcucaucgccgucggccuguuccuguacugcaaggcccggugaggacuaguacuggcugcaucucccuuuccucuguccuccauccuucucccaggauggugaagggggaccugguacccagugauccccaccccaggauccuaaaucaugacuuaccugcuaauaaaaacucauuggaaaagugagaagaucuaaaaaaaaaaaaaaaaaaaaaaaaaaaaaaaaaaaaaaaaaaaaaaaaaaaaaaaaaaaaaaaaugcaucccccccccccccccccccccccccccccccaaaggcucuuuucagagccaccagaauu

SEQ ID NO: 15346 - RNA, 1923 nt, Artificial Sequence
  mRNA product Design h-1 comprising derived and/or modified sequence from HRSV(Memphis-37)__AIY60640.1__F-del_DSCav1_mut2 (opt2)
gggagacccgugacccggaaguuguacggcuacgcgacuuucccucccacaaacccucgcgcccuuccuuuccuacuugggcccggcagaaagcuuaccauggagcuccccauccucaagaccaacgccaucaccaccauccucgccgccgucacccucugcuucgccuccucccagaacaucaccgaggaguucuaccaguccaccugcuccgccgucuccaagggcuaccucggcgcccuccgcaccggcugguacaccuccgucaucaccaucgagcucuccaacaucaaggagaacaagugcaacggcaccgacgccaaggucaagcucaucaagcaggagcucgacaaguacaagaacgccgucaccgaccuccagcuccucaugcaguccacccccgccgccggcuccggcuccgccaucugcuccggcaucgccgucugcaagguccuccaccucgagggcgaggucaacaagaucaagaacgcccuccucuccaccaacaaggccgucgucucccucuccaacggcgucuccguccucaccuucaagguccucgaccucaagaacuacaucgacaagcagcuccuccccauccucaacaagcaguccugcuccauccccaacaucgagaccgucaucgaguuccagcagaagaacaaccgccuccucgagaucacccgcgaguucuccgucaacgccggcgucaccacccccgucuccaccuacaugcucaccaacuccgagcuccucucccucaucaacgacaugcccaucaccaacgaccagaagaagcucauguccaacaacguccagaucguccgccagcaguccuacuccaucaugugcaucaucaaggaggagguccucgccuacgucguccagcucccccucuacggcgucaucgacacccccugcuggaagcuccacaccuccccccucugcaccaccaacaccaaggagggcuccaacaucugccucacccgcaccgaccgcggcugguacugcgacaacgccggcuccgucuccuucuucccccaggccgagaccugcaagguccaguccaaccgcgucuucugcgacaccaugaacucccucacccuccccuccgaggucaaccucugcaacaucgacaucuucaaccccaaguacgacugcaagaucaugaccuccaagaccgacgucuccuccuccgucaucaccucccucggcgccaucgucuccugcuacggcaagaccaagugcaccgccuccaacaagaaccgcggcaucaucaagaccuucuccaacggcugcgacuacgucuccaacaagggcgucgacaccgucuccgucggcaacacccucuacugcgucaacaagcaggagggccagucccucuacgucaagggcgagcccaucaucaacuucuacgacccccucgucuuccccuccgacgaguucgacgccuccaucucccaggucaacgagaagaucaaccagucccucgccuucauccgcaaguccgacgagcuccuccacaacgucaacgucggcaaguccaccaccaacaucaugaucaccaccaucaucaucgucaucaucgucauccuccuccuccucaucgccgucggccucuuccucuacugcaaggcccgcugaggacuaguacuggcugcaucucccuuuccucuguccuccauccuucucccaggauggugaagggggaccugguacccagugauccccaccccaggauccuaaaucaugacuuaccugcuaauaaaaacucauuggaaaagugagaagaucuaaaaaaaaaaaaaaaaaaaaaaaaaaaaaaaaaaaaaaaaaaaaaaaaaaaaaaaaaaaaaaaaugcaucccccccccccccccccccccccccccccccaaaggcucuuuucagagccaccagaauu

SEQ ID NO: 15347 - RNA, 1923 nt, Artificial Sequence
  mRNA product Design h-1 comprising derived and/or modified sequence from HRSV(Memphis-37)__AIY60640.1__F-del_DSCav1_mut2 (opt3)
gggagacccgugacccggaaguuguacggcuacgcgacuuucccucccacaaacccucgcgcccuuccuuuccuacuugggcccggcagaaagcuuaccauggagcugcccauccucaagaccaacgccauuacaacuauacuugcugcagugacgcugugcuucgccagcucccagaauaucaccgaagaguuuuaccaaucuacauguucagcggucaguaaaggcuauuugggggcuuuaagaacuggaugguacaccagcguuauuacaaucgaacuguccaacauuaaggagaauaaaugcaacgguaccgacgccaaggugaaacuaaucaagcaggaacucgauaaguauaaaaaugcaguaacugaccugcagcuucugaugcagucuacuccugccgcuggcucggggucagcaauauguagcggaaucgccgugugcaaggucuugcaccucgagggcgaggugaacaaaauuaagaaugcucugcugaguaccaacaaagccguugugucccucucuaauggugucagcguguuaacguucaagguacuggaucuuaagaacuacaucgacaaacaauugcugccaauucuaaauaagcaguccuguucaaucccgaacauagaaacuguuauugaguuucagcagaaaaauaacaggcuccuggaaaucacccgggaguucagugugaaugcgggggucacaacucccgugagcaccuauaugcuuacaaacucugagcuguugucccucauuaacgauaugccuaucaccaaugaccaaaagaaacugaugucaaacaaugugcagaucguccgccagcagagcuacaguauuaugugcauaaucaaggaagagguuuuagcauaugugguacaacugccacucuacggagugauugauacgcccuguuggaaacuucauacuucuccucugugcacaaccaacacuaaggaaggcuccaauaucuguuugacacgaaccgaccguggcugguacugcgauaacgccgggagcgucucguuuuucccacaggcugagacguguaaggugcagucuaauagaguuuucugcgacaccaugaacucccuaacacugcccucagaagugaaucucugcaacauagauauuuucaauccuaaauaugacuguaagaucaugacaaguaaaaccgaugucagcuccucugugaucacaagccugggagccauuguaucaugcuacgguaagacuaaauguaccgcaaguaacaagaauaggggcaucauuaagacauuuuccaacgggugcgacuauguuagcaauaaaggaguggacaccgucucugugggcaacacucuuuacugugucaacaagcaagagggucagucacuguaugugaaaggggagccaauaaucaauuucuacgauccguugguuuuucccagugacgaauuugaugcuagcauuucccaggugaacgagaagaucaaucagucucucgccuuuauccggaaaucggacgaacuguuacacaacguaaaugucggaaagagcacgacaaacauuaugauaaccacuaucauuaucgugauuaucguuauacugcuacuccugaucgcggugggccuuuucuuguauugcaaggcccgcugaggacuaguacuggcugcaucucccuuuccucuguccuccauccuucucccaggauggugaagggggaccugguacccagugauccccaccccaggauccuaaaucaugacuuaccugcuaauaaaaacucauuggaaaagugagaagaucuaaaaaaaaaaaaaaaaaaaaaaaaaaaaaaaaaaaaaaaaaaaaaaaaaaaaaaaaaaaaaaaaugcaucccccccccccccccccccccccccccccccaaaggcucuuuucagagccaccagaauu

SEQ ID NO: 15348 - RNA, 1923 nt, Artificial Sequence
  mRNA product Design h-1 comprising derived and/or modified sequence from HRSV(Memphis-37)__AIY60640.1__F-del_DSCav1_mut2 (opt4)
gggagacccgugacccggaaguuguacggcuacgcgacuuucccucccacaaacccucgcgcccuuccuuuccuacuugggcccggcagaaagcuuaccauggagcugcccauccugaagaccaacgccaucaccaccauccuggccgccgugacccugugcuucgccagcagccagaacaucaccgaggaguucuaccagagcaccugcagcgccgugagcaagggcuaccugggcgcccugagaaccggcugguacaccagcgugaucaccaucgagcugagcaacaucaaggagaacaagugcaacggcaccgacgccaaggugaagcugaucaagcaggagcuggacaaguacaagaacgccgugaccgaccugcagcugcugaugcagagcacccccgccgccggcagcggcagcgccaucugcagcggcaucgccgugugcaaggugcugcaccuggagggcgaggugaacaagaucaagaacgcccugcugagcaccaacaaggccguggugagccugagcaacggcgugagcgugcugaccuucaaggugcuggaccugaagaacuacaucgacaagcagcugcugcccauccugaacaagcagagcugcagcauccccaacaucgagaccgugaucgaguuccagcagaagaacaacagacugcuggagaucaccagagaguucagcgugaacgccggcgugaccacccccgugagcaccuacaugcugaccaacagcgagcugcugagccugaucaacgacaugcccaucaccaacgaccagaagaagcugaugagcaacaacgugcagaucgugagacagcagagcuacagcaucaugugcaucaucaaggaggaggugcuggccuacguggugcagcugccccuguacggcgugaucgacacccccugcuggaagcugcacaccagcccccugugcaccaccaacaccaaggagggcagcaacaucugccugaccagaaccgacagaggcugguacugcgacaacgccggcagcgugagcuucuucccccaggccgagaccugcaaggugcagagcaacagaguguucugcgacaccaugaacagccugacccugcccagcgaggugaaccugugcaacaucgacaucuucaaccccaaguacgacugcaagaucaugaccagcaagaccgacgugagcagcagcgugaucaccagccugggcgccaucgugagcugcuacggcaagaccaagugcaccgccagcaacaagaacagaggcaucaucaagaccuucagcaacggcugcgacuacgugagcaacaagggcguggacaccgugagcgugggcaacacccuguacugcgugaacaagcaggagggccagagccuguacgugaagggcgagcccaucaucaacuucuacgacccccugguguuccccagcgacgaguucgacgccagcaucagccaggugaacgagaagaucaaccagagccuggccuucaucagaaagagcgacgagcugcugcacaacgugaacgugggcaagagcaccaccaacaucaugaucaccaccaucaucaucgugaucaucgugauccugcugcugcugaucgccgugggccuguuccuguacugcaaggccagaugaggacuaguacuggcugcaucucccuuuccucuguccuccauccuucucccaggauggugaagggggaccugguacccagugauccccaccccaggauccuaaaucaugacuuaccugcuaauaaaaacucauuggaaaagugagaagaucuaaaaaaaaaaaaaaaaaaaaaaaaaaaaaaaaaaaaaaaaaaaaaaaaaaaaaaaaaaaaaaaaugcaucccccccccccccccccccccccccccccccaaaggcucuuuucagagccaccagaauu

SEQ ID NO: 15349 - RNA, 1923 nt, Artificial Sequence
  mRNA product Design h-1 comprising derived and/or modified sequence from HRSV(Memphis-37)__AIY60640.1__F-del_DSCav1_mut2 (opt5)
gggagacccgugacccggaaguuguacggcuacgcgacuuucccucccacaaacccucgcgcccuuccuuuccuacuugggcccggcagaaagcuuaccauggagcugcccauccucaagaccaacgccauuacaacgauccuggcugccgugacccuuugcuucgcgagcucccagaauauuacagaagaguuuuaccaaucuaccuguagcgcugucuccaaaggcuaucugggggcccucagaacaggaugguacaccucuguuaucacaauugaacugagcaacaucaaggagaauaaaugcaacggcaccgacgccaaggugaaacuuaucaagcaggaacuggauaaguauaaaaaugcugugacggaccuccagcugcugaugcaguccaccccugccgcugggucuggaagcgccauuuguuccggcaucgcggucugcaaggugcuccaccuggagggggagguuaacaaaauuaagaaugcccuucugagcacaaacaaagcuguggucucucucuccaauggagugagcguucugaccuucaaggugcuugaucugaagaacuacaucgacaaacaacuccugccgauucugaauaagcagucuuguuccauccccaacauugaaacagucaucgaguuucagcagaaaaauaaccggcuccuggaaaucacccgcgaguucagcgugaaugccggcgugacgacaccugucucuaccuauaugcuuacaaacuccgagcugcucagccugauuaacgauaugcccaucaccaaugaccaaaagaaacuuauguccaacaauguucagauugugagacagcagucuuacagcaucaugugcauuaucaaggaagaggugcuggcuuaugucgugcaacucccucuguacggcguuaucgauacccccuguuggaaacugcauacauccccucucugcacgaccaacacaaaggaagggagcaauauuugucugacccggacagaccgcggaugguacugcgauaacgccggcucuguguccuuuuucccgcaggcggagaccuguaagguccagagcaauagaguguuuugcgacacgaugaacucucuuacacugcccagcgaaguuaaucucugcaacaucgauauuuucaauccuaaauaugacuguaagaucaugaccuccaaaaccgaugugucuagcuccgucauuacaagccugggggccaucgugucuugcuacggaaagaccaaauguacagcuuccaacaagaaucggggcaucauuaagacguuuagcaacgggugcgacuaugucucuaauaaaggaguggacaccguuuccgugggcaacacacuuuacugugucaacaagcaagagggccagagccuguaugugaaaggggagcccaucauuaauuucuacgauccucucguuuuucccuccgacgaguucgaugccucuaucagccaggugaacgaaaagauuaaucagucccuggcuuuuauccgcaaaucugacgaacugcuccacaacgucaaugugggaaagagcaccacaaacauuaugaucaccacgaucauuaucgugauuaucguuauucugcuucugcucaucgccgucggccuguuccuguauugcaaggccagaugaggacuaguacuggcugcaucucccuuuccucuguccuccauccuucucccaggauggugaagggggaccugguacccagugauccccaccccaggauccuaaaucaugacuuaccugcuaauaaaaacucauuggaaaagugagaagaucuaaaaaaaaaaaaaaaaaaaaaaaaaaaaaaaaaaaaaaaaaaaaaaaaaaaaaaaaaaaaaaaaugcaucccccccccccccccccccccccccccccccaaaggcucuuuucagagccaccagaauu

SEQ ID NO: 15350 - RNA, 1923 nt, Artificial Sequence
  mRNA product Design h-1 comprising derived and/or modified sequence from HRSV(Memphis-37)__AIY60640.1__F-del_DSCav1_mut2 (opt6)
gggagacccgugacccggaaguuguacggcuacgcgacuuucccucccacaaacccucgcgcccuuccuuuccuacuugggcccggcagaaagcuuaccauggaacuaccaauacucaaaacaaacgcaauaacaacaauuuuagcugcaguaacacuuuguuucgcauccucccaaaauauaacagaagaauuuuaucaaucaaccugcucagccgucuccaaaggauaucuaggugcacuacgcacuggaugguacacaagugucaucacaauagaacuuuccaacaucaaagaaaauaaauguaauggaacugacgcaaaaguaaaacucauaaaacaagaacuagacaaauacaaaaacgcaguaacagaccuacaacuauuaaugcaaucaacaccagcagcaggauccggcagugccauaugcucuggaauagcagucugcaaaguuuuacacuuagaaggcgaaguaaacaaaaucaaaaacgcccuacuaucuacaaauaaagccgucguaucucucucaaauggaguaucaguacuaacauucaaaguauuagacuuaaaaaacuacaucgauaaacaauuauugccaauauuaaacaaacaaucuugcucaauaccaaauauagaaacagucauagaauuucaacaaaaaaauaaccgauuauuagaaauaacacgagaauuuucaguaaaugccggagucaccacaccaguaucaacauacaugcuaacaaauucagaacuauuaucauuaauaaacgacaugccuauuacaaaugaucaaaaaaaacuaauguccaacaauguacaaauaguccgacaacaaagcuacucaaucauguguauaauaaaagaagaaguacuugcauacguaguacaauuaccacuauacggaguuaucgacacaccaugcuggaaacuccacacuucaccacucugcaccacaaacacaaaagaaggcucaaacauaugccuaacaagaacagaccgaggaugguacugcgacaacgcaggaucaguaucauucuucccacaagcagaaacuugcaaaguacaaucuaacagaguuuucugugacaccaugaauagccuaacacuccccuccgaaguuaaccuauguaacauagauauauuuaaucccaaauaugauugcaaaaucaugacaucuaaaaccgacguaucaucaucuguaaucacaucacuaggugccauagucucaugcuacggcaaaacaaaaugcaccgccucaaacaaaaaccgagguauaauaaaaaccuucaguaauggaugugacuacguaucaaacaaagguguugauaccguaagcgucggcaacacccuauacugcguaaauaaacaagaaggccaaucacuauacgucaaaggcgaaccaauuauuaacuucuaugacccacucgucuuucccuccgacgaauuugacgcaagcauaucacaaguaaacgaaaaaauaaaccaaucacuagcauucauacgcaaaucagaugaacuacuacauaacguaaacguaggaaaauccacuacaaauauaaugaucacaacaauaauaaucguaauuauagucauauuauuacuacuaauagcaguaggacuuuuccuauacuguaaagcaagauaaggacuaguacuggcugcaucucccuuuccucuguccuccauccuucucccaggauggugaagggggaccugguacccagugauccccaccccaggauccuaaaucaugacuuaccugcuaauaaaaacucauuggaaaagugagaagaucuaaaaaaaaaaaaaaaaaaaaaaaaaaaaaaaaaaaaaaaaaaaaaaaaaaaaaaaaaaaaaaaaugcaucccccccccccccccccccccccccccccccaaaggcucuuuucagagccaccagaauu

SEQ ID NO: 15351 - RNA, 1923 nt, Artificial Sequence
  mRNA product Design h-1 comprising derived and/or modified sequence from HRSV(Memphis-37)__AIY60640.1__F-del_DSCav1_mut2 (opt11)
gggagacccgugacccggaaguuguacggcuacgcgacuuucccucccacaaacccucgcgcccuuccuuuccuacuugggcccggcagaaagcuuaccauggaacuucccauccucaagaccaacgcuauuacgaccauccucgccgcagucacccucugcuucgcgucaucccaaaacaucaccgaagaauuuuaccaauccacaugcuccgcagucucaaaaggcuaccuaggagcccuacgcaccggaugguacacauccgucaucacaaucgaacucuccaacauaaaagaaaacaaaugcaacggcaccgaugccaaaguaaaacugauuaaacaagaacucgacaaauacaagaacgccgucacagaccuacagcuccucaugcaaucaacucccgccgccggcagcggauccgcuaucugcucaggcaucgccguaugcaaaguccuccaccuagaaggcgaaguaaacaaaaucaagaacgcacuacucucaacaaacaaagccgucgucucccucuccaacggcgucuccguccuuaccuucaaaguccucgaccuuaagaacuacauugacaaacaacuccuacccauccucaacaaacaauccugcucuauaccuaauauagaaaccguaaucgaauuucaacagaaaaacaaccgccuccucgaaauuacccgcgaguucucaguaaacgccggcguaaccacccccgucuccaccuacaugcucacaaauucagaacuccucagccucaucaacgacaugcccauaaccaacgaccaaaagaaacucaugucaaacaacguccaaaucgucaggcaacaaagcuacagcaucaugugcaucauuaaagaagaaguacucgccuacgucgugcaacuaccccucuacggcgucauagacacacccugcuggaaacuucacacaucaccgcucugcaccacaaacaccaaagaaggcaguaacauaugccucacccgaaccgaccgcggaugguacugcgacaacgccggauccgucagcuucuucccacaagccgaaaccugcaaaguacaauccaaccgagucuucugcgacaccaugaacucucuuacgcuccccucagaagucaaccuaugcaacaucgacaucuucaaccccaaauacgacugcaaaaucaugaccuccaaaacagacgucuccuccucagugauaaccucccucggcgccauugucuccugcuacggcaaaaccaaaugcaccgccuccaacaaaaaccgugggaucaucaaaaccuucucaaacggcugcgacuacguauccaauaagggugucgacacagucuccguaggcaauacccucuauugcgucaacaaacaagaaggccaaucccucuacgucaaaggcgaaccuaucaucaacuucuacgacccgcuagucuuccccucagacgaguucgacgcauccaucucacaagucaacgaaaagaucaaccagucccucgcauucauccgaaaauccgacgaacuucuccacaacguuaacgucggcaaauccaccacuaacauaaugaucaccacgaucaucauaguaauuaucgucauacuccuccuccuaaucgcugucggacucuuccucuacugcaaggcccgcuaaggacuaguacuggcugcaucucccuuuccucuguccuccauccuucucccaggauggugaagggggaccugguacccagugauccccaccccaggauccuaaaucaugacuuaccugcuaauaaaaacucauuggaaaagugagaagaucuaaaaaaaaaaaaaaaaaaaaaaaaaaaaaaaaaaaaaaaaaaaaaaaaaaaaaaaaaaaaaaaaugcaucccccccccccccccccccccccccccccccaaaggcucuuuucagagccaccagaauu

SEQ ID NO: 15352 - RNA, 2139 nt, Artificial Sequence
  mRNA product Design h-2 comprising derived and/or modified sequence from HRSV(Memphis-37)__AIY60640.1__F-del_DSCav1_mut2 (opt1)
gggagacccgugacccggaaguuguacggcuacgcgacuuucccucccacaaacccucgcgcccuuccuuuccuacuugggcccggcagaaagcuuaccauggagcugcccauccucaagaccaacgccaucaccacgauccuggccgcggugacccugugcuucgccagcucccagaacaucaccgaggaguucuaccagagcacgugcuccgccgucagcaagggcuaccucggcgcccugcgcaccgggugguacaccagcgugaucaccaucgagcuguccaacaucaaggagaacaagugcaacggcaccgacgccaaggugaagcucaucaagcaggagcuggacaaguacaagaacgcggucacggaccugcagcuccugaugcagagcaccccggccgccggcuccgggagcgcgaucugcuccggcaucgccgucugcaaggugcugcaccucgagggcgaggugaacaagaucaagaacgcccugcuguccaccaacaaggccgucgugagccucuccaacggggugagcguccugaccuucaaggugcuggaccucaagaacuacaucgacaagcagcugcugcccauccugaacaagcagagcugcuccauccccaacaucgagaccgucaucgaguuccagcagaagaacaaccgccuccuggagaucacgcgggaguucagcgugaacgcgggcgugaccacccccgucuccaccuacaugcugacgaacagcgagcuccugucccugaucaacgacaugccgaucaccaacgaccagaagaagcucaugagcaacaacgugcagaucgugcgccagcaguccuacagcaucaugugcaucaucaaggaggagguccuggccuacguggugcagcugccccucuacggggucaucgacacccccugcuggaagcugcacaccagcccccugugcacgaccaacaccaaggagggcuccaacaucugccucacccggacggaccgcgggugguacugcgacaacgccggcagcguguccuucuucccgcaggccgagaccugcaagguccagagcaaccggguguucugcgacaccaugaacucccugacccugcccagcgaggugaaccucugcaacaucgacaucuucaaccccaaguacgacugcaagaucaugacguccaagaccgacgucagcuccagcgugaucaccucccugggcgccaucgugagcugcuacgggaagaccaagugcacggcgagcaacaagaaccgcggcaucaucaagaccuucuccaacgggugcgacuacgucagcaacaagggcguggacaccguguccgucggcaacacccuguacugcgugaacaagcaggagggccagagccucuacgugaagggggagcccaucaucaacuucuacgacccgcuggucuuccccuccgacgaguucgacgccagcaucucccaggugaacgagaagaucaaccagagccuggccuucauccggaaguccgacgagcuccugcacaacgugaacgucggcaagagcaccacgaacaucaugaucaccaccaucaucaucgugaucaucgugauccugcugcuccugaucgccgucgggcuguuccucuacugcaaggcccgcugaggacuagugaagggaacacccaaauuuaauucagccuuaagcacaauuaauuaagagugaaacguaauuguacaagcaguuggucacccaccauagggcaugaucaacaccgcaaccuuuccuuuuucccccagugauucugaaaaaccccucuucccuucagcuugcuuagauguuccaaauuuaguaagcuuaaggcggccuacagaagaaaaagaaaaaaaaggccacaaaaguucccucucacuuucaguaaauaaaauaaaagcagcaacagaaauaaagaaauaaaugaaauucaaaaugaaauaaauauuguguugugcagcauuaaaaaaucaauaaaaauuaaaaaugagcaagaucuaaaaaaaaaaaaaaaaaaaaaaaaaaaaaaaaaaaaaaaaaaaaaaaaaaaaaaaaaaaaaaaaugcaucccccccccccccccccccccccccccccccaaaggcucuuuucagagccaccagaauu

SEQ ID NO: 15353 - RNA, 2139 nt, Artificial Sequence
  mRNA product Design h-2 comprising derived and/or modified sequence from HRSV(Memphis-37)__AIY60640.1__F-del_DSCav1_mut2 (opt1)
gggagacccgugacccggaaguuguacggcuacgcgacuuucccucccacaaacccucgcgcccuuccuuuccuacuugggcccggcagaaagcuuaccauggagcugcccauccucaagaccaacgccaucaccacgauccuggccgcggugacccugugcuucgccagcucccagaacaucaccgaggaguucuaccagagcacgugcuccgccgucagcaagggcuaccucggggcccugcgcaccggcugguacaccuccgugaucaccaucgagcugagcaacaucaaggagaacaagugcaacgggaccgacgccaaggugaagcucaucaagcaggagcuggacaaguacaagaacgcggucacggaccugcagcuccugaugcaguccaccccggccgccggcagcggguccgccaucugcagcggcaucgcggugugcaaggugcugcaccucgagggcgaggucaacaagaucaagaacgcccugcuguccaccaacaaggccguggugagccucuccaacggggucagcgugcugaccuucaaggugcuggaccucaagaacuacaucgacaagcagcugcugcccauccucaacaagcaguccugcagcauccccaacaucgagacggucaucgaguuccagcagaagaacaaccggcugcuggagaucacccgcgaguucuccgugaacgccggcgugaccacccccgucagcacguacaugcucaccaacuccgagcugcugagccucaucaacgacaugccgaucaccaacgaccagaagaagcugaugagcaacaacgugcagaucgugcggcagcaguccuacagcaucaugugcaucaucaaggaggagguccuggccuacguggugcagcucccccuguacggggucaucgacacccccugcuggaagcugcacacgagcccccucugcaccaccaacaccaaggagggcuccaacaucugccugacgcgcaccgaccgggggugguacugcgacaacgcgggcuccgugagcuucuucccgcaggccgagaccugcaaggugcaguccaaccgcgucuucugcgacaccaugaacagccugacgcuccccuccgaggugaaccugugcaacaucgacaucuucaaccccaaguacgacugcaagaucaugaccagcaagaccgacgucuccagcuccgugaucaccagccugggcgccaucguguccugcuacgggaagacgaagugcaccgccagcaacaagaaccggggcaucaucaagaccuucuccaacgggugcgacuacgucagcaacaagggcguggacaccguguccgucggcaacacgcucuacugcgugaacaagcaggaggggcagagccuguacgugaagggcgagcccaucaucaacuucuacgacccgcuggucuuccccagcgacgaguucgacgccuccaucagccaggugaacgagaagaucaaccagucccucgcguucauccgcaagagcgacgagcugcugcacaacgugaacgucgggaaguccaccaccaacaucaugaucaccaccaucaucaucgugaucaucgugauccuccugcugcucaucgccgucggccuguuccuguacugcaaggcccggugaggacuagugaagggaacacccaaauuuaauucagccuuaagcacaauuaauuaagagugaaacguaauuguacaagcaguuggucacccaccauagggcaugaucaacaccgcaaccuuuccuuuuucccccagugauucugaaaaaccccucuucccuucagcuugcuuagauguuccaaauuuaguaagcuuaaggcggccuacagaagaaaaagaaaaaaaaggccacaaaaguucccucucacuuucaguaaauaaaauaaaagcagcaacagaaauaaagaaauaaaugaaauucaaaaugaaauaaauauuguguugugcagcauuaaaaaaucaauaaaaauuaaaaaugagcaagaucuaaaaaaaaaaaaaaaaaaaaaaaaaaaaaaaaaaaaaaaaaaaaaaaaaaaaaaaaaaaaaaaaugcaucccccccccccccccccccccccccccccccaaaggcucuuuucagagccaccagaauu

SEQ ID NO: 15354 - RNA, 2139 nt, Artificial Sequence
  mRNA product Design h-2 comprising derived and/or modified sequence from HRSV(Memphis-37)__AIY60640.1__F-del_DSCav1_mut2 (opt2)
gggagacccgugacccggaaguuguacggcuacgcgacuuucccucccacaaacccucgcgcccuuccuuuccuacuugggcccggcagaaagcuuaccauggagcuccccauccucaagaccaacgccaucaccaccauccucgccgccgucacccucugcuucgccuccucccagaacaucaccgaggaguucuaccaguccaccugcuccgccgucuccaagggcuaccucggcgcccuccgcaccggcugguacaccuccgucaucaccaucgagcucuccaacaucaaggagaacaagugcaacggcaccgacgccaaggucaagcucaucaagcaggagcucgacaaguacaagaacgccgucaccgaccuccagcuccucaugcaguccacccccgccgccggcuccggcuccgccaucugcuccggcaucgccgucugcaagguccuccaccucgagggcgaggucaacaagaucaagaacgcccuccucuccaccaacaaggccgucgucucccucuccaacggcgucuccguccucaccuucaagguccucgaccucaagaacuacaucgacaagcagcuccuccccauccucaacaagcaguccugcuccauccccaacaucgagaccgucaucgaguuccagcagaagaacaaccgccuccucgagaucacccgcgaguucuccgucaacgccggcgucaccacccccgucuccaccuacaugcucaccaacuccgagcuccucucccucaucaacgacaugcccaucaccaacgaccagaagaagcucauguccaacaacguccagaucguccgccagcaguccuacuccaucaugugcaucaucaaggaggagguccucgccuacgucguccagcucccccucuacggcgucaucgacacccccugcuggaagcuccacaccuccccccucugcaccaccaacaccaaggagggcuccaacaucugccucacccgcaccgaccgcggcugguacugcgacaacgccggcuccgucuccuucuucccccaggccgagaccugcaagguccaguccaaccgcgucuucugcgacaccaugaacucccucacccuccccuccgaggucaaccucugcaacaucgacaucuucaaccccaaguacgacugcaagaucaugaccuccaagaccgacgucuccuccuccgucaucaccucccucggcgccaucgucuccugcuacggcaagaccaagugcaccgccuccaacaagaaccgcggcaucaucaagaccuucuccaacggcugcgacuacgucuccaacaagggcgucgacaccgucuccgucggcaacacccucuacugcgucaacaagcaggagggccagucccucuacgucaagggcgagcccaucaucaacuucuacgacccccucgucuuccccuccgacgaguucgacgccuccaucucccaggucaacgagaagaucaaccagucccucgccuucauccgcaaguccgacgagcuccuccacaacgucaacgucggcaaguccaccaccaacaucaugaucaccaccaucaucaucgucaucaucgucauccuccuccuccucaucgccgucggccucuuccucuacugcaaggcccgcugaggacuagugaagggaacacccaaauuuaauucagccuuaagcacaauuaauuaagagugaaacguaauuguacaagcaguuggucacccaccauagggcaugaucaacaccgcaaccuuuccuuuuucccccagugauucugaaaaaccccucuucccuucagcuugcuuagauguuccaaauuuaguaagcuuaaggcggccuacagaagaaaaagaaaaaaaaggccacaaaaguucccucucacuuucaguaaauaaaauaaaagcagcaacagaaauaaagaaauaaaugaaauucaaaaugaaauaaauauuguguugugcagcauuaaaaaaucaauaaaaauuaaaaaugagcaagaucuaaaaaaaaaaaaaaaaaaaaaaaaaaaaaaaaaaaaaaaaaaaaaaaaaaaaaaaaaaaaaaaaugcaucccccccccccccccccccccccccccccccaaaggcucuuuucagagccaccagaauu

SEQ ID NO: 15355 - RNA, 2139 nt, Artificial Sequence
  mRNA product Design h-2 comprising derived and/or modified sequence from HRSV(Memphis-37)__AIY60640.1__F-del_DSCav1_mut2 (opt3)
gggagacccgugacccggaaguuguacggcuacgcgacuuucccucccacaaacccucgcgcccuuccuuuccuacuugggcccggcagaaagcuuaccauggagcugcccauccucaagaccaacgccauuacaacuauacuugcugcagugacgcugugcuucgccagcucccagaauaucaccgaagaguuuuaccaaucuacauguucagcggucaguaaaggcuauuugggggcuuuaagaacuggaugguacaccagcguuauuacaaucgaacuguccaacauuaaggagaauaaaugcaacgguaccgacgccaaggugaaacuaaucaagcaggaacucgauaaguauaaaaaugcaguaacugaccugcagcuucugaugcagucuacuccugccgcuggcucggggucagcaauauguagcggaaucgccgugugcaaggucuugcaccucgagggcgaggugaacaaaauuaagaaugcucugcugaguaccaacaaagccguugugucccucucuaauggugucagcguguuaacguucaagguacuggaucuuaagaacuacaucgacaaacaauugcugccaauucuaaauaagcaguccuguucaaucccgaacauagaaacuguuauugaguuucagcagaaaaauaacaggcuccuggaaaucacccgggaguucagugugaaugcgggggucacaacucccgugagcaccuauaugcuuacaaacucugagcuguugucccucauuaacgauaugccuaucaccaaugaccaaaagaaacugaugucaaacaaugugcagaucguccgccagcagagcuacaguauuaugugcauaaucaaggaagagguuuuagcauaugugguacaacugccacucuacggagugauugauacgcccuguuggaaacuucauacuucuccucugugcacaaccaacacuaaggaaggcuccaauaucuguuugacacgaaccgaccguggcugguacugcgauaacgccgggagcgucucguuuuucccacaggcugagacguguaaggugcagucuaauagaguuuucugcgacaccaugaacucccuaacacugcccucagaagugaaucucugcaacauagauauuuucaauccuaaauaugacuguaagaucaugacaaguaaaaccgaugucagcuccucugugaucacaagccugggagccauuguaucaugcuacgguaagacuaaauguaccgcaaguaacaagaauaggggcaucauuaagacauuuuccaacgggugcgacuauguuagcaauaaaggaguggacaccgucucugugggcaacacucuuuacugugucaacaagcaagagggucagucacuguaugugaaaggggagccaauaaucaauuucuacgauccguugguuuuucccagugacgaauuugaugcuagcauuucccaggugaacgagaagaucaaucagucucucgccuuuauccggaaaucggacgaacuguuacacaacguaaaugucggaaagagcacgacaaacauuaugauaaccacuaucauuaucgugauuaucguuauacugcuacuccugaucgcggugggccuuuucuuguauugcaaggcccgcugaggacuagugaagggaacacccaaauuuaauucagccuuaagcacaauuaauuaagagugaaacguaauuguacaagcaguuggucacccaccauagggcaugaucaacaccgcaaccuuuccuuuuucccccagugauucugaaaaaccccucuucccuucagcuugcuuagauguuccaaauuuaguaagcuuaaggcggccuacagaagaaaaagaaaaaaaaggccacaaaaguucccucucacuuucaguaaauaaaauaaaagcagcaacagaaauaaagaaauaaaugaaauucaaaaugaaauaaauauuguguugugcagcauuaaaaaaucaauaaaaauuaaaaaugagcaagaucuaaaaaaaaaaaaaaaaaaaaaaaaaaaaaaaaaaaaaaaaaaaaaaaaaaaaaaaaaaaaaaaaugcaucccccccccccccccccccccccccccccccaaaggcucuuuucagagccaccagaauu

SEQ ID NO: 15356 - RNA, 2139 nt, Artificial Sequence
  mRNA product Design h-2 comprising derived and/or modified sequence from HRSV(Memphis-37)__AIY60640.1__F-del_DSCav1_mut2 (opt4)
gggagacccgugacccggaaguuguacggcuacgcgacuuucccucccacaaacccucgcgcccuuccuuuccuacuugggcccggcagaaagcuuaccauggagcugcccauccugaagaccaacgccaucaccaccauccuggccgccgugacccugugcuucgccagcagccagaacaucaccgaggaguucuaccagagcaccugcagcgccgugagcaagggcuaccugggcgcccugagaaccggcugguacaccagcgugaucaccaucgagcugagcaacaucaaggagaacaagugcaacggcaccgacgccaaggugaagcugaucaagcaggagcuggacaaguacaagaacgccgugaccgaccugcagcugcugaugcagagcacccccgccgccggcagcggcagcgccaucugcagcggcaucgccgugugcaaggugcugcaccuggagggcgaggugaacaagaucaagaacgcccugcugagcaccaacaaggccguggugagccugagcaacggcgugagcgugcugaccuucaaggugcuggaccugaagaacuacaucgacaagcagcugcugcccauccugaacaagcagagcugcagcauccccaacaucgagaccgugaucgaguuccagcagaagaacaacagacugcuggagaucaccagagaguucagcgugaacgccggcgugaccacccccgugagcaccuacaugcugaccaacagcgagcugcugagccugaucaacgacaugcccaucaccaacgaccagaagaagcugaugagcaacaacgugcagaucgugagacagcagagcuacagcaucaugugcaucaucaaggaggaggugcuggccuacguggugcagcugccccuguacggcgugaucgacacccccugcuggaagcugcacaccagcccccugugcaccaccaacaccaaggagggcagcaacaucugccugaccagaaccgacagaggcugguacugcgacaacgccggcagcgugagcuucuucccccaggccgagaccugcaaggugcagagcaacagaguguucugcgacaccaugaacagccugacccugcccagcgaggugaaccugugcaacaucgacaucuucaaccccaaguacgacugcaagaucaugaccagcaagaccgacgugagcagcagcgugaucaccagccugggcgccaucgugagcugcuacggcaagaccaagugcaccgccagcaacaagaacagaggcaucaucaagaccuucagcaacggcugcgacuacgugagcaacaagggcguggacaccgugagcgugggcaacacccuguacugcgugaacaagcaggagggccagagccuguacgugaagggcgagcccaucaucaacuucuacgacccccugguguuccccagcgacgaguucgacgccagcaucagccaggugaacgagaagaucaaccagagccuggccuucaucagaaagagcgacgagcugcugcacaacgugaacgugggcaagagcaccaccaacaucaugaucaccaccaucaucaucgugaucaucgugauccugcugcugcugaucgccgugggccuguuccuguacugcaaggccagaugaggacuagugaagggaacacccaaauuuaauucagccuuaagcacaauuaauuaagagugaaacguaauuguacaagcaguuggucacccaccauagggcaugaucaacaccgcaaccuuuccuuuuucccccagugauucugaaaaaccccucuucccuucagcuugcuuagauguuccaaauuuaguaagcuuaaggcggccuacagaagaaaaagaaaaaaaaggccacaaaaguucccucucacuuucaguaaauaaaauaaaagcagcaacagaaauaaagaaauaaaugaaauucaaaaugaaauaaauauuguguugugcagcauuaaaaaaucaauaaaaauuaaaaaugagcaagaucuaaaaaaaaaaaaaaaaaaaaaaaaaaaaaaaaaaaaaaaaaaaaaaaaaaaaaaaaaaaaaaaaugcaucccccccccccccccccccccccccccccccaaaggcucuuuucagagccaccagaauu

SEQ ID NO: 15357 - RNA, 2139 nt, Artificial Sequence
  mRNA product Design h-2 comprising derived and/or modified sequence from HRSV(Memphis-37)__AIY60640.1__F-del_DSCav1_mut2 (opt5)
gggagacccgugacccggaaguuguacggcuacgcgacuuucccucccacaaacccucgcgcccuuccuuuccuacuugggcccggcagaaagcuuaccauggagcugcccauccucaagaccaacgccauuacaacgauccuggcugccgugacccuuugcuucgcgagcucccagaauauuacagaagaguuuuaccaaucuaccuguagcgcugucuccaaaggcuaucugggggcccucagaacaggaugguacaccucuguuaucacaauugaacugagcaacaucaaggagaauaaaugcaacggcaccgacgccaaggugaaacuuaucaagcaggaacuggauaaguauaaaaaugcugugacggaccuccagcugcugaugcaguccaccccugccgcugggucuggaagcgccauuuguuccggcaucgcggucugcaaggugcuccaccuggagggggagguuaacaaaauuaagaaugcccuucugagcacaaacaaagcuguggucucucucuccaauggagugagcguucugaccuucaaggugcuugaucugaagaacuacaucgacaaacaacuccugccgauucugaauaagcagucuuguuccauccccaacauugaaacagucaucgaguuucagcagaaaaauaaccggcuccuggaaaucacccgcgaguucagcgugaaugccggcgugacgacaccugucucuaccuauaugcuuacaaacuccgagcugcucagccugauuaacgauaugcccaucaccaaugaccaaaagaaacuuauguccaacaauguucagauugugagacagcagucuuacagcaucaugugcauuaucaaggaagaggugcuggcuuaugucgugcaacucccucuguacggcguuaucgauacccccuguuggaaacugcauacauccccucucugcacgaccaacacaaaggaagggagcaauauuugucugacccggacagaccgcggaugguacugcgauaacgccggcucuguguccuuuuucccgcaggcggagaccuguaagguccagagcaauagaguguuuugcgacacgaugaacucucuuacacugcccagcgaaguuaaucucugcaacaucgauauuuucaauccuaaauaugacuguaagaucaugaccuccaaaaccgaugugucuagcuccgucauuacaagccugggggccaucgugucuugcuacggaaagaccaaauguacagcuuccaacaagaaucggggcaucauuaagacguuuagcaacgggugcgacuaugucucuaauaaaggaguggacaccguuuccgugggcaacacacuuuacugugucaacaagcaagagggccagagccuguaugugaaaggggagcccaucauuaauuucuacgauccucucguuuuucccuccgacgaguucgaugccucuaucagccaggugaacgaaaagauuaaucagucccuggcuuuuauccgcaaaucugacgaacugcuccacaacgucaaugugggaaagagcaccacaaacauuaugaucaccacgaucauuaucgugauuaucguuauucugcuucugcucaucgccgucggccuguuccuguauugcaaggccagaugaggacuagugaagggaacacccaaauuuaauucagccuuaagcacaauuaauuaagagugaaacguaauuguacaagcaguuggucacccaccauagggcaugaucaacaccgcaaccuuuccuuuuucccccagugauucugaaaaaccccucuucccuucagcuugcuuagauguuccaaauuuaguaagcuuaaggcggccuacagaagaaaaagaaaaaaaaggccacaaaaguucccucucacuuucaguaaauaaaauaaaagcagcaacagaaauaaagaaauaaaugaaauucaaaaugaaauaaauauuguguugugcagcauuaaaaaaucaauaaaaauuaaaaaugagcaagaucuaaaaaaaaaaaaaaaaaaaaaaaaaaaaaaaaaaaaaaaaaaaaaaaaaaaaaaaaaaaaaaaaugcaucccccccccccccccccccccccccccccccaaaggcucuuuucagagccaccagaauu

SEQ ID NO: 15358 - RNA, 2139 nt, Artificial Sequence
  mRNA product Design h-2 comprising derived and/or modified sequence from HRSV(Memphis-37)__AIY60640.1__F-del_DSCav1_mut2 (opt6)
gggagacccgugacccggaaguuguacggcuacgcgacuuucccucccacaaacccucgcgcccuuccuuuccuacuugggcccggcagaaagcuuaccauggaacuaccaauacucaaaacaaacgcaauaacaacaauuuuagcugcaguaacacuuuguuucgcauccucccaaaauauaacagaagaauuuuaucaaucaaccugcucagccgucuccaaaggauaucuaggugcacuacgcacuggaugguacacaagugucaucacaauagaacuuuccaacaucaaagaaaauaaauguaauggaacugacgcaaaaguaaaacucauaaaacaagaacuagacaaauacaaaaacgcaguaacagaccuacaacuauuaaugcaaucaacaccagcagcaggauccggcagugccauaugcucuggaauagcagucugcaaaguuuuacacuuagaaggcgaaguaaacaaaaucaaaaacgcccuacuaucuacaaauaaagccgucguaucucucucaaauggaguaucaguacuaacauucaaaguauuagacuuaaaaaacuacaucgauaaacaauuauugccaauauuaaacaaacaaucuugcucaauaccaaauauagaaacagucauagaauuucaacaaaaaaauaaccgauuauuagaaauaacacgagaauuuucaguaaaugccggagucaccacaccaguaucaacauacaugcuaacaaauucagaacuauuaucauuaauaaacgacaugccuauuacaaaugaucaaaaaaaacuaauguccaacaauguacaaauaguccgacaacaaagcuacucaaucauguguauaauaaaagaagaaguacuugcauacguaguacaauuaccacuauacggaguuaucgacacaccaugcuggaaacuccacacuucaccacucugcaccacaaacacaaaagaaggcucaaacauaugccuaacaagaacagaccgaggaugguacugcgacaacgcaggaucaguaucauucuucccacaagcagaaacuugcaaaguacaaucuaacagaguuuucugugacaccaugaauagccuaacacuccccuccgaaguuaaccuauguaacauagauauauuuaaucccaaauaugauugcaaaaucaugacaucuaaaaccgacguaucaucaucuguaaucacaucacuaggugccauagucucaugcuacggcaaaacaaaaugcaccgccucaaacaaaaaccgagguauaauaaaaaccuucaguaauggaugugacuacguaucaaacaaagguguugauaccguaagcgucggcaacacccuauacugcguaaauaaacaagaaggccaaucacuauacgucaaaggcgaaccaauuauuaacuucuaugacccacucgucuuucccuccgacgaauuugacgcaagcauaucacaaguaaacgaaaaaauaaaccaaucacuagcauucauacgcaaaucagaugaacuacuacauaacguaaacguaggaaaauccacuacaaauauaaugaucacaacaauaauaaucguaauuauagucauauuauuacuacuaauagcaguaggacuuuuccuauacuguaaagcaagauaaggacuagugaagggaacacccaaauuuaauucagccuuaagcacaauuaauuaagagugaaacguaauuguacaagcaguuggucacccaccauagggcaugaucaacaccgcaaccuuuccuuuuucccccagugauucugaaaaaccccucuucccuucagcuugcuuagauguuccaaauuuaguaagcuuaaggcggccuacagaagaaaaagaaaaaaaaggccacaaaaguucccucucacuuucaguaaauaaaauaaaagcagcaacagaaauaaagaaauaaaugaaauucaaaaugaaauaaauauuguguugugcagcauuaaaaaaucaauaaaaauuaaaaaugagcaagaucuaaaaaaaaaaaaaaaaaaaaaaaaaaaaaaaaaaaaaaaaaaaaaaaaaaaaaaaaaaaaaaaaugcaucccccccccccccccccccccccccccccccaaaggcucuuuucagagccaccagaauu

SEQ ID NO: 15359 - RNA, 2139 nt, Artificial Sequence
  mRNA product Design h-2 comprising derived and/or modified sequence from HRSV(Memphis-37)__AIY60640.1__F-del_DSCav1_mut2 (opt11)
gggagacccgugacccggaaguuguacggcuacgcgacuuucccucccacaaacccucgcgcccuuccuuuccuacuugggcccggcagaaagcuuaccauggaacuucccauccucaagaccaacgcuauuacgaccauccucgccgcagucacccucugcuucgcgucaucccaaaacaucaccgaagaauuuuaccaauccacaugcuccgcagucucaaaaggcuaccuaggagcccuacgcaccggaugguacacauccgucaucacaaucgaacucuccaacauaaaagaaaacaaaugcaacggcaccgaugccaaaguaaaacugauuaaacaagaacucgacaaauacaagaacgccgucacagaccuacagcuccucaugcaaucaacucccgccgccggcagcggauccgcuaucugcucaggcaucgccguaugcaaaguccuccaccuagaaggcgaaguaaacaaaaucaagaacgcacuacucucaacaaacaaagccgucgucucccucuccaacggcgucuccguccuuaccuucaaaguccucgaccuuaagaacuacauugacaaacaacuccuacccauccucaacaaacaauccugcucuauaccuaauauagaaaccguaaucgaauuucaacagaaaaacaaccgccuccucgaaauuacccgcgaguucucaguaaacgccggcguaaccacccccgucuccaccuacaugcucacaaauucagaacuccucagccucaucaacgacaugcccauaaccaacgaccaaaagaaacucaugucaaacaacguccaaaucgucaggcaacaaagcuacagcaucaugugcaucauuaaagaagaaguacucgccuacgucgugcaacuaccccucuacggcgucauagacacacccugcuggaaacuucacacaucaccgcucugcaccacaaacaccaaagaaggcaguaacauaugccucacccgaaccgaccgcggaugguacugcgacaacgccggauccgucagcuucuucccacaagccgaaaccugcaaaguacaauccaaccgagucuucugcgacaccaugaacucucuuacgcuccccucagaagucaaccuaugcaacaucgacaucuucaaccccaaauacgacugcaaaaucaugaccuccaaaacagacgucuccuccucagugauaaccucccucggcgccauugucuccugcuacggcaaaaccaaaugcaccgccuccaacaaaaaccgugggaucaucaaaaccuucucaaacggcugcgacuacguauccaauaagggugucgacacagucuccguaggcaauacccucuauugcgucaacaaacaagaaggccaaucccucuacgucaaaggcgaaccuaucaucaacuucuacgacccgcuagucuuccccucagacgaguucgacgcauccaucucacaagucaacgaaaagaucaaccagucccucgcauucauccgaaaauccgacgaacuucuccacaacguuaacgucggcaaauccaccacuaacauaaugaucaccacgaucaucauaguaauuaucgucauacuccuccuccuaaucgcugucggacucuuccucuacugcaaggcccgcuaaggacuagugaagggaacacccaaauuuaauucagccuuaagcacaauuaauuaagagugaaacguaauuguacaagcaguuggucacccaccauagggcaugaucaacaccgcaaccuuuccuuuuucccccagugauucugaaaaaccccucuucccuucagcuugcuuagauguuccaaauuuaguaagcuuaaggcggccuacagaagaaaaagaaaaaaaaggccacaaaaguucccucucacuuucaguaaauaaaauaaaagcagcaacagaaauaaagaaauaaaugaaauucaaaaugaaauaaauauuguguugugcagcauuaaaaaaucaauaaaaauuaaaaaugagcaagaucuaaaaaaaaaaaaaaaaaaaaaaaaaaaaaaaaaaaaaaaaaaaaaaaaaaaaaaaaaaaaaaaaugcaucccccccccccccccccccccccccccccccaaaggcucuuuucagagccaccagaauu

SEQ ID NO: 15360 - RNA, 1919 nt, Artificial Sequence
  mRNA product Design h-3 comprising derived and/or modified sequence from HRSV(Memphis-37)__AIY60640.1__F-del_DSCav1_mut2 (opt1)
gggagacccgugacccggaaguuguacggcuacgcgacuuucccucccacaaacccucgcgcccuuccuuuccuacuugggcccggcagaaagcuuaccauggagcugcccauccucaagaccaacgccaucaccacgauccuggccgcggugacccugugcuucgccagcucccagaacaucaccgaggaguucuaccagagcacgugcuccgccgucagcaagggcuaccucggcgcccugcgcaccgggugguacaccagcgugaucaccaucgagcuguccaacaucaaggagaacaagugcaacggcaccgacgccaaggugaagcucaucaagcaggagcuggacaaguacaagaacgcggucacggaccugcagcuccugaugcagagcaccccggccgccggcuccgggagcgcgaucugcuccggcaucgccgucugcaaggugcugcaccucgagggcgaggugaacaagaucaagaacgcccugcuguccaccaacaaggccgucgugagccucuccaacggggugagcguccugaccuucaaggugcuggaccucaagaacuacaucgacaagcagcugcugcccauccugaacaagcagagcugcuccauccccaacaucgagaccgucaucgaguuccagcagaagaacaaccgccuccuggagaucacgcgggaguucagcgugaacgcgggcgugaccacccccgucuccaccuacaugcugacgaacagcgagcuccugucccugaucaacgacaugccgaucaccaacgaccagaagaagcucaugagcaacaacgugcagaucgugcgccagcaguccuacagcaucaugugcaucaucaaggaggagguccuggccuacguggugcagcugccccucuacggggucaucgacacccccugcuggaagcugcacaccagcccccugugcacgaccaacaccaaggagggcuccaacaucugccucacccggacggaccgcgggugguacugcgacaacgccggcagcguguccuucuucccgcaggccgagaccugcaagguccagagcaaccggguguucugcgacaccaugaacucccugacccugcccagcgaggugaaccucugcaacaucgacaucuucaaccccaaguacgacugcaagaucaugacguccaagaccgacgucagcuccagcgugaucaccucccugggcgccaucgugagcugcuacgggaagaccaagugcacggcgagcaacaagaaccgcggcaucaucaagaccuucuccaacgggugcgacuacgucagcaacaagggcguggacaccguguccgucggcaacacccuguacugcgugaacaagcaggagggccagagccucuacgugaagggggagcccaucaucaacuucuacgacccgcuggucuuccccuccgacgaguucgacgccagcaucucccaggugaacgagaagaucaaccagagccuggccuucauccggaaguccgacgagcuccugcacaacgugaacgucggcaagagcaccacgaacaucaugaucaccaccaucaucaucgugaucaucgugauccugcugcuccugaucgccgucgggcuguuccucuacugcaaggcccgcugaggacuaguggaagcauuuuccuggcugauuaaaagaaauuacucagcuauggucaucuguuccuguuagaaggcuaugcagcauauuauauacuaugcgcauguuaugaaaugcauaauaaaaaauuuuaaaaaaucuaaaagaucuaaaaaaaaaaaaaaaaaaaaaaaaaaaaaaaaaaaaaaaaaaaaaaaaaaaaaaaaaaaaaaaaugcaucccccccccccccccccccccccccccccccaaaggcucuuuucagagccaccagaauu

SEQ ID NO: 15361 - RNA, 1919 nt, Artificial Sequence
  mRNA product Design h-3 comprising derived and/or modified sequence from HRSV(Memphis-37)__AIY60640.1__F-del_DSCav1_mut2 (opt1)
gggagacccgugacccggaaguuguacggcuacgcgacuuucccucccacaaacccucgcgcccuuccuuuccuacuugggcccggcagaaagcuuaccauggagcugcccauccucaagaccaacgccaucaccacgauccuggccgcggugacccugugcuucgccagcucccagaacaucaccgaggaguucuaccagagcacgugcuccgccgucagcaagggcuaccucggggcccugcgcaccggcugguacaccuccgugaucaccaucgagcugagcaacaucaaggagaacaagugcaacgggaccgacgccaaggugaagcucaucaagcaggagcuggacaaguacaagaacgcggucacggaccugcagcuccugaugcaguccaccccggccgccggcagcggguccgccaucugcagcggcaucgcggugugcaaggugcugcaccucgagggcgaggucaacaagaucaagaacgcccugcuguccaccaacaaggccguggugagccucuccaacggggucagcgugcugaccuucaaggugcuggaccucaagaacuacaucgacaagcagcugcugcccauccucaacaagcaguccugcagcauccccaacaucgagacggucaucgaguuccagcagaagaacaaccggcugcuggagaucacccgcgaguucuccgugaacgccggcgugaccacccccgucagcacguacaugcucaccaacuccgagcugcugagccucaucaacgacaugccgaucaccaacgaccagaagaagcugaugagcaacaacgugcagaucgugcggcagcaguccuacagcaucaugugcaucaucaaggaggagguccuggccuacguggugcagcucccccuguacggggucaucgacacccccugcuggaagcugcacacgagcccccucugcaccaccaacaccaaggagggcuccaacaucugccugacgcgcaccgaccgggggugguacugcgacaacgcgggcuccgugagcuucuucccgcaggccgagaccugcaaggugcaguccaaccgcgucuucugcgacaccaugaacagccugacgcuccccuccgaggugaaccugugcaacaucgacaucuucaaccccaaguacgacugcaagaucaugaccagcaagaccgacgucuccagcuccgugaucaccagccugggcgccaucguguccugcuacgggaagacgaagugcaccgccagcaacaagaaccggggcaucaucaagaccuucuccaacgggugcgacuacgucagcaacaagggcguggacaccguguccgucggcaacacgcucuacugcgugaacaagcaggaggggcagagccuguacgugaagggcgagcccaucaucaacuucuacgacccgcuggucuuccccagcgacgaguucgacgccuccaucagccaggugaacgagaagaucaaccagucccucgcguucauccgcaagagcgacgagcugcugcacaacgugaacgucgggaaguccaccaccaacaucaugaucaccaccaucaucaucgugaucaucgugauccuccugcugcucaucgccgucggccuguuccuguacugcaaggcccggugaggacuaguggaagcauuuuccuggcugauuaaaagaaauuacucagcuauggucaucuguuccuguuagaaggcuaugcagcauauuauauacuaugcgcauguuaugaaaugcauaauaaaaaauuuuaaaaaaucuaaaagaucuaaaaaaaaaaaaaaaaaaaaaaaaaaaaaaaaaaaaaaaaaaaaaaaaaaaaaaaaaaaaaaaaugcaucccccccccccccccccccccccccccccccaaaggcucuuuucagagccaccagaauu

SEQ ID NO: 15362 - RNA, 1919 nt, Artificial Sequence
  mRNA product Design h-3 comprising derived and/or modified sequence from HRSV(Memphis-37)__AIY60640.1__F-del_DSCav1_mut2 (opt2)
gggagacccgugacccggaaguuguacggcuacgcgacuuucccucccacaaacccucgcgcccuuccuuuccuacuugggcccggcagaaagcuuaccauggagcuccccauccucaagaccaacgccaucaccaccauccucgccgccgucacccucugcuucgccuccucccagaacaucaccgaggaguucuaccaguccaccugcuccgccgucuccaagggcuaccucggcgcccuccgcaccggcugguacaccuccgucaucaccaucgagcucuccaacaucaaggagaacaagugcaacggcaccgacgccaaggucaagcucaucaagcaggagcucgacaaguacaagaacgccgucaccgaccuccagcuccucaugcaguccacccccgccgccggcuccggcuccgccaucugcuccggcaucgccgucugcaagguccuccaccucgagggcgaggucaacaagaucaagaacgcccuccucuccaccaacaaggccgucgucucccucuccaacggcgucuccguccucaccuucaagguccucgaccucaagaacuacaucgacaagcagcuccuccccauccucaacaagcaguccugcuccauccccaacaucgagaccgucaucgaguuccagcagaagaacaaccgccuccucgagaucacccgcgaguucuccgucaacgccggcgucaccacccccgucuccaccuacaugcucaccaacuccgagcuccucucccucaucaacgacaugcccaucaccaacgaccagaagaagcucauguccaacaacguccagaucguccgccagcaguccuacuccaucaugugcaucaucaaggaggagguccucgccuacgucguccagcucccccucuacggcgucaucgacacccccugcuggaagcuccacaccuccccccucugcaccaccaacaccaaggagggcuccaacaucugccucacccgcaccgaccgcggcugguacugcgacaacgccggcuccgucuccuucuucccccaggccgagaccugcaagguccaguccaaccgcgucuucugcgacaccaugaacucccucacccuccccuccgaggucaaccucugcaacaucgacaucuucaaccccaaguacgacugcaagaucaugaccuccaagaccgacgucuccuccuccgucaucaccucccucggcgccaucgucuccugcuacggcaagaccaagugcaccgccuccaacaagaaccgcggcaucaucaagaccuucuccaacggcugcgacuacgucuccaacaagggcgucgacaccgucuccgucggcaacacccucuacugcgucaacaagcaggagggccagucccucuacgucaagggcgagcccaucaucaacuucuacgacccccucgucuuccccuccgacgaguucgacgccuccaucucccaggucaacgagaagaucaaccagucccucgccuucauccgcaaguccgacgagcuccuccacaacgucaacgucggcaaguccaccaccaacaucaugaucaccaccaucaucaucgucaucaucgucauccuccuccuccucaucgccgucggccucuuccucuacugcaaggcccgcugaggacuaguggaagcauuuuccuggcugauuaaaagaaauuacucagcuauggucaucuguuccuguuagaaggcuaugcagcauauuauauacuaugcgcauguuaugaaaugcauaauaaaaaauuuuaaaaaaucuaaaagaucuaaaaaaaaaaaaaaaaaaaaaaaaaaaaaaaaaaaaaaaaaaaaaaaaaaaaaaaaaaaaaaaaugcaucccccccccccccccccccccccccccccccaaaggcucuuuucagagccaccagaauu

SEQ ID NO: 15363 - RNA, 1919 nt, Artificial Sequence
  mRNA product Design h-3 comprising derived and/or modified sequence from HRSV(Memphis-37)__AIY60640.1__F-del_DSCav1_mut2 (opt3)
gggagacccgugacccggaaguuguacggcuacgcgacuuucccucccacaaacccucgcgcccuuccuuuccuacuugggcccggcagaaagcuuaccauggagcugcccauccucaagaccaacgccauuacaacuauacuugcugcagugacgcugugcuucgccagcucccagaauaucaccgaagaguuuuaccaaucuacauguucagcggucaguaaaggcuauuugggggcuuuaagaacuggaugguacaccagcguuauuacaaucgaacuguccaacauuaaggagaauaaaugcaacgguaccgacgccaaggugaaacuaaucaagcaggaacucgauaaguauaaaaaugcaguaacugaccugcagcuucugaugcagucuacuccugccgcuggcucggggucagcaauauguagcggaaucgccgugugcaaggucuugcaccucgagggcgaggugaacaaaauuaagaaugcucugcugaguaccaacaaagccguugugucccucucuaauggugucagcguguuaacguucaagguacuggaucuuaagaacuacaucgacaaacaauugcugccaauucuaaauaagcaguccuguucaaucccgaacauagaaacuguuauugaguuucagcagaaaaauaacaggcuccuggaaaucacccgggaguucagugugaaugcgggggucacaacucccgugagcaccuauaugcuuacaaacucugagcuguugucccucauuaacgauaugccuaucaccaaugaccaaaagaaacugaugucaaacaaugugcagaucguccgccagcagagcuacaguauuaugugcauaaucaaggaagagguuuuagcauaugugguacaacugccacucuacggagugauugauacgcccuguuggaaacuucauacuucuccucugugcacaaccaacacuaaggaaggcuccaauaucuguuugacacgaaccgaccguggcugguacugcgauaacgccgggagcgucucguuuuucccacaggcugagacguguaaggugcagucuaauagaguuuucugcgacaccaugaacucccuaacacugcccucagaagugaaucucugcaacauagauauuuucaauccuaaauaugacuguaagaucaugacaaguaaaaccgaugucagcuccucugugaucacaagccugggagccauuguaucaugcuacgguaagacuaaauguaccgcaaguaacaagaauaggggcaucauuaagacauuuuccaacgggugcgacuauguuagcaauaaaggaguggacaccgucucugugggcaacacucuuuacugugucaacaagcaagagggucagucacuguaugugaaaggggagccaauaaucaauuucuacgauccguugguuuuucccagugacgaauuugaugcuagcauuucccaggugaacgagaagaucaaucagucucucgccuuuauccggaaaucggacgaacuguuacacaacguaaaugucggaaagagcacgacaaacauuaugauaaccacuaucauuaucgugauuaucguuauacugcuacuccugaucgcggugggccuuuucuuguauugcaaggcccgcugaggacuaguggaagcauuuuccuggcugauuaaaagaaauuacucagcuauggucaucuguuccuguuagaaggcuaugcagcauauuauauacuaugcgcauguuaugaaaugcauaauaaaaaauuuuaaaaaaucuaaaagaucuaaaaaaaaaaaaaaaaaaaaaaaaaaaaaaaaaaaaaaaaaaaaaaaaaaaaaaaaaaaaaaaaugcaucccccccccccccccccccccccccccccccaaaggcucuuuucagagccaccagaauu

SEQ ID NO: 15364 - RNA, 1919 nt, Artificial Sequence
  mRNA product Design h-3 comprising derived and/or modified sequence from HRSV(Memphis-37)__AIY60640.1__F-del_DSCav1_mut2 (opt4)
gggagacccgugacccggaaguuguacggcuacgcgacuuucccucccacaaacccucgcgcccuuccuuuccuacuugggcccggcagaaagcuuaccauggagcugcccauccugaagaccaacgccaucaccaccauccuggccgccgugacccugugcuucgccagcagccagaacaucaccgaggaguucuaccagagcaccugcagcgccgugagcaagggcuaccugggcgcccugagaaccggcugguacaccagcgugaucaccaucgagcugagcaacaucaaggagaacaagugcaacggcaccgacgccaaggugaagcugaucaagcaggagcuggacaaguacaagaacgccgugaccgaccugcagcugcugaugcagagcacccccgccgccggcagcggcagcgccaucugcagcggcaucgccgugugcaaggugcugcaccuggagggcgaggugaacaagaucaagaacgcccugcugagcaccaacaaggccguggugagccugagcaacggcgugagcgugcugaccuucaaggugcuggaccugaagaacuacaucgacaagcagcugcugcccauccugaacaagcagagcugcagcauccccaacaucgagaccgugaucgaguuccagcagaagaacaacagacugcuggagaucaccagagaguucagcgugaacgccggcgugaccacccccgugagcaccuacaugcugaccaacagcgagcugcugagccugaucaacgacaugcccaucaccaacgaccagaagaagcugaugagcaacaacgugcagaucgugagacagcagagcuacagcaucaugugcaucaucaaggaggaggugcuggccuacguggugcagcugccccuguacggcgugaucgacacccccugcuggaagcugcacaccagcccccugugcaccaccaacaccaaggagggcagcaacaucugccugaccagaaccgacagaggcugguacugcgacaacgccggcagcgugagcuucuucccccaggccgagaccugcaaggugcagagcaacagaguguucugcgacaccaugaacagccugacccugcccagcgaggugaaccugugcaacaucgacaucuucaaccccaaguacgacugcaagaucaugaccagcaagaccgacgugagcagcagcgugaucaccagccugggcgccaucgugagcugcuacggcaagaccaagugcaccgccagcaacaagaacagaggcaucaucaagaccuucagcaacggcugcgacuacgugagcaacaagggcguggacaccgugagcgugggcaacacccuguacugcgugaacaagcaggagggccagagccuguacgugaagggcgagcccaucaucaacuucuacgacccccugguguuccccagcgacgaguucgacgccagcaucagccaggugaacgagaagaucaaccagagccuggccuucaucagaaagagcgacgagcugcugcacaacgugaacgugggcaagagcaccaccaacaucaugaucaccaccaucaucaucgugaucaucgugauccugcugcugcugaucgccgugggccuguuccuguacugcaaggccagaugaggacuaguggaagcauuuuccuggcugauuaaaagaaauuacucagcuauggucaucuguuccuguuagaaggcuaugcagcauauuauauacuaugcgcauguuaugaaaugcauaauaaaaaauuuuaaaaaaucuaaaagaucuaaaaaaaaaaaaaaaaaaaaaaaaaaaaaaaaaaaaaaaaaaaaaaaaaaaaaaaaaaaaaaaaugcaucccccccccccccccccccccccccccccccaaaggcucuuuucagagccaccagaauu

SEQ ID NO: 15365 - RNA, 1919 nt, Artificial Sequence
  mRNA product Design h-3 comprising derived and/or modified sequence from HRSV(Memphis-37)__AIY60640.1__F-del_DSCav1_mut2 (opt5)
gggagacccgugacccggaaguuguacggcuacgcgacuuucccucccacaaacccucgcgcccuuccuuuccuacuugggcccggcagaaagcuuaccauggagcugcccauccucaagaccaacgccauuacaacgauccuggcugccgugacccuuugcuucgcgagcucccagaauauuacagaagaguuuuaccaaucuaccuguagcgcugucuccaaaggcuaucugggggcccucagaacaggaugguacaccucuguuaucacaauugaacugagcaacaucaaggagaauaaaugcaacggcaccgacgccaaggugaaacuuaucaagcaggaacuggauaaguauaaaaaugcugugacggaccuccagcugcugaugcaguccaccccugccgcugggucuggaagcgccauuuguuccggcaucgcggucugcaaggugcuccaccuggagggggagguuaacaaaauuaagaaugcccuucugagcacaaacaaagcuguggucucucucuccaauggagugagcguucugaccuucaaggugcuugaucugaagaacuacaucgacaaacaacuccugccgauucugaauaagcagucuuguuccauccccaacauugaaacagucaucgaguuucagcagaaaaauaaccggcuccuggaaaucacccgcgaguucagcgugaaugccggcgugacgacaccugucucuaccuauaugcuuacaaacuccgagcugcucagccugauuaacgauaugcccaucaccaaugaccaaaagaaacuuauguccaacaauguucagauugugagacagcagucuuacagcaucaugugcauuaucaaggaagaggugcuggcuuaugucgugcaacucccucuguacggcguuaucgauacccccuguuggaaacugcauacauccccucucugcacgaccaacacaaaggaagggagcaauauuugucugacccggacagaccgcggaugguacugcgauaacgccggcucuguguccuuuuucccgcaggcggagaccuguaagguccagagcaauagaguguuuugcgacacgaugaacucucuuacacugcccagcgaaguuaaucucugcaacaucgauauuuucaauccuaaauaugacuguaagaucaugaccuccaaaaccgaugugucuagcuccgucauuacaagccugggggccaucgugucuugcuacggaaagaccaaauguacagcuuccaacaagaaucggggcaucauuaagacguuuagcaacgggugcgacuaugucucuaauaaaggaguggacaccguuuccgugggcaacacacuuuacugugucaacaagcaagagggccagagccuguaugugaaaggggagcccaucauuaauuucuacgauccucucguuuuucccuccgacgaguucgaugccucuaucagccaggugaacgaaaagauuaaucagucccuggcuuuuauccgcaaaucugacgaacugcuccacaacgucaaugugggaaagagcaccacaaacauuaugaucaccacgaucauuaucgugauuaucguuauucugcuucugcucaucgccgucggccuguuccuguauugcaaggccagaugaggacuaguggaagcauuuuccuggcugauuaaaagaaauuacucagcuauggucaucuguuccuguuagaaggcuaugcagcauauuauauacuaugcgcauguuaugaaaugcauaauaaaaaauuuuaaaaaaucuaaaagaucuaaaaaaaaaaaaaaaaaaaaaaaaaaaaaaaaaaaaaaaaaaaaaaaaaaaaaaaaaaaaaaaaugcaucccccccccccccccccccccccccccccccaaaggcucuuuucagagccaccagaauu

SEQ ID NO: 15366 - RNA, 1919 nt, Artificial Sequence
  mRNA product Design h-3 comprising derived and/or modified sequence from HRSV(Memphis-37)__AIY60640.1__F-del_DSCav1_mut2 (opt6)
gggagacccgugacccggaaguuguacggcuacgcgacuuucccucccacaaacccucgcgcccuuccuuuccuacuugggcccggcagaaagcuuaccauggaacuaccaauacucaaaacaaacgcaauaacaacaauuuuagcugcaguaacacuuuguuucgcauccucccaaaauauaacagaagaauuuuaucaaucaaccugcucagccgucuccaaaggauaucuaggugcacuacgcacuggaugguacacaagugucaucacaauagaacuuuccaacaucaaagaaaauaaauguaauggaacugacgcaaaaguaaaacucauaaaacaagaacuagacaaauacaaaaacgcaguaacagaccuacaacuauuaaugcaaucaacaccagcagcaggauccggcagugccauaugcucuggaauagcagucugcaaaguuuuacacuuagaaggcgaaguaaacaaaaucaaaaacgcccuacuaucuacaaauaaagccgucguaucucucucaaauggaguaucaguacuaacauucaaaguauuagacuuaaaaaacuacaucgauaaacaauuauugccaauauuaaacaaacaaucuugcucaauaccaaauauagaaacagucauagaauuucaacaaaaaaauaaccgauuauuagaaauaacacgagaauuuucaguaaaugccggagucaccacaccaguaucaacauacaugcuaacaaauucagaacuauuaucauuaauaaacgacaugccuauuacaaaugaucaaaaaaaacuaauguccaacaauguacaaauaguccgacaacaaagcuacucaaucauguguauaauaaaagaagaaguacuugcauacguaguacaauuaccacuauacggaguuaucgacacaccaugcuggaaacuccacacuucaccacucugcaccacaaacacaaaagaaggcucaaacauaugccuaacaagaacagaccgaggaugguacugcgacaacgcaggaucaguaucauucuucccacaagcagaaacuugcaaaguacaaucuaacagaguuuucugugacaccaugaauagccuaacacuccccuccgaaguuaaccuauguaacauagauauauuuaaucccaaauaugauugcaaaaucaugacaucuaaaaccgacguaucaucaucuguaaucacaucacuaggugccauagucucaugcuacggcaaaacaaaaugcaccgccucaaacaaaaaccgagguauaauaaaaaccuucaguaauggaugugacuacguaucaaacaaagguguugauaccguaagcgucggcaacacccuauacugcguaaauaaacaagaaggccaaucacuauacgucaaaggcgaaccaauuauuaacuucuaugacccacucgucuuucccuccgacgaauuugacgcaagcauaucacaaguaaacgaaaaaauaaaccaaucacuagcauucauacgcaaaucagaugaacuacuacauaacguaaacguaggaaaauccacuacaaauauaaugaucacaacaauaauaaucguaauuauagucauauuauuacuacuaauagcaguaggacuuuuccuauacuguaaagcaagauaaggacuaguggaagcauuuuccuggcugauuaaaagaaauuacucagcuauggucaucuguuccuguuagaaggcuaugcagcauauuauauacuaugcgcauguuaugaaaugcauaauaaaaaauuuuaaaaaaucuaaaagaucuaaaaaaaaaaaaaaaaaaaaaaaaaaaaaaaaaaaaaaaaaaaaaaaaaaaaaaaaaaaaaaaaugcaucccccccccccccccccccccccccccccccaaaggcucuuuucagagccaccagaauu

SEQ ID NO: 15367 - RNA, 1919 nt, Artificial Sequence
  mRNA product Design h-3 comprising derived and/or modified sequence from HRSV(Memphis-37)__AIY60640.1__F-del_DSCav1_mut2 (opt11)
gggagacccgugacccggaaguuguacggcuacgcgacuuucccucccacaaacccucgcgcccuuccuuuccuacuugggcccggcagaaagcuuaccauggaacuucccauccucaagaccaacgcuauuacgaccauccucgccgcagucacccucugcuucgcgucaucccaaaacaucaccgaagaauuuuaccaauccacaugcuccgcagucucaaaaggcuaccuaggagcccuacgcaccggaugguacacauccgucaucacaaucgaacucuccaacauaaaagaaaacaaaugcaacggcaccgaugccaaaguaaaacugauuaaacaagaacucgacaaauacaagaacgccgucacagaccuacagcuccucaugcaaucaacucccgccgccggcagcggauccgcuaucugcucaggcaucgccguaugcaaaguccuccaccuagaaggcgaaguaaacaaaaucaagaacgcacuacucucaacaaacaaagccgucgucucccucuccaacggcgucuccguccuuaccuucaaaguccucgaccuuaagaacuacauugacaaacaacuccuacccauccucaacaaacaauccugcucuauaccuaauauagaaaccguaaucgaauuucaacagaaaaacaaccgccuccucgaaauuacccgcgaguucucaguaaacgccggcguaaccacccccgucuccaccuacaugcucacaaauucagaacuccucagccucaucaacgacaugcccauaaccaacgaccaaaagaaacucaugucaaacaacguccaaaucgucaggcaacaaagcuacagcaucaugugcaucauuaaagaagaaguacucgccuacgucgugcaacuaccccucuacggcgucauagacacacccugcuggaaacuucacacaucaccgcucugcaccacaaacaccaaagaaggcaguaacauaugccucacccgaaccgaccgcggaugguacugcgacaacgccggauccgucagcuucuucccacaagccgaaaccugcaaaguacaauccaaccgagucuucugcgacaccaugaacucucuuacgcuccccucagaagucaaccuaugcaacaucgacaucuucaaccccaaauacgacugcaaaaucaugaccuccaaaacagacgucuccuccucagugauaaccucccucggcgccauugucuccugcuacggcaaaaccaaaugcaccgccuccaacaaaaaccgugggaucaucaaaaccuucucaaacggcugcgacuacguauccaauaagggugucgacacagucuccguaggcaauacccucuauugcgucaacaaacaagaaggccaaucccucuacgucaaaggcgaaccuaucaucaacuucuacgacccgcuagucuuccccucagacgaguucgacgcauccaucucacaagucaacgaaaagaucaaccagucccucgcauucauccgaaaauccgacgaacuucuccacaacguuaacgucggcaaauccaccacuaacauaaugaucaccacgaucaucauaguaauuaucgucauacuccuccuccuaaucgcugucggacucuuccucuacugcaaggcccgcuaaggacuaguggaagcauuuuccuggcugauuaaaagaaauuacucagcuauggucaucuguuccuguuagaaggcuaugcagcauauuauauacuaugcgcauguuaugaaaugcauaauaaaaaauuuuaaaaaaucuaaaagaucuaaaaaaaaaaaaaaaaaaaaaaaaaaaaaaaaaaaaaaaaaaaaaaaaaaaaaaaaaaaaaaaaugcaucccccccccccccccccccccccccccccccaaaggcucuuuucagagccaccagaauu

SEQ ID NO: 15368 - RNA, 1982 nt, Artificial Sequence
  mRNA product Design h-4 comprising derived and/or modified sequence from HRSV(Memphis-37)__AIY60640.1__F-del_DSCav1_mut2 (opt1)
gggagagggcgcuuggcuugcaaggacccugagcugcggcauugaagcacacccaacccaacucgacugaagucagccucacugaaccggaucugagaaucuucucucucugggcuugccagggcucuccgaaccuagcuagcauccucuucaauuccaacuagaaagcuuaccauggagcugcccauccucaagaccaacgccaucaccacgauccuggccgcggugacccugugcuucgccagcucccagaacaucaccgaggaguucuaccagagcacgugcuccgccgucagcaagggcuaccucggcgcccugcgcaccgggugguacaccagcgugaucaccaucgagcuguccaacaucaaggagaacaagugcaacggcaccgacgccaaggugaagcucaucaagcaggagcuggacaaguacaagaacgcggucacggaccugcagcuccugaugcagagcaccccggccgccggcuccgggagcgcgaucugcuccggcaucgccgucugcaaggugcugcaccucgagggcgaggugaacaagaucaagaacgcccugcuguccaccaacaaggccgucgugagccucuccaacggggugagcguccugaccuucaaggugcuggaccucaagaacuacaucgacaagcagcugcugcccauccugaacaagcagagcugcuccauccccaacaucgagaccgucaucgaguuccagcagaagaacaaccgccuccuggagaucacgcgggaguucagcgugaacgcgggcgugaccacccccgucuccaccuacaugcugacgaacagcgagcuccugucccugaucaacgacaugccgaucaccaacgaccagaagaagcucaugagcaacaacgugcagaucgugcgccagcaguccuacagcaucaugugcaucaucaaggaggagguccuggccuacguggugcagcugccccucuacggggucaucgacacccccugcuggaagcugcacaccagcccccugugcacgaccaacaccaaggagggcuccaacaucugccucacccggacggaccgcgggugguacugcgacaacgccggcagcguguccuucuucccgcaggccgagaccugcaagguccagagcaaccggguguucugcgacaccaugaacucccugacccugcccagcgaggugaaccucugcaacaucgacaucuucaaccccaaguacgacugcaagaucaugacguccaagaccgacgucagcuccagcgugaucaccucccugggcgccaucgugagcugcuacgggaagaccaagugcacggcgagcaacaagaaccgcggcaucaucaagaccuucuccaacgggugcgacuacgucagcaacaagggcguggacaccguguccgucggcaacacccuguacugcgugaacaagcaggagggccagagccucuacgugaagggggagcccaucaucaacuucuacgacccgcuggucuuccccuccgacgaguucgacgccagcaucucccaggugaacgagaagaucaaccagagccuggccuucauccggaaguccgacgagcuccugcacaacgugaacgucggcaagagcaccacgaacaucaugaucaccaccaucaucaucgugaucaucgugauccugcugcuccugaucgccgucgggcuguuccucuacugcaaggcccgcugaggacuaguaauaaggaaacuguaugaaugucugugggcaggaagugaagagauccuucuguaaagguuuuuggaauuaugucugcugaauaauaaacuuuuuugaaauaauaaaucugguagaaaaaugagaucuaaaaaaaaaaaaaaaaaaaaaaaaaaaaaaaaaaaaaaaaaaaaaaaaaaaaaaaaaaaaaaaaugcaucccccccccccccccccccccccccccccccaaaggcucuuuucagagccaccagaauu

SEQ ID NO: 15369 - RNA, 1982 nt, Artificial Sequence
  mRNA product Design h-4 comprising derived and/or modified sequence from HRSV(Memphis-37)__AIY60640.1__F-del_DSCav1_mut2 (opt1)
gggagagggcgcuuggcuugcaaggacccugagcugcggcauugaagcacacccaacccaacucgacugaagucagccucacugaaccggaucugagaaucuucucucucugggcuugccagggcucuccgaaccuagcuagcauccucuucaauuccaacuagaaagcuuaccauggagcugcccauccucaagaccaacgccaucaccacgauccuggccgcggugacccugugcuucgccagcucccagaacaucaccgaggaguucuaccagagcacgugcuccgccgucagcaagggcuaccucggggcccugcgcaccggcugguacaccuccgugaucaccaucgagcugagcaacaucaaggagaacaagugcaacgggaccgacgccaaggugaagcucaucaagcaggagcuggacaaguacaagaacgcggucacggaccugcagcuccugaugcaguccaccccggccgccggcagcggguccgccaucugcagcggcaucgcggugugcaaggugcugcaccucgagggcgaggucaacaagaucaagaacgcccugcuguccaccaacaaggccguggugagccucuccaacggggucagcgugcugaccuucaaggugcuggaccucaagaacuacaucgacaagcagcugcugcccauccucaacaagcaguccugcagcauccccaacaucgagacggucaucgaguuccagcagaagaacaaccggcugcuggagaucacccgcgaguucuccgugaacgccggcgugaccacccccgucagcacguacaugcucaccaacuccgagcugcugagccucaucaacgacaugccgaucaccaacgaccagaagaagcugaugagcaacaacgugcagaucgugcggcagcaguccuacagcaucaugugcaucaucaaggaggagguccuggccuacguggugcagcucccccuguacggggucaucgacacccccugcuggaagcugcacacgagcccccucugcaccaccaacaccaaggagggcuccaacaucugccugacgcgcaccgaccgggggugguacugcgacaacgcgggcuccgugagcuucuucccgcaggccgagaccugcaaggugcaguccaaccgcgucuucugcgacaccaugaacagccugacgcuccccuccgaggugaaccugugcaacaucgacaucuucaaccccaaguacgacugcaagaucaugaccagcaagaccgacgucuccagcuccgugaucaccagccugggcgccaucguguccugcuacgggaagacgaagugcaccgccagcaacaagaaccggggcaucaucaagaccuucuccaacgggugcgacuacgucagcaacaagggcguggacaccguguccgucggcaacacgcucuacugcgugaacaagcaggaggggcagagccuguacgugaagggcgagcccaucaucaacuucuacgacccgcuggucuuccccagcgacgaguucgacgccuccaucagccaggugaacgagaagaucaaccagucccucgcguucauccgcaagagcgacgagcugcugcacaacgugaacgucgggaaguccaccaccaacaucaugaucaccaccaucaucaucgugaucaucgugauccuccugcugcucaucgccgucggccuguuccuguacugcaaggcccggugaggacuaguaauaaggaaacuguaugaaugucugugggcaggaagugaagagauccuucuguaaagguuuuuggaauuaugucugcugaauaauaaacuuuuuugaaauaauaaaucugguagaaaaaugagaucuaaaaaaaaaaaaaaaaaaaaaaaaaaaaaaaaaaaaaaaaaaaaaaaaaaaaaaaaaaaaaaaaugcaucccccccccccccccccccccccccccccccaaaggcucuuuucagagccaccagaauu

SEQ ID NO: 15370 - RNA, 1982 nt, Artificial Sequence
  mRNA product Design h-4 comprising derived and/or modified sequence from HRSV(Memphis-37)__AIY60640.1__F-del_DSCav1_mut2 (opt2)
gggagagggcgcuuggcuugcaaggacccugagcugcggcauugaagcacacccaacccaacucgacugaagucagccucacugaaccggaucugagaaucuucucucucugggcuugccagggcucuccgaaccuagcuagcauccucuucaauuccaacuagaaagcuuaccauggagcuccccauccucaagaccaacgccaucaccaccauccucgccgccgucacccucugcuucgccuccucccagaacaucaccgaggaguucuaccaguccaccugcuccgccgucuccaagggcuaccucggcgcccuccgcaccggcugguacaccuccgucaucaccaucgagcucuccaacaucaaggagaacaagugcaacggcaccgacgccaaggucaagcucaucaagcaggagcucgacaaguacaagaacgccgucaccgaccuccagcuccucaugcaguccacccccgccgccggcuccggcuccgccaucugcuccggcaucgccgucugcaagguccuccaccucgagggcgaggucaacaagaucaagaacgcccuccucuccaccaacaaggccgucgucucccucuccaacggcgucuccguccucaccuucaagguccucgaccucaagaacuacaucgacaagcagcuccuccccauccucaacaagcaguccugcuccauccccaacaucgagaccgucaucgaguuccagcagaagaacaaccgccuccucgagaucacccgcgaguucuccgucaacgccggcgucaccacccccgucuccaccuacaugcucaccaacuccgagcuccucucccucaucaacgacaugcccaucaccaacgaccagaagaagcucauguccaacaacguccagaucguccgccagcaguccuacuccaucaugugcaucaucaaggaggagguccucgccuacgucguccagcucccccucuacggcgucaucgacacccccugcuggaagcuccacaccuccccccucugcaccaccaacaccaaggagggcuccaacaucugccucacccgcaccgaccgcggcugguacugcgacaacgccggcuccgucuccuucuucccccaggccgagaccugcaagguccaguccaaccgcgucuucugcgacaccaugaacucccucacccuccccuccgaggucaaccucugcaacaucgacaucuucaaccccaaguacgacugcaagaucaugaccuccaagaccgacgucuccuccuccgucaucaccucccucggcgccaucgucuccugcuacggcaagaccaagugcaccgccuccaacaagaaccgcggcaucaucaagaccuucuccaacggcugcgacuacgucuccaacaagggcgucgacaccgucuccgucggcaacacccucuacugcgucaacaagcaggagggccagucccucuacgucaagggcgagcccaucaucaacuucuacgacccccucgucuuccccuccgacgaguucgacgccuccaucucccaggucaacgagaagaucaaccagucccucgccuucauccgcaaguccgacgagcuccuccacaacgucaacgucggcaaguccaccaccaacaucaugaucaccaccaucaucaucgucaucaucgucauccuccuccuccucaucgccgucggccucuuccucuacugcaaggcccgcugaggacuaguaauaaggaaacuguaugaaugucugugggcaggaagugaagagauccuucuguaaagguuuuuggaauuaugucugcugaauaauaaacuuuuuugaaauaauaaaucugguagaaaaaugagaucuaaaaaaaaaaaaaaaaaaaaaaaaaaaaaaaaaaaaaaaaaaaaaaaaaaaaaaaaaaaaaaaaugcaucccccccccccccccccccccccccccccccaaaggcucuuuucagagccaccagaauu

SEQ ID NO: 15371 - RNA, 1982 nt, Artificial Sequence
  mRNA product Design h-4 comprising derived and/or modified sequence from HRSV(Memphis-37)__AIY60640.1__F-del_DSCav1_mut2 (opt3)
gggagagggcgcuuggcuugcaaggacccugagcugcggcauugaagcacacccaacccaacucgacugaagucagccucacugaaccggaucugagaaucuucucucucugggcuugccagggcucuccgaaccuagcuagcauccucuucaauuccaacuagaaagcuuaccauggagcugcccauccucaagaccaacgccauuacaacuauacuugcugcagugacgcugugcuucgccagcucccagaauaucaccgaagaguuuuaccaaucuacauguucagcggucaguaaaggcuauuugggggcuuuaagaacuggaugguacaccagcguuauuacaaucgaacuguccaacauuaaggagaauaaaugcaacgguaccgacgccaaggugaaacuaaucaagcaggaacucgauaaguauaaaaaugcaguaacugaccugcagcuucugaugcagucuacuccugccgcuggcucggggucagcaauauguagcggaaucgccgugugcaaggucuugcaccucgagggcgaggugaacaaaauuaagaaugcucugcugaguaccaacaaagccguugugucccucucuaauggugucagcguguuaacguucaagguacuggaucuuaagaacuacaucgacaaacaauugcugccaauucuaaauaagcaguccuguucaaucccgaacauagaaacuguuauugaguuucagcagaaaaauaacaggcuccuggaaaucacccgggaguucagugugaaugcgggggucacaacucccgugagcaccuauaugcuuacaaacucugagcuguugucccucauuaacgauaugccuaucaccaaugaccaaaagaaacugaugucaaacaaugugcagaucguccgccagcagagcuacaguauuaugugcauaaucaaggaagagguuuuagcauaugugguacaacugccacucuacggagugauugauacgcccuguuggaaacuucauacuucuccucugugcacaaccaacacuaaggaaggcuccaauaucuguuugacacgaaccgaccguggcugguacugcgauaacgccgggagcgucucguuuuucccacaggcugagacguguaaggugcagucuaauagaguuuucugcgacaccaugaacucccuaacacugcccucagaagugaaucucugcaacauagauauuuucaauccuaaauaugacuguaagaucaugacaaguaaaaccgaugucagcuccucugugaucacaagccugggagccauuguaucaugcuacgguaagacuaaauguaccgcaaguaacaagaauaggggcaucauuaagacauuuuccaacgggugcgacuauguuagcaauaaaggaguggacaccgucucugugggcaacacucuuuacugugucaacaagcaagagggucagucacuguaugugaaaggggagccaauaaucaauuucuacgauccguugguuuuucccagugacgaauuugaugcuagcauuucccaggugaacgagaagaucaaucagucucucgccuuuauccggaaaucggacgaacuguuacacaacguaaaugucggaaagagcacgacaaacauuaugauaaccacuaucauuaucgugauuaucguuauacugcuacuccugaucgcggugggccuuuucuuguauugcaaggcccgcugaggacuaguaauaaggaaacuguaugaaugucugugggcaggaagugaagagauccuucuguaaagguuuuuggaauuaugucugcugaauaauaaacuuuuuugaaauaauaaaucugguagaaaaaugagaucuaaaaaaaaaaaaaaaaaaaaaaaaaaaaaaaaaaaaaaaaaaaaaaaaaaaaaaaaaaaaaaaaugcaucccccccccccccccccccccccccccccccaaaggcucuuuucagagccaccagaauu

SEQ ID NO: 15372 - RNA, 1982 nt, Artificial Sequence
  mRNA product Design h-4 comprising derived and/or modified sequence from HRSV(Memphis-37)__AIY60640.1__F-del_DSCav1_mut2 (opt4)
gggagagggcgcuuggcuugcaaggacccugagcugcggcauugaagcacacccaacccaacucgacugaagucagccucacugaaccggaucugagaaucuucucucucugggcuugccagggcucuccgaaccuagcuagcauccucuucaauuccaacuagaaagcuuaccauggagcugcccauccugaagaccaacgccaucaccaccauccuggccgccgugacccugugcuucgccagcagccagaacaucaccgaggaguucuaccagagcaccugcagcgccgugagcaagggcuaccugggcgcccugagaaccggcugguacaccagcgugaucaccaucgagcugagcaacaucaaggagaacaagugcaacggcaccgacgccaaggugaagcugaucaagcaggagcuggacaaguacaagaacgccgugaccgaccugcagcugcugaugcagagcacccccgccgccggcagcggcagcgccaucugcagcggcaucgccgugugcaaggugcugcaccuggagggcgaggugaacaagaucaagaacgcccugcugagcaccaacaaggccguggugagccugagcaacggcgugagcgugcugaccuucaaggugcuggaccugaagaacuacaucgacaagcagcugcugcccauccugaacaagcagagcugcagcauccccaacaucgagaccgugaucgaguuccagcagaagaacaacagacugcuggagaucaccagagaguucagcgugaacgccggcgugaccacccccgugagcaccuacaugcugaccaacagcgagcugcugagccugaucaacgacaugcccaucaccaacgaccagaagaagcugaugagcaacaacgugcagaucgugagacagcagagcuacagcaucaugugcaucaucaaggaggaggugcuggccuacguggugcagcugccccuguacggcgugaucgacacccccugcuggaagcugcacaccagcccccugugcaccaccaacaccaaggagggcagcaacaucugccugaccagaaccgacagaggcugguacugcgacaacgccggcagcgugagcuucuucccccaggccgagaccugcaaggugcagagcaacagaguguucugcgacaccaugaacagccugacccugcccagcgaggugaaccugugcaacaucgacaucuucaaccccaaguacgacugcaagaucaugaccagcaagaccgacgugagcagcagcgugaucaccagccugggcgccaucgugagcugcuacggcaagaccaagugcaccgccagcaacaagaacagaggcaucaucaagaccuucagcaacggcugcgacuacgugagcaacaagggcguggacaccgugagcgugggcaacacccuguacugcgugaacaagcaggagggccagagccuguacgugaagggcgagcccaucaucaacuucuacgacccccugguguuccccagcgacgaguucgacgccagcaucagccaggugaacgagaagaucaaccagagccuggccuucaucagaaagagcgacgagcugcugcacaacgugaacgugggcaagagcaccaccaacaucaugaucaccaccaucaucaucgugaucaucgugauccugcugcugcugaucgccgugggccuguuccuguacugcaaggccagaugaggacuaguaauaaggaaacuguaugaaugucugugggcaggaagugaagagauccuucuguaaagguuuuuggaauuaugucugcugaauaauaaacuuuuuugaaauaauaaaucugguagaaaaaugagaucuaaaaaaaaaaaaaaaaaaaaaaaaaaaaaaaaaaaaaaaaaaaaaaaaaaaaaaaaaaaaaaaaugcaucccccccccccccccccccccccccccccccaaaggcucuuuucagagccaccagaauu

SEQ ID NO: 15373 - RNA, 1982 nt, Artificial Sequence
  mRNA product Design h-4 comprising derived and/or modified sequence from HRSV(Memphis-37)__AIY60640.1__F-del_DSCav1_mut2 (opt5)
gggagagggcgcuuggcuugcaaggacccugagcugcggcauugaagcacacccaacccaacucgacugaagucagccucacugaaccggaucugagaaucuucucucucugggcuugccagggcucuccgaaccuagcuagcauccucuucaauuccaacuagaaagcuuaccauggagcugcccauccucaagaccaacgccauuacaacgauccuggcugccgugacccuuugcuucgcgagcucccagaauauuacagaagaguuuuaccaaucuaccuguagcgcugucuccaaaggcuaucugggggcccucagaacaggaugguacaccucuguuaucacaauugaacugagcaacaucaaggagaauaaaugcaacggcaccgacgccaaggugaaacuuaucaagcaggaacuggauaaguauaaaaaugcugugacggaccuccagcugcugaugcaguccaccccugccgcugggucuggaagcgccauuuguuccggcaucgcggucugcaaggugcuccaccuggagggggagguuaacaaaauuaagaaugcccuucugagcacaaacaaagcuguggucucucucuccaauggagugagcguucugaccuucaaggugcuugaucugaagaacuacaucgacaaacaacuccugccgauucugaauaagcagucuuguuccauccccaacauugaaacagucaucgaguuucagcagaaaaauaaccggcuccuggaaaucacccgcgaguucagcgugaaugccggcgugacgacaccugucucuaccuauaugcuuacaaacuccgagcugcucagccugauuaacgauaugcccaucaccaaugaccaaaagaaacuuauguccaacaauguucagauugugagacagcagucuuacagcaucaugugcauuaucaaggaagaggugcuggcuuaugucgugcaacucccucuguacggcguuaucgauacccccuguuggaaacugcauacauccccucucugcacgaccaacacaaaggaagggagcaauauuugucugacccggacagaccgcggaugguacugcgauaacgccggcucuguguccuuuuucccgcaggcggagaccuguaagguccagagcaauagaguguuuugcgacacgaugaacucucuuacacugcccagcgaaguuaaucucugcaacaucgauauuuucaauccuaaauaugacuguaagaucaugaccuccaaaaccgaugugucuagcuccgucauuacaagccugggggccaucgugucuugcuacggaaagaccaaauguacagcuuccaacaagaaucggggcaucauuaagacguuuagcaacgggugcgacuaugucucuaauaaaggaguggacaccguuuccgugggcaacacacuuuacugugucaacaagcaagagggccagagccuguaugugaaaggggagcccaucauuaauuucuacgauccucucguuuuucccuccgacgaguucgaugccucuaucagccaggugaacgaaaagauuaaucagucccuggcuuuuauccgcaaaucugacgaacugcuccacaacgucaaugugggaaagagcaccacaaacauuaugaucaccacgaucauuaucgugauuaucguuauucugcuucugcucaucgccgucggccuguuccuguauugcaaggccagaugaggacuaguaauaaggaaacuguaugaaugucugugggcaggaagugaagagauccuucuguaaagguuuuuggaauuaugucugcugaauaauaaacuuuuuugaaauaauaaaucugguagaaaaaugagaucuaaaaaaaaaaaaaaaaaaaaaaaaaaaaaaaaaaaaaaaaaaaaaaaaaaaaaaaaaaaaaaaaugcaucccccccccccccccccccccccccccccccaaaggcucuuuucagagccaccagaauu

SEQ ID NO: 15374 - RNA, 1982 nt, Artificial Sequence
  mRNA product Design h-4 comprising derived and/or modified sequence from HRSV(Memphis-37)__AIY60640.1__F-del_DSCav1_mut2 (opt6)
gggagagggcgcuuggcuugcaaggacccugagcugcggcauugaagcacacccaacccaacucgacugaagucagccucacugaaccggaucugagaaucuucucucucugggcuugccagggcucuccgaaccuagcuagcauccucuucaauuccaacuagaaagcuuaccauggaacuaccaauacucaaaacaaacgcaauaacaacaauuuuagcugcaguaacacuuuguuucgcauccucccaaaauauaacagaagaauuuuaucaaucaaccugcucagccgucuccaaaggauaucuaggugcacuacgcacuggaugguacacaagugucaucacaauagaacuuuccaacaucaaagaaaauaaauguaauggaacugacgcaaaaguaaaacucauaaaacaagaacuagacaaauacaaaaacgcaguaacagaccuacaacuauuaaugcaaucaacaccagcagcaggauccggcagugccauaugcucuggaauagcagucugcaaaguuuuacacuuagaaggcgaaguaaacaaaaucaaaaacgcccuacuaucuacaaauaaagccgucguaucucucucaaauggaguaucaguacuaacauucaaaguauuagacuuaaaaaacuacaucgauaaacaauuauugccaauauuaaacaaacaaucuugcucaauaccaaauauagaaacagucauagaauuucaacaaaaaaauaaccgauuauuagaaauaacacgagaauuuucaguaaaugccggagucaccacaccaguaucaacauacaugcuaacaaauucagaacuauuaucauuaauaaacgacaugccuauuacaaaugaucaaaaaaaacuaauguccaacaauguacaaauaguccgacaacaaagcuacucaaucauguguauaauaaaagaagaaguacuugcauacguaguacaauuaccacuauacggaguuaucgacacaccaugcuggaaacuccacacuucaccacucugcaccacaaacacaaaagaaggcucaaacauaugccuaacaagaacagaccgaggaugguacugcgacaacgcaggaucaguaucauucuucccacaagcagaaacuugcaaaguacaaucuaacagaguuuucugugacaccaugaauagccuaacacuccccuccgaaguuaaccuauguaacauagauauauuuaaucccaaauaugauugcaaaaucaugacaucuaaaaccgacguaucaucaucuguaaucacaucacuaggugccauagucucaugcuacggcaaaacaaaaugcaccgccucaaacaaaaaccgagguauaauaaaaaccuucaguaauggaugugacuacguaucaaacaaagguguugauaccguaagcgucggcaacacccuauacugcguaaauaaacaagaaggccaaucacuauacgucaaaggcgaaccaauuauuaacuucuaugacccacucgucuuucccuccgacgaauuugacgcaagcauaucacaaguaaacgaaaaaauaaaccaaucacuagcauucauacgcaaaucagaugaacuacuacauaacguaaacguaggaaaauccacuacaaauauaaugaucacaacaauaauaaucguaauuauagucauauuauuacuacuaauagcaguaggacuuuuccuauacuguaaagcaagauaaggacuaguaauaaggaaacuguaugaaugucugugggcaggaagugaagagauccuucuguaaagguuuuuggaauuaugucugcugaauaauaaacuuuuuugaaauaauaaaucugguagaaaaaugagaucuaaaaaaaaaaaaaaaaaaaaaaaaaaaaaaaaaaaaaaaaaaaaaaaaaaaaaaaaaaaaaaaaugcaucccccccccccccccccccccccccccccccaaaggcucuuuucagagccaccagaauu

SEQ ID NO: 15375 - RNA, 1982 nt, Artificial Sequence
  mRNA product Design h-4 comprising derived and/or modified sequence from HRSV(Memphis-37)__AIY60640.1__F-del_DSCav1_mut2 (opt11)
gggagagggcgcuuggcuugcaaggacccugagcugcggcauugaagcacacccaacccaacucgacugaagucagccucacugaaccggaucugagaaucuucucucucugggcuugccagggcucuccgaaccuagcuagcauccucuucaauuccaacuagaaagcuuaccauggaacuucccauccucaagaccaacgcuauuacgaccauccucgccgcagucacccucugcuucgcgucaucccaaaacaucaccgaagaauuuuaccaauccacaugcuccgcagucucaaaaggcuaccuaggagcccuacgcaccggaugguacacauccgucaucacaaucgaacucuccaacauaaaagaaaacaaaugcaacggcaccgaugccaaaguaaaacugauuaaacaagaacucgacaaauacaagaacgccgucacagaccuacagcuccucaugcaaucaacucccgccgccggcagcggauccgcuaucugcucaggcaucgccguaugcaaaguccuccaccuagaaggcgaaguaaacaaaaucaagaacgcacuacucucaacaaacaaagccgucgucucccucuccaacggcgucuccguccuuaccuucaaaguccucgaccuuaagaacuacauugacaaacaacuccuacccauccucaacaaacaauccugcucuauaccuaauauagaaaccguaaucgaauuucaacagaaaaacaaccgccuccucgaaauuacccgcgaguucucaguaaacgccggcguaaccacccccgucuccaccuacaugcucacaaauucagaacuccucagccucaucaacgacaugcccauaaccaacgaccaaaagaaacucaugucaaacaacguccaaaucgucaggcaacaaagcuacagcaucaugugcaucauuaaagaagaaguacucgccuacgucgugcaacuaccccucuacggcgucauagacacacccugcuggaaacuucacacaucaccgcucugcaccacaaacaccaaagaaggcaguaacauaugccucacccgaaccgaccgcggaugguacugcgacaacgccggauccgucagcuucuucccacaagccgaaaccugcaaaguacaauccaaccgagucuucugcgacaccaugaacucucuuacgcuccccucagaagucaaccuaugcaacaucgacaucuucaaccccaaauacgacugcaaaaucaugaccuccaaaacagacgucuccuccucagugauaaccucccucggcgccauugucuccugcuacggcaaaaccaaaugcaccgccuccaacaaaaaccgugggaucaucaaaaccuucucaaacggcugcgacuacguauccaauaagggugucgacacagucuccguaggcaauacccucuauugcgucaacaaacaagaaggccaaucccucuacgucaaaggcgaaccuaucaucaacuucuacgacccgcuagucuuccccucagacgaguucgacgcauccaucucacaagucaacgaaaagaucaaccagucccucgcauucauccgaaaauccgacgaacuucuccacaacguuaacgucggcaaauccaccacuaacauaaugaucaccacgaucaucauaguaauuaucgucauacuccuccuccuaaucgcugucggacucuuccucuacugcaaggcccgcuaaggacuaguaauaaggaaacuguaugaaugucugugggcaggaagugaagagauccuucuguaaagguuuuuggaauuaugucugcugaauaauaaacuuuuuugaaauaauaaaucugguagaaaaaugagaucuaaaaaaaaaaaaaaaaaaaaaaaaaaaaaaaaaaaaaaaaaaaaaaaaaaaaaaaaaaaaaaaaugcaucccccccccccccccccccccccccccccccaaaggcucuuuucagagccaccagaauu

SEQ ID NO: 15376 - RNA, 1998 nt, Artificial Sequence
  mRNA product Design h-5 comprising derived and/or modified sequence from HRSV(Memphis-37)__AIY60640.1__F-del_DSCav1_mut2 (opt1)
gggagagggcgcuuggcuugcaaggacccugagcugcggcauugaagcacacccaacccaacucgacugaagucagccucacugaaccggaucugagaaucuucucucucugggcuugccagggcucuccgaaccuagcuagcauccucuucaauuccaacuagaaagcuuaccauggagcugcccauccucaagaccaacgccaucaccacgauccuggccgcggugacccugugcuucgccagcucccagaacaucaccgaggaguucuaccagagcacgugcuccgccgucagcaagggcuaccucggcgcccugcgcaccgggugguacaccagcgugaucaccaucgagcuguccaacaucaaggagaacaagugcaacggcaccgacgccaaggugaagcucaucaagcaggagcuggacaaguacaagaacgcggucacggaccugcagcuccugaugcagagcaccccggccgccggcuccgggagcgcgaucugcuccggcaucgccgucugcaaggugcugcaccucgagggcgaggugaacaagaucaagaacgcccugcuguccaccaacaaggccgucgugagccucuccaacggggugagcguccugaccuucaaggugcuggaccucaagaacuacaucgacaagcagcugcugcccauccugaacaagcagagcugcuccauccccaacaucgagaccgucaucgaguuccagcagaagaacaaccgccuccuggagaucacgcgggaguucagcgugaacgcgggcgugaccacccccgucuccaccuacaugcugacgaacagcgagcuccugucccugaucaacgacaugccgaucaccaacgaccagaagaagcucaugagcaacaacgugcagaucgugcgccagcaguccuacagcaucaugugcaucaucaaggaggagguccuggccuacguggugcagcugccccucuacggggucaucgacacccccugcuggaagcugcacaccagcccccugugcacgaccaacaccaaggagggcuccaacaucugccucacccggacggaccgcgggugguacugcgacaacgccggcagcguguccuucuucccgcaggccgagaccugcaagguccagagcaaccggguguucugcgacaccaugaacucccugacccugcccagcgaggugaaccucugcaacaucgacaucuucaaccccaaguacgacugcaagaucaugacguccaagaccgacgucagcuccagcgugaucaccucccugggcgccaucgugagcugcuacgggaagaccaagugcacggcgagcaacaagaaccgcggcaucaucaagaccuucuccaacgggugcgacuacgucagcaacaagggcguggacaccguguccgucggcaacacccuguacugcgugaacaagcaggagggccagagccucuacgugaagggggagcccaucaucaacuucuacgacccgcuggucuuccccuccgacgaguucgacgccagcaucucccaggugaacgagaagaucaaccagagccuggccuucauccggaaguccgacgagcuccugcacaacgugaacgucggcaagagcaccacgaacaucaugaucaccaccaucaucaucgugaucaucgugauccugcugcuccugaucgccgucgggcuguuccucuacugcaaggcccgcugaggacuaguacuggcugcaucucccuuuccucuguccuccauccuucucccaggauggugaagggggaccugguacccagugauccccaccccaggauccuaaaucaugacuuaccugcuaauaaaaacucauuggaaaagugagaagaucuaaaaaaaaaaaaaaaaaaaaaaaaaaaaaaaaaaaaaaaaaaaaaaaaaaaaaaaaaaaaaaaaugcaucccccccccccccccccccccccccccccccaaaggcucuuuucagagccaccagaauu

SEQ ID NO: 15377 - RNA, 1998 nt, Artificial Sequence
  mRNA product Design h-5 comprising derived and/or modified sequence from HRSV(Memphis-37)__AIY60640.1__F-del_DSCav1_mut2 (opt1)
gggagagggcgcuuggcuugcaaggacccugagcugcggcauugaagcacacccaacccaacucgacugaagucagccucacugaaccggaucugagaaucuucucucucugggcuugccagggcucuccgaaccuagcuagcauccucuucaauuccaacuagaaagcuuaccauggagcugcccauccucaagaccaacgccaucaccacgauccuggccgcggugacccugugcuucgccagcucccagaacaucaccgaggaguucuaccagagcacgugcuccgccgucagcaagggcuaccucggggcccugcgcaccggcugguacaccuccgugaucaccaucgagcugagcaacaucaaggagaacaagugcaacgggaccgacgccaaggugaagcucaucaagcaggagcuggacaaguacaagaacgcggucacggaccugcagcuccugaugcaguccaccccggccgccggcagcggguccgccaucugcagcggcaucgcggugugcaaggugcugcaccucgagggcgaggucaacaagaucaagaacgcccugcuguccaccaacaaggccguggugagccucuccaacggggucagcgugcugaccuucaaggugcuggaccucaagaacuacaucgacaagcagcugcugcccauccucaacaagcaguccugcagcauccccaacaucgagacggucaucgaguuccagcagaagaacaaccggcugcuggagaucacccgcgaguucuccgugaacgccggcgugaccacccccgucagcacguacaugcucaccaacuccgagcugcugagccucaucaacgacaugccgaucaccaacgaccagaagaagcugaugagcaacaacgugcagaucgugcggcagcaguccuacagcaucaugugcaucaucaaggaggagguccuggccuacguggugcagcucccccuguacggggucaucgacacccccugcuggaagcugcacacgagcccccucugcaccaccaacaccaaggagggcuccaacaucugccugacgcgcaccgaccgggggugguacugcgacaacgcgggcuccgugagcuucuucccgcaggccgagaccugcaaggugcaguccaaccgcgucuucugcgacaccaugaacagccugacgcuccccuccgaggugaaccugugcaacaucgacaucuucaaccccaaguacgacugcaagaucaugaccagcaagaccgacgucuccagcuccgugaucaccagccugggcgccaucguguccugcuacgggaagacgaagugcaccgccagcaacaagaaccggggcaucaucaagaccuucuccaacgggugcgacuacgucagcaacaagggcguggacaccguguccgucggcaacacgcucuacugcgugaacaagcaggaggggcagagccuguacgugaagggcgagcccaucaucaacuucuacgacccgcuggucuuccccagcgacgaguucgacgccuccaucagccaggugaacgagaagaucaaccagucccucgcguucauccgcaagagcgacgagcugcugcacaacgugaacgucgggaaguccaccaccaacaucaugaucaccaccaucaucaucgugaucaucgugauccuccugcugcucaucgccgucggccuguuccuguacugcaaggcccggugaggacuaguacuggcugcaucucccuuuccucuguccuccauccuucucccaggauggugaagggggaccugguacccagugauccccaccccaggauccuaaaucaugacuuaccugcuaauaaaaacucauuggaaaagugagaagaucuaaaaaaaaaaaaaaaaaaaaaaaaaaaaaaaaaaaaaaaaaaaaaaaaaaaaaaaaaaaaaaaaugcaucccccccccccccccccccccccccccccccaaaggcucuuuucagagccaccagaauu

SEQ ID NO: 15378 - RNA, 1998 nt, Artificial Sequence
  mRNA product Design h-5 comprising derived and/or modified sequence from HRSV(Memphis-37)__AIY60640.1__F-del_DSCav1_mut2 (opt2)
gggagagggcgcuuggcuugcaaggacccugagcugcggcauugaagcacacccaacccaacucgacugaagucagccucacugaaccggaucugagaaucuucucucucugggcuugccagggcucuccgaaccuagcuagcauccucuucaauuccaacuagaaagcuuaccauggagcuccccauccucaagaccaacgccaucaccaccauccucgccgccgucacccucugcuucgccuccucccagaacaucaccgaggaguucuaccaguccaccugcuccgccgucuccaagggcuaccucggcgcccuccgcaccggcugguacaccuccgucaucaccaucgagcucuccaacaucaaggagaacaagugcaacggcaccgacgccaaggucaagcucaucaagcaggagcucgacaaguacaagaacgccgucaccgaccuccagcuccucaugcaguccacccccgccgccggcuccggcuccgccaucugcuccggcaucgccgucugcaagguccuccaccucgagggcgaggucaacaagaucaagaacgcccuccucuccaccaacaaggccgucgucucccucuccaacggcgucuccguccucaccuucaagguccucgaccucaagaacuacaucgacaagcagcuccuccccauccucaacaagcaguccugcuccauccccaacaucgagaccgucaucgaguuccagcagaagaacaaccgccuccucgagaucacccgcgaguucuccgucaacgccggcgucaccacccccgucuccaccuacaugcucaccaacuccgagcuccucucccucaucaacgacaugcccaucaccaacgaccagaagaagcucauguccaacaacguccagaucguccgccagcaguccuacuccaucaugugcaucaucaaggaggagguccucgccuacgucguccagcucccccucuacggcgucaucgacacccccugcuggaagcuccacaccuccccccucugcaccaccaacaccaaggagggcuccaacaucugccucacccgcaccgaccgcggcugguacugcgacaacgccggcuccgucuccuucuucccccaggccgagaccugcaagguccaguccaaccgcgucuucugcgacaccaugaacucccucacccuccccuccgaggucaaccucugcaacaucgacaucuucaaccccaaguacgacugcaagaucaugaccuccaagaccgacgucuccuccuccgucaucaccucccucggcgccaucgucuccugcuacggcaagaccaagugcaccgccuccaacaagaaccgcggcaucaucaagaccuucuccaacggcugcgacuacgucuccaacaagggcgucgacaccgucuccgucggcaacacccucuacugcgucaacaagcaggagggccagucccucuacgucaagggcgagcccaucaucaacuucuacgacccccucgucuuccccuccgacgaguucgacgccuccaucucccaggucaacgagaagaucaaccagucccucgccuucauccgcaaguccgacgagcuccuccacaacgucaacgucggcaaguccaccaccaacaucaugaucaccaccaucaucaucgucaucaucgucauccuccuccuccucaucgccgucggccucuuccucuacugcaaggcccgcugaggacuaguacuggcugcaucucccuuuccucuguccuccauccuucucccaggauggugaagggggaccugguacccagugauccccaccccaggauccuaaaucaugacuuaccugcuaauaaaaacucauuggaaaagugagaagaucuaaaaaaaaaaaaaaaaaaaaaaaaaaaaaaaaaaaaaaaaaaaaaaaaaaaaaaaaaaaaaaaaugcaucccccccccccccccccccccccccccccccaaaggcucuuuucagagccaccagaauu

SEQ ID NO: 15379 - RNA, 1998 nt, Artificial Sequence
  mRNA product Design h-5 comprising derived and/or modified sequence from HRSV(Memphis-37)__AIY60640.1__F-del_DSCav1_mut2 (opt3)
gggagagggcgcuuggcuugcaaggacccugagcugcggcauugaagcacacccaacccaacucgacugaagucagccucacugaaccggaucugagaaucuucucucucugggcuugccagggcucuccgaaccuagcuagcauccucuucaauuccaacuagaaagcuuaccauggagcugcccauccucaagaccaacgccauuacaacuauacuugcugcagugacgcugugcuucgccagcucccagaauaucaccgaagaguuuuaccaaucuacauguucagcggucaguaaaggcuauuugggggcuuuaagaacuggaugguacaccagcguuauuacaaucgaacuguccaacauuaaggagaauaaaugcaacgguaccgacgccaaggugaaacuaaucaagcaggaacucgauaaguauaaaaaugcaguaacugaccugcagcuucugaugcagucuacuccugccgcuggcucggggucagcaauauguagcggaaucgccgugugcaaggucuugcaccucgagggcgaggugaacaaaauuaagaaugcucugcugaguaccaacaaagccguugugucccucucuaauggugucagcguguuaacguucaagguacuggaucuuaagaacuacaucgacaaacaauugcugccaauucuaaauaagcaguccuguucaaucccgaacauagaaacuguuauugaguuucagcagaaaaauaacaggcuccuggaaaucacccgggaguucagugugaaugcgggggucacaacucccgugagcaccuauaugcuuacaaacucugagcuguugucccucauuaacgauaugccuaucaccaaugaccaaaagaaacugaugucaaacaaugugcagaucguccgccagcagagcuacaguauuaugugcauaaucaaggaagagguuuuagcauaugugguacaacugccacucuacggagugauugauacgcccuguuggaaacuucauacuucuccucugugcacaaccaacacuaaggaaggcuccaauaucuguuugacacgaaccgaccguggcugguacugcgauaacgccgggagcgucucguuuuucccacaggcugagacguguaaggugcagucuaauagaguuuucugcgacaccaugaacucccuaacacugcccucagaagugaaucucugcaacauagauauuuucaauccuaaauaugacuguaagaucaugacaaguaaaaccgaugucagcuccucugugaucacaagccugggagccauuguaucaugcuacgguaagacuaaauguaccgcaaguaacaagaauaggggcaucauuaagacauuuuccaacgggugcgacuauguuagcaauaaaggaguggacaccgucucugugggcaacacucuuuacugugucaacaagcaagagggucagucacuguaugugaaaggggagccaauaaucaauuucuacgauccguugguuuuucccagugacgaauuugaugcuagcauuucccaggugaacgagaagaucaaucagucucucgccuuuauccggaaaucggacgaacuguuacacaacguaaaugucggaaagagcacgacaaacauuaugauaaccacuaucauuaucgugauuaucguuauacugcuacuccugaucgcggugggccuuuucuuguauugcaaggcccgcugaggacuaguacuggcugcaucucccuuuccucuguccuccauccuucucccaggauggugaagggggaccugguacccagugauccccaccccaggauccuaaaucaugacuuaccugcuaauaaaaacucauuggaaaagugagaagaucuaaaaaaaaaaaaaaaaaaaaaaaaaaaaaaaaaaaaaaaaaaaaaaaaaaaaaaaaaaaaaaaaugcaucccccccccccccccccccccccccccccccaaaggcucuuuucagagccaccagaauu

SEQ ID NO: 15380 - RNA, 1998 nt, Artificial Sequence
  mRNA product Design h-5 comprising derived and/or modified sequence from HRSV(Memphis-37)__AIY60640.1__F-del_DSCav1_mut2 (opt4)
gggagagggcgcuuggcuugcaaggacccugagcugcggcauugaagcacacccaacccaacucgacugaagucagccucacugaaccggaucugagaaucuucucucucugggcuugccagggcucuccgaaccuagcuagcauccucuucaauuccaacuagaaagcuuaccauggagcugcccauccugaagaccaacgccaucaccaccauccuggccgccgugacccugugcuucgccagcagccagaacaucaccgaggaguucuaccagagcaccugcagcgccgugagcaagggcuaccugggcgcccugagaaccggcugguacaccagcgugaucaccaucgagcugagcaacaucaaggagaacaagugcaacggcaccgacgccaaggugaagcugaucaagcaggagcuggacaaguacaagaacgccgugaccgaccugcagcugcugaugcagagcacccccgccgccggcagcggcagcgccaucugcagcggcaucgccgugugcaaggugcugcaccuggagggcgaggugaacaagaucaagaacgcccugcugagcaccaacaaggccguggugagccugagcaacggcgugagcgugcugaccuucaaggugcuggaccugaagaacuacaucgacaagcagcugcugcccauccugaacaagcagagcugcagcauccccaacaucgagaccgugaucgaguuccagcagaagaacaacagacugcuggagaucaccagagaguucagcgugaacgccggcgugaccacccccgugagcaccuacaugcugaccaacagcgagcugcugagccugaucaacgacaugcccaucaccaacgaccagaagaagcugaugagcaacaacgugcagaucgugagacagcagagcuacagcaucaugugcaucaucaaggaggaggugcuggccuacguggugcagcugccccuguacggcgugaucgacacccccugcuggaagcugcacaccagcccccugugcaccaccaacaccaaggagggcagcaacaucugccugaccagaaccgacagaggcugguacugcgacaacgccggcagcgugagcuucuucccccaggccgagaccugcaaggugcagagcaacagaguguucugcgacaccaugaacagccugacccugcccagcgaggugaaccugugcaacaucgacaucuucaaccccaaguacgacugcaagaucaugaccagcaagaccgacgugagcagcagcgugaucaccagccugggcgccaucgugagcugcuacggcaagaccaagugcaccgccagcaacaagaacagaggcaucaucaagaccuucagcaacggcugcgacuacgugagcaacaagggcguggacaccgugagcgugggcaacacccuguacugcgugaacaagcaggagggccagagccuguacgugaagggcgagcccaucaucaacuucuacgacccccugguguuccccagcgacgaguucgacgccagcaucagccaggugaacgagaagaucaaccagagccuggccuucaucagaaagagcgacgagcugcugcacaacgugaacgugggcaagagcaccaccaacaucaugaucaccaccaucaucaucgugaucaucgugauccugcugcugcugaucgccgugggccuguuccuguacugcaaggccagaugaggacuaguacuggcugcaucucccuuuccucuguccuccauccuucucccaggauggugaagggggaccugguacccagugauccccaccccaggauccuaaaucaugacuuaccugcuaauaaaaacucauuggaaaagugagaagaucuaaaaaaaaaaaaaaaaaaaaaaaaaaaaaaaaaaaaaaaaaaaaaaaaaaaaaaaaaaaaaaaaugcaucccccccccccccccccccccccccccccccaaaggcucuuuucagagccaccagaauu

SEQ ID NO: 15381 - RNA, 1998 nt, Artificial Sequence
  mRNA product Design h-5 comprising derived and/or modified sequence from HRSV(Memphis-37)__AIY60640.1__F-del_DSCav1_mut2 (opt5)
gggagagggcgcuuggcuugcaaggacccugagcugcggcauugaagcacacccaacccaacucgacugaagucagccucacugaaccggaucugagaaucuucucucucugggcuugccagggcucuccgaaccuagcuagcauccucuucaauuccaacuagaaagcuuaccauggagcugcccauccucaagaccaacgccauuacaacgauccuggcugccgugacccuuugcuucgcgagcucccagaauauuacagaagaguuuuaccaaucuaccuguagcgcugucuccaaaggcuaucugggggcccucagaacaggaugguacaccucuguuaucacaauugaacugagcaacaucaaggagaauaaaugcaacggcaccgacgccaaggugaaacuuaucaagcaggaacuggauaaguauaaaaaugcugugacggaccuccagcugcugaugcaguccaccccugccgcugggucuggaagcgccauuuguuccggcaucgcggucugcaaggugcuccaccuggagggggagguuaacaaaauuaagaaugcccuucugagcacaaacaaagcuguggucucucucuccaauggagugagcguucugaccuucaaggugcuugaucugaagaacuacaucgacaaacaacuccugccgauucugaauaagcagucuuguuccauccccaacauugaaacagucaucgaguuucagcagaaaaauaaccggcuccuggaaaucacccgcgaguucagcgugaaugccggcgugacgacaccugucucuaccuauaugcuuacaaacuccgagcugcucagccugauuaacgauaugcccaucaccaaugaccaaaagaaacuuauguccaacaauguucagauugugagacagcagucuuacagcaucaugugcauuaucaaggaagaggugcuggcuuaugucgugcaacucccucuguacggcguuaucgauacccccuguuggaaacugcauacauccccucucugcacgaccaacacaaaggaagggagcaauauuugucugacccggacagaccgcggaugguacugcgauaacgccggcucuguguccuuuuucccgcaggcggagaccuguaagguccagagcaauagaguguuuugcgacacgaugaacucucuuacacugcccagcgaaguuaaucucugcaacaucgauauuuucaauccuaaauaugacuguaagaucaugaccuccaaaaccgaugugucuagcuccgucauuacaagccugggggccaucgugucuugcuacggaaagaccaaauguacagcuuccaacaagaaucggggcaucauuaagacguuuagcaacgggugcgacuaugucucuaauaaaggaguggacaccguuuccgugggcaacacacuuuacugugucaacaagcaagagggccagagccuguaugugaaaggggagcccaucauuaauuucuacgauccucucguuuuucccuccgacgaguucgaugccucuaucagccaggugaacgaaaagauuaaucagucccuggcuuuuauccgcaaaucugacgaacugcuccacaacgucaaugugggaaagagcaccacaaacauuaugaucaccacgaucauuaucgugauuaucguuauucugcuucugcucaucgccgucggccuguuccuguauugcaaggccagaugaggacuaguacuggcugcaucucccuuuccucuguccuccauccuucucccaggauggugaagggggaccugguacccagugauccccaccccaggauccuaaaucaugacuuaccugcuaauaaaaacucauuggaaaagugagaagaucuaaaaaaaaaaaaaaaaaaaaaaaaaaaaaaaaaaaaaaaaaaaaaaaaaaaaaaaaaaaaaaaaugcaucccccccccccccccccccccccccccccccaaaggcucuuuucagagccaccagaauu

SEQ ID NO: 15382 - RNA, 1998 nt, Artificial Sequence
  mRNA product Design h-5 comprising derived and/or modified sequence from HRSV(Memphis-37)__AIY60640.1__F-del_DSCav1_mut2 (opt6)
gggagagggcgcuuggcuugcaaggacccugagcugcggcauugaagcacacccaacccaacucgacugaagucagccucacugaaccggaucugagaaucuucucucucugggcuugccagggcucuccgaaccuagcuagcauccucuucaauuccaacuagaaagcuuaccauggaacuaccaauacucaaaacaaacgcaauaacaacaauuuuagcugcaguaacacuuuguuucgcauccucccaaaauauaacagaagaauuuuaucaaucaaccugcucagccgucuccaaaggauaucuaggugcacuacgcacuggaugguacacaagugucaucacaauagaacuuuccaacaucaaagaaaauaaauguaauggaacugacgcaaaaguaaaacucauaaaacaagaacuagacaaauacaaaaacgcaguaacagaccuacaacuauuaaugcaaucaacaccagcagcaggauccggcagugccauaugcucuggaauagcagucugcaaaguuuuacacuuagaaggcgaaguaaacaaaaucaaaaacgcccuacuaucuacaaauaaagccgucguaucucucucaaauggaguaucaguacuaacauucaaaguauuagacuuaaaaaacuacaucgauaaacaauuauugccaauauuaaacaaacaaucuugcucaauaccaaauauagaaacagucauagaauuucaacaaaaaaauaaccgauuauuagaaauaacacgagaauuuucaguaaaugccggagucaccacaccaguaucaacauacaugcuaacaaauucagaacuauuaucauuaauaaacgacaugccuauuacaaaugaucaaaaaaaacuaauguccaacaauguacaaauaguccgacaacaaagcuacucaaucauguguauaauaaaagaagaaguacuugcauacguaguacaauuaccacuauacggaguuaucgacacaccaugcuggaaacuccacacuucaccacucugcaccacaaacacaaaagaaggcucaaacauaugccuaacaagaacagaccgaggaugguacugcgacaacgcaggaucaguaucauucuucccacaagcagaaacuugcaaaguacaaucuaacagaguuuucugugacaccaugaauagccuaacacuccccuccgaaguuaaccuauguaacauagauauauuuaaucccaaauaugauugcaaaaucaugacaucuaaaaccgacguaucaucaucuguaaucacaucacuaggugccauagucucaugcuacggcaaaacaaaaugcaccgccucaaacaaaaaccgagguauaauaaaaaccuucaguaauggaugugacuacguaucaaacaaagguguugauaccguaagcgucggcaacacccuauacugcguaaauaaacaagaaggccaaucacuauacgucaaaggcgaaccaauuauuaacuucuaugacccacucgucuuucccuccgacgaauuugacgcaagcauaucacaaguaaacgaaaaaauaaaccaaucacuagcauucauacgcaaaucagaugaacuacuacauaacguaaacguaggaaaauccacuacaaauauaaugaucacaacaauaauaaucguaauuauagucauauuauuacuacuaauagcaguaggacuuuuccuauacuguaaagcaagauaaggacuaguacuggcugcaucucccuuuccucuguccuccauccuucucccaggauggugaagggggaccugguacccagugauccccaccccaggauccuaaaucaugacuuaccugcuaauaaaaacucauuggaaaagugagaagaucuaaaaaaaaaaaaaaaaaaaaaaaaaaaaaaaaaaaaaaaaaaaaaaaaaaaaaaaaaaaaaaaaugcaucccccccccccccccccccccccccccccccaaaggcucuuuucagagccaccagaauu

SEQ ID NO: 15383 - RNA, 1998 nt, Artificial Sequence
  mRNA product Design h-5 comprising derived and/or modified sequence from HRSV(Memphis-37)__AIY60640.1__F-del_DSCav1_mut2 (opt11)
gggagagggcgcuuggcuugcaaggacccugagcugcggcauugaagcacacccaacccaacucgacugaagucagccucacugaaccggaucugagaaucuucucucucugggcuugccagggcucuccgaaccuagcuagcauccucuucaauuccaacuagaaagcuuaccauggaacuucccauccucaagaccaacgcuauuacgaccauccucgccgcagucacccucugcuucgcgucaucccaaaacaucaccgaagaauuuuaccaauccacaugcuccgcagucucaaaaggcuaccuaggagcccuacgcaccggaugguacacauccgucaucacaaucgaacucuccaacauaaaagaaaacaaaugcaacggcaccgaugccaaaguaaaacugauuaaacaagaacucgacaaauacaagaacgccgucacagaccuacagcuccucaugcaaucaacucccgccgccggcagcggauccgcuaucugcucaggcaucgccguaugcaaaguccuccaccuagaaggcgaaguaaacaaaaucaagaacgcacuacucucaacaaacaaagccgucgucucccucuccaacggcgucuccguccuuaccuucaaaguccucgaccuuaagaacuacauugacaaacaacuccuacccauccucaacaaacaauccugcucuauaccuaauauagaaaccguaaucgaauuucaacagaaaaacaaccgccuccucgaaauuacccgcgaguucucaguaaacgccggcguaaccacccccgucuccaccuacaugcucacaaauucagaacuccucagccucaucaacgacaugcccauaaccaacgaccaaaagaaacucaugucaaacaacguccaaaucgucaggcaacaaagcuacagcaucaugugcaucauuaaagaagaaguacucgccuacgucgugcaacuaccccucuacggcgucauagacacacccugcuggaaacuucacacaucaccgcucugcaccacaaacaccaaagaaggcaguaacauaugccucacccgaaccgaccgcggaugguacugcgacaacgccggauccgucagcuucuucccacaagccgaaaccugcaaaguacaauccaaccgagucuucugcgacaccaugaacucucuuacgcuccccucagaagucaaccuaugcaacaucgacaucuucaaccccaaauacgacugcaaaaucaugaccuccaaaacagacgucuccuccucagugauaaccucccucggcgccauugucuccugcuacggcaaaaccaaaugcaccgccuccaacaaaaaccgugggaucaucaaaaccuucucaaacggcugcgacuacguauccaauaagggugucgacacagucuccguaggcaauacccucuauugcgucaacaaacaagaaggccaaucccucuacgucaaaggcgaaccuaucaucaacuucuacgacccgcuagucuuccccucagacgaguucgacgcauccaucucacaagucaacgaaaagaucaaccagucccucgcauucauccgaaaauccgacgaacuucuccacaacguuaacgucggcaaauccaccacuaacauaaugaucaccacgaucaucauaguaauuaucgucauacuccuccuccuaaucgcugucggacucuuccucuacugcaaggcccgcuaaggacuaguacuggcugcaucucccuuuccucuguccuccauccuucucccaggauggugaagggggaccugguacccagugauccccaccccaggauccuaaaucaugacuuaccugcuaauaaaaacucauuggaaaagugagaagaucuaaaaaaaaaaaaaaaaaaaaaaaaaaaaaaaaaaaaaaaaaaaaaaaaaaaaaaaaaaaaaaaaugcaucccccccccccccccccccccccccccccccaaaggcucuuuucagagccaccagaauu

SEQ ID NO: 15384 - RNA, 1931 nt, Artificial Sequence
  mRNA product Design i-1 comprising derived and/or modified sequence from HRSV(Memphis-37)__AIY60640.1__F-del_DSCav1_mut2 (opt1)
gggagagggcgcuuggcuugcaaggacccugagcugcggcauugaagcacacccaacccaacucgacugaagucagccucacugaaccggaucugagaaucuucucucucugggcuugccagggcucuccgaaccuagcuagcauccucuucaauuccaacuagaaagcuuaccauggagcugcccauccucaagaccaacgccaucaccacgauccuggccgcggugacccugugcuucgccagcucccagaacaucaccgaggaguucuaccagagcacgugcuccgccgucagcaagggcuaccucggcgcccugcgcaccgggugguacaccagcgugaucaccaucgagcuguccaacaucaaggagaacaagugcaacggcaccgacgccaaggugaagcucaucaagcaggagcuggacaaguacaagaacgcggucacggaccugcagcuccugaugcagagcaccccggccgccggcuccgggagcgcgaucugcuccggcaucgccgucugcaaggugcugcaccucgagggcgaggugaacaagaucaagaacgcccugcuguccaccaacaaggccgucgugagccucuccaacggggugagcguccugaccuucaaggugcuggaccucaagaacuacaucgacaagcagcugcugcccauccugaacaagcagagcugcuccauccccaacaucgagaccgucaucgaguuccagcagaagaacaaccgccuccuggagaucacgcgggaguucagcgugaacgcgggcgugaccacccccgucuccaccuacaugcugacgaacagcgagcuccugucccugaucaacgacaugccgaucaccaacgaccagaagaagcucaugagcaacaacgugcagaucgugcgccagcaguccuacagcaucaugugcaucaucaaggaggagguccuggccuacguggugcagcugccccucuacggggucaucgacacccccugcuggaagcugcacaccagcccccugugcacgaccaacaccaaggagggcuccaacaucugccucacccggacggaccgcgggugguacugcgacaacgccggcagcguguccuucuucccgcaggccgagaccugcaagguccagagcaaccggguguucugcgacaccaugaacucccugacccugcccagcgaggugaaccucugcaacaucgacaucuucaaccccaaguacgacugcaagaucaugacguccaagaccgacgucagcuccagcgugaucaccucccugggcgccaucgugagcugcuacgggaagaccaagugcacggcgagcaacaagaaccgcggcaucaucaagaccuucuccaacgggugcgacuacgucagcaacaagggcguggacaccguguccgucggcaacacccuguacugcgugaacaagcaggagggccagagccucuacgugaagggggagcccaucaucaacuucuacgacccgcuggucuuccccuccgacgaguucgacgccagcaucucccaggugaacgagaagaucaaccagagccuggccuucauccggaaguccgacgagcuccugcacaacgugaacgucggcaagagcaccacgaacaucaugaucaccaccaucaucaucgugaucaucgugauccugcugcuccugaucgccgucgggcuguuccucuacugcaaggcccgcugaggacuaguguccaccugucccuccugggcugcuggauugucucguuuuccugccaaauaaacaggaucagcgcuuuacagaucuaaaaaaaaaaaaaaaaaaaaaaaaaaaaaaaaaaaaaaaaaaaaaaaaaaaaaaaaaaaaaaaaugcaucccccccccccccccccccccccccccccccaaaggcucuuuucagagccaccagaauu

SEQ ID NO: 15385 - RNA, 1931 nt, Artificial Sequence
  mRNA product Design i-1 comprising derived and/or modified sequence from HRSV(Memphis-37)__AIY60640.1__F-del_DSCav1_mut2 (opt1)
gggagagggcgcuuggcuugcaaggacccugagcugcggcauugaagcacacccaacccaacucgacugaagucagccucacugaaccggaucugagaaucuucucucucugggcuugccagggcucuccgaaccuagcuagcauccucuucaauuccaacuagaaagcuuaccauggagcugcccauccucaagaccaacgccaucaccacgauccuggccgcggugacccugugcuucgccagcucccagaacaucaccgaggaguucuaccagagcacgugcuccgccgucagcaagggcuaccucggggcccugcgcaccggcugguacaccuccgugaucaccaucgagcugagcaacaucaaggagaacaagugcaacgggaccgacgccaaggugaagcucaucaagcaggagcuggacaaguacaagaacgcggucacggaccugcagcuccugaugcaguccaccccggccgccggcagcggguccgccaucugcagcggcaucgcggugugcaaggugcugcaccucgagggcgaggucaacaagaucaagaacgcccugcuguccaccaacaaggccguggugagccucuccaacggggucagcgugcugaccuucaaggugcuggaccucaagaacuacaucgacaagcagcugcugcccauccucaacaagcaguccugcagcauccccaacaucgagacggucaucgaguuccagcagaagaacaaccggcugcuggagaucacccgcgaguucuccgugaacgccggcgugaccacccccgucagcacguacaugcucaccaacuccgagcugcugagccucaucaacgacaugccgaucaccaacgaccagaagaagcugaugagcaacaacgugcagaucgugcggcagcaguccuacagcaucaugugcaucaucaaggaggagguccuggccuacguggugcagcucccccuguacggggucaucgacacccccugcuggaagcugcacacgagcccccucugcaccaccaacaccaaggagggcuccaacaucugccugacgcgcaccgaccgggggugguacugcgacaacgcgggcuccgugagcuucuucccgcaggccgagaccugcaaggugcaguccaaccgcgucuucugcgacaccaugaacagccugacgcuccccuccgaggugaaccugugcaacaucgacaucuucaaccccaaguacgacugcaagaucaugaccagcaagaccgacgucuccagcuccgugaucaccagccugggcgccaucguguccugcuacgggaagacgaagugcaccgccagcaacaagaaccggggcaucaucaagaccuucuccaacgggugcgacuacgucagcaacaagggcguggacaccguguccgucggcaacacgcucuacugcgugaacaagcaggaggggcagagccuguacgugaagggcgagcccaucaucaacuucuacgacccgcuggucuuccccagcgacgaguucgacgccuccaucagccaggugaacgagaagaucaaccagucccucgcguucauccgcaagagcgacgagcugcugcacaacgugaacgucgggaaguccaccaccaacaucaugaucaccaccaucaucaucgugaucaucgugauccuccugcugcucaucgccgucggccuguuccuguacugcaaggcccggugaggacuaguguccaccugucccuccugggcugcuggauugucucguuuuccugccaaauaaacaggaucagcgcuuuacagaucuaaaaaaaaaaaaaaaaaaaaaaaaaaaaaaaaaaaaaaaaaaaaaaaaaaaaaaaaaaaaaaaaugcaucccccccccccccccccccccccccccccccaaaggcucuuuucagagccaccagaauu

SEQ ID NO: 15386 - RNA, 1931 nt, Artificial Sequence
  mRNA product Design i-1 comprising derived and/or modified sequence from HRSV(Memphis-37)__AIY60640.1__F-del_DSCav1_mut2 (opt2)
gggagagggcgcuuggcuugcaaggacccugagcugcggcauugaagcacacccaacccaacucgacugaagucagccucacugaaccggaucugagaaucuucucucucugggcuugccagggcucuccgaaccuagcuagcauccucuucaauuccaacuagaaagcuuaccauggagcuccccauccucaagaccaacgccaucaccaccauccucgccgccgucacccucugcuucgccuccucccagaacaucaccgaggaguucuaccaguccaccugcuccgccgucuccaagggcuaccucggcgcccuccgcaccggcugguacaccuccgucaucaccaucgagcucuccaacaucaaggagaacaagugcaacggcaccgacgccaaggucaagcucaucaagcaggagcucgacaaguacaagaacgccgucaccgaccuccagcuccucaugcaguccacccccgccgccggcuccggcuccgccaucugcuccggcaucgccgucugcaagguccuccaccucgagggcgaggucaacaagaucaagaacgcccuccucuccaccaacaaggccgucgucucccucuccaacggcgucuccguccucaccuucaagguccucgaccucaagaacuacaucgacaagcagcuccuccccauccucaacaagcaguccugcuccauccccaacaucgagaccgucaucgaguuccagcagaagaacaaccgccuccucgagaucacccgcgaguucuccgucaacgccggcgucaccacccccgucuccaccuacaugcucaccaacuccgagcuccucucccucaucaacgacaugcccaucaccaacgaccagaagaagcucauguccaacaacguccagaucguccgccagcaguccuacuccaucaugugcaucaucaaggaggagguccucgccuacgucguccagcucccccucuacggcgucaucgacacccccugcuggaagcuccacaccuccccccucugcaccaccaacaccaaggagggcuccaacaucugccucacccgcaccgaccgcggcugguacugcgacaacgccggcuccgucuccuucuucccccaggccgagaccugcaagguccaguccaaccgcgucuucugcgacaccaugaacucccucacccuccccuccgaggucaaccucugcaacaucgacaucuucaaccccaaguacgacugcaagaucaugaccuccaagaccgacgucuccuccuccgucaucaccucccucggcgccaucgucuccugcuacggcaagaccaagugcaccgccuccaacaagaaccgcggcaucaucaagaccuucuccaacggcugcgacuacgucuccaacaagggcgucgacaccgucuccgucggcaacacccucuacugcgucaacaagcaggagggccagucccucuacgucaagggcgagcccaucaucaacuucuacgacccccucgucuuccccuccgacgaguucgacgccuccaucucccaggucaacgagaagaucaaccagucccucgccuucauccgcaaguccgacgagcuccuccacaacgucaacgucggcaaguccaccaccaacaucaugaucaccaccaucaucaucgucaucaucgucauccuccuccuccucaucgccgucggccucuuccucuacugcaaggcccgcugaggacuaguguccaccugucccuccugggcugcuggauugucucguuuuccugccaaauaaacaggaucagcgcuuuacagaucuaaaaaaaaaaaaaaaaaaaaaaaaaaaaaaaaaaaaaaaaaaaaaaaaaaaaaaaaaaaaaaaaugcaucccccccccccccccccccccccccccccccaaaggcucuuuucagagccaccagaauu

SEQ ID NO: 15387 - RNA, 1931 nt, Artificial Sequence
  mRNA product Design i-1 comprising derived and/or modified sequence from HRSV(Memphis-37)__AIY60640.1__F-del_DSCav1_mut2 (opt3)
gggagagggcgcuuggcuugcaaggacccugagcugcggcauugaagcacacccaacccaacucgacugaagucagccucacugaaccggaucugagaaucuucucucucugggcuugccagggcucuccgaaccuagcuagcauccucuucaauuccaacuagaaagcuuaccauggagcugcccauccucaagaccaacgccauuacaacuauacuugcugcagugacgcugugcuucgccagcucccagaauaucaccgaagaguuuuaccaaucuacauguucagcggucaguaaaggcuauuugggggcuuuaagaacuggaugguacaccagcguuauuacaaucgaacuguccaacauuaaggagaauaaaugcaacgguaccgacgccaaggugaaacuaaucaagcaggaacucgauaaguauaaaaaugcaguaacugaccugcagcuucugaugcagucuacuccugccgcuggcucggggucagcaauauguagcggaaucgccgugugcaaggucuugcaccucgagggcgaggugaacaaaauuaagaaugcucugcugaguaccaacaaagccguugugucccucucuaauggugucagcguguuaacguucaagguacuggaucuuaagaacuacaucgacaaacaauugcugccaauucuaaauaagcaguccuguucaaucccgaacauagaaacuguuauugaguuucagcagaaaaauaacaggcuccuggaaaucacccgggaguucagugugaaugcgggggucacaacucccgugagcaccuauaugcuuacaaacucugagcuguugucccucauuaacgauaugccuaucaccaaugaccaaaagaaacugaugucaaacaaugugcagaucguccgccagcagagcuacaguauuaugugcauaaucaaggaagagguuuuagcauaugugguacaacugccacucuacggagugauugauacgcccuguuggaaacuucauacuucuccucugugcacaaccaacacuaaggaaggcuccaauaucuguuugacacgaaccgaccguggcugguacugcgauaacgccgggagcgucucguuuuucccacaggcugagacguguaaggugcagucuaauagaguuuucugcgacaccaugaacucccuaacacugcccucagaagugaaucucugcaacauagauauuuucaauccuaaauaugacuguaagaucaugacaaguaaaaccgaugucagcuccucugugaucacaagccugggagccauuguaucaugcuacgguaagacuaaauguaccgcaaguaacaagaauaggggcaucauuaagacauuuuccaacgggugcgacuauguuagcaauaaaggaguggacaccgucucugugggcaacacucuuuacugugucaacaagcaagagggucagucacuguaugugaaaggggagccaauaaucaauuucuacgauccguugguuuuucccagugacgaauuugaugcuagcauuucccaggugaacgagaagaucaaucagucucucgccuuuauccggaaaucggacgaacuguuacacaacguaaaugucggaaagagcacgacaaacauuaugauaaccacuaucauuaucgugauuaucguuauacugcuacuccugaucgcggugggccuuuucuuguauugcaaggcccgcugaggacuaguguccaccugucccuccugggcugcuggauugucucguuuuccugccaaauaaacaggaucagcgcuuuacagaucuaaaaaaaaaaaaaaaaaaaaaaaaaaaaaaaaaaaaaaaaaaaaaaaaaaaaaaaaaaaaaaaaugcaucccccccccccccccccccccccccccccccaaaggcucuuuucagagccaccagaauu

SEQ ID NO: 15388 - RNA, 1931 nt, Artificial Sequence
  mRNA product Design i-1 comprising derived and/or modified sequence from HRSV(Memphis-37)__AIY60640.1__F-del_DSCav1_mut2 (opt4)
gggagagggcgcuuggcuugcaaggacccugagcugcggcauugaagcacacccaacccaacucgacugaagucagccucacugaaccggaucugagaaucuucucucucugggcuugccagggcucuccgaaccuagcuagcauccucuucaauuccaacuagaaagcuuaccauggagcugcccauccugaagaccaacgccaucaccaccauccuggccgccgugacccugugcuucgccagcagccagaacaucaccgaggaguucuaccagagcaccugcagcgccgugagcaagggcuaccugggcgcccugagaaccggcugguacaccagcgugaucaccaucgagcugagcaacaucaaggagaacaagugcaacggcaccgacgccaaggugaagcugaucaagcaggagcuggacaaguacaagaacgccgugaccgaccugcagcugcugaugcagagcacccccgccgccggcagcggcagcgccaucugcagcggcaucgccgugugcaaggugcugcaccuggagggcgaggugaacaagaucaagaacgcccugcugagcaccaacaaggccguggugagccugagcaacggcgugagcgugcugaccuucaaggugcuggaccugaagaacuacaucgacaagcagcugcugcccauccugaacaagcagagcugcagcauccccaacaucgagaccgugaucgaguuccagcagaagaacaacagacugcuggagaucaccagagaguucagcgugaacgccggcgugaccacccccgugagcaccuacaugcugaccaacagcgagcugcugagccugaucaacgacaugcccaucaccaacgaccagaagaagcugaugagcaacaacgugcagaucgugagacagcagagcuacagcaucaugugcaucaucaaggaggaggugcuggccuacguggugcagcugccccuguacggcgugaucgacacccccugcuggaagcugcacaccagcccccugugcaccaccaacaccaaggagggcagcaacaucugccugaccagaaccgacagaggcugguacugcgacaacgccggcagcgugagcuucuucccccaggccgagaccugcaaggugcagagcaacagaguguucugcgacaccaugaacagccugacccugcccagcgaggugaaccugugcaacaucgacaucuucaaccccaaguacgacugcaagaucaugaccagcaagaccgacgugagcagcagcgugaucaccagccugggcgccaucgugagcugcuacggcaagaccaagugcaccgccagcaacaagaacagaggcaucaucaagaccuucagcaacggcugcgacuacgugagcaacaagggcguggacaccgugagcgugggcaacacccuguacugcgugaacaagcaggagggccagagccuguacgugaagggcgagcccaucaucaacuucuacgacccccugguguuccccagcgacgaguucgacgccagcaucagccaggugaacgagaagaucaaccagagccuggccuucaucagaaagagcgacgagcugcugcacaacgugaacgugggcaagagcaccaccaacaucaugaucaccaccaucaucaucgugaucaucgugauccugcugcugcugaucgccgugggccuguuccuguacugcaaggccagaugaggacuaguguccaccugucccuccugggcugcuggauugucucguuuuccugccaaauaaacaggaucagcgcuuuacagaucuaaaaaaaaaaaaaaaaaaaaaaaaaaaaaaaaaaaaaaaaaaaaaaaaaaaaaaaaaaaaaaaaugcaucccccccccccccccccccccccccccccccaaaggcucuuuucagagccaccagaauu

SEQ ID NO: 15389 - RNA, 1931 nt, Artificial Sequence
  mRNA product Design i-1 comprising derived and/or modified sequence from HRSV(Memphis-37)__AIY60640.1__F-del_DSCav1_mut2 (opt5)
gggagagggcgcuuggcuugcaaggacccugagcugcggcauugaagcacacccaacccaacucgacugaagucagccucacugaaccggaucugagaaucuucucucucugggcuugccagggcucuccgaaccuagcuagcauccucuucaauuccaacuagaaagcuuaccauggagcugcccauccucaagaccaacgccauuacaacgauccuggcugccgugacccuuugcuucgcgagcucccagaauauuacagaagaguuuuaccaaucuaccuguagcgcugucuccaaaggcuaucugggggcccucagaacaggaugguacaccucuguuaucacaauugaacugagcaacaucaaggagaauaaaugcaacggcaccgacgccaaggugaaacuuaucaagcaggaacuggauaaguauaaaaaugcugugacggaccuccagcugcugaugcaguccaccccugccgcugggucuggaagcgccauuuguuccggcaucgcggucugcaaggugcuccaccuggagggggagguuaacaaaauuaagaaugcccuucugagcacaaacaaagcuguggucucucucuccaauggagugagcguucugaccuucaaggugcuugaucugaagaacuacaucgacaaacaacuccugccgauucugaauaagcagucuuguuccauccccaacauugaaacagucaucgaguuucagcagaaaaauaaccggcuccuggaaaucacccgcgaguucagcgugaaugccggcgugacgacaccugucucuaccuauaugcuuacaaacuccgagcugcucagccugauuaacgauaugcccaucaccaaugaccaaaagaaacuuauguccaacaauguucagauugugagacagcagucuuacagcaucaugugcauuaucaaggaagaggugcuggcuuaugucgugcaacucccucuguacggcguuaucgauacccccuguuggaaacugcauacauccccucucugcacgaccaacacaaaggaagggagcaauauuugucugacccggacagaccgcggaugguacugcgauaacgccggcucuguguccuuuuucccgcaggcggagaccuguaagguccagagcaauagaguguuuugcgacacgaugaacucucuuacacugcccagcgaaguuaaucucugcaacaucgauauuuucaauccuaaauaugacuguaagaucaugaccuccaaaaccgaugugucuagcuccgucauuacaagccugggggccaucgugucuugcuacggaaagaccaaauguacagcuuccaacaagaaucggggcaucauuaagacguuuagcaacgggugcgacuaugucucuaauaaaggaguggacaccguuuccgugggcaacacacuuuacugugucaacaagcaagagggccagagccuguaugugaaaggggagcccaucauuaauuucuacgauccucucguuuuucccuccgacgaguucgaugccucuaucagccaggugaacgaaaagauuaaucagucccuggcuuuuauccgcaaaucugacgaacugcuccacaacgucaaugugggaaagagcaccacaaacauuaugaucaccacgaucauuaucgugauuaucguuauucugcuucugcucaucgccgucggccuguuccuguauugcaaggccagaugaggacuaguguccaccugucccuccugggcugcuggauugucucguuuuccugccaaauaaacaggaucagcgcuuuacagaucuaaaaaaaaaaaaaaaaaaaaaaaaaaaaaaaaaaaaaaaaaaaaaaaaaaaaaaaaaaaaaaaaugcaucccccccccccccccccccccccccccccccaaaggcucuuuucagagccaccagaauu

SEQ ID NO: 15390 - RNA, 1931 nt, Artificial Sequence
  mRNA product Design i-1 comprising derived and/or modified sequence from HRSV(Memphis-37)__AIY60640.1__F-del_DSCav1_mut2 (opt6)
gggagagggcgcuuggcuugcaaggacccugagcugcggcauugaagcacacccaacccaacucgacugaagucagccucacugaaccggaucugagaaucuucucucucugggcuugccagggcucuccgaaccuagcuagcauccucuucaauuccaacuagaaagcuuaccauggaacuaccaauacucaaaacaaacgcaauaacaacaauuuuagcugcaguaacacuuuguuucgcauccucccaaaauauaacagaagaauuuuaucaaucaaccugcucagccgucuccaaaggauaucuaggugcacuacgcacuggaugguacacaagugucaucacaauagaacuuuccaacaucaaagaaaauaaauguaauggaacugacgcaaaaguaaaacucauaaaacaagaacuagacaaauacaaaaacgcaguaacagaccuacaacuauuaaugcaaucaacaccagcagcaggauccggcagugccauaugcucuggaauagcagucugcaaaguuuuacacuuagaaggcgaaguaaacaaaaucaaaaacgcccuacuaucuacaaauaaagccgucguaucucucucaaauggaguaucaguacuaacauucaaaguauuagacuuaaaaaacuacaucgauaaacaauuauugccaauauuaaacaaacaaucuugcucaauaccaaauauagaaacagucauagaauuucaacaaaaaaauaaccgauuauuagaaauaacacgagaauuuucaguaaaugccggagucaccacaccaguaucaacauacaugcuaacaaauucagaacuauuaucauuaauaaacgacaugccuauuacaaaugaucaaaaaaaacuaauguccaacaauguacaaauaguccgacaacaaagcuacucaaucauguguauaauaaaagaagaaguacuugcauacguaguacaauuaccacuauacggaguuaucgacacaccaugcuggaaacuccacacuucaccacucugcaccacaaacacaaaagaaggcucaaacauaugccuaacaagaacagaccgaggaugguacugcgacaacgcaggaucaguaucauucuucccacaagcagaaacuugcaaaguacaaucuaacagaguuuucugugacaccaugaauagccuaacacuccccuccgaaguuaaccuauguaacauagauauauuuaaucccaaauaugauugcaaaaucaugacaucuaaaaccgacguaucaucaucuguaaucacaucacuaggugccauagucucaugcuacggcaaaacaaaaugcaccgccucaaacaaaaaccgagguauaauaaaaaccuucaguaauggaugugacuacguaucaaacaaagguguugauaccguaagcgucggcaacacccuauacugcguaaauaaacaagaaggccaaucacuauacgucaaaggcgaaccaauuauuaacuucuaugacccacucgucuuucccuccgacgaauuugacgcaagcauaucacaaguaaacgaaaaaauaaaccaaucacuagcauucauacgcaaaucagaugaacuacuacauaacguaaacguaggaaaauccacuacaaauauaaugaucacaacaauaauaaucguaauuauagucauauuauuacuacuaauagcaguaggacuuuuccuauacuguaaagcaagauaaggacuaguguccaccugucccuccugggcugcuggauugucucguuuuccugccaaauaaacaggaucagcgcuuuacagaucuaaaaaaaaaaaaaaaaaaaaaaaaaaaaaaaaaaaaaaaaaaaaaaaaaaaaaaaaaaaaaaaaugcaucccccccccccccccccccccccccccccccaaaggcucuuuucagagccaccagaauu

SEQ ID NO: 15391 - RNA, 1931 nt, Artificial Sequence
  mRNA product Design i-1 comprising derived and/or modified sequence from HRSV(Memphis-37)__AIY60640.1__F-del_DSCav1_mut2 (opt11)
gggagagggcgcuuggcuugcaaggacccugagcugcggcauugaagcacacccaacccaacucgacugaagucagccucacugaaccggaucugagaaucuucucucucugggcuugccagggcucuccgaaccuagcuagcauccucuucaauuccaacuagaaagcuuaccauggaacuucccauccucaagaccaacgcuauuacgaccauccucgccgcagucacccucugcuucgcgucaucccaaaacaucaccgaagaauuuuaccaauccacaugcuccgcagucucaaaaggcuaccuaggagcccuacgcaccggaugguacacauccgucaucacaaucgaacucuccaacauaaaagaaaacaaaugcaacggcaccgaugccaaaguaaaacugauuaaacaagaacucgacaaauacaagaacgccgucacagaccuacagcuccucaugcaaucaacucccgccgccggcagcggauccgcuaucugcucaggcaucgccguaugcaaaguccuccaccuagaaggcgaaguaaacaaaaucaagaacgcacuacucucaacaaacaaagccgucgucucccucuccaacggcgucuccguccuuaccuucaaaguccucgaccuuaagaacuacauugacaaacaacuccuacccauccucaacaaacaauccugcucuauaccuaauauagaaaccguaaucgaauuucaacagaaaaacaaccgccuccucgaaauuacccgcgaguucucaguaaacgccggcguaaccacccccgucuccaccuacaugcucacaaauucagaacuccucagccucaucaacgacaugcccauaaccaacgaccaaaagaaacucaugucaaacaacguccaaaucgucaggcaacaaagcuacagcaucaugugcaucauuaaagaagaaguacucgccuacgucgugcaacuaccccucuacggcgucauagacacacccugcuggaaacuucacacaucaccgcucugcaccacaaacaccaaagaaggcaguaacauaugccucacccgaaccgaccgcggaugguacugcgacaacgccggauccgucagcuucuucccacaagccgaaaccugcaaaguacaauccaaccgagucuucugcgacaccaugaacucucuuacgcuccccucagaagucaaccuaugcaacaucgacaucuucaaccccaaauacgacugcaaaaucaugaccuccaaaacagacgucuccuccucagugauaaccucccucggcgccauugucuccugcuacggcaaaaccaaaugcaccgccuccaacaaaaaccgugggaucaucaaaaccuucucaaacggcugcgacuacguauccaauaagggugucgacacagucuccguaggcaauacccucuauugcgucaacaaacaagaaggccaaucccucuacgucaaaggcgaaccuaucaucaacuucuacgacccgcuagucuuccccucagacgaguucgacgcauccaucucacaagucaacgaaaagaucaaccagucccucgcauucauccgaaaauccgacgaacuucuccacaacguuaacgucggcaaauccaccacuaacauaaugaucaccacgaucaucauaguaauuaucgucauacuccuccuccuaaucgcugucggacucuuccucuacugcaaggcccgcuaaggacuaguguccaccugucccuccugggcugcuggauugucucguuuuccugccaaauaaacaggaucagcgcuuuacagaucuaaaaaaaaaaaaaaaaaaaaaaaaaaaaaaaaaaaaaaaaaaaaaaaaaaaaaaaaaaaaaaaaugcaucccccccccccccccccccccccccccccccaaaggcucuuuucagagccaccagaauu

SEQ ID NO: 15392 - RNA, 1931 nt, Artificial Sequence
  mRNA product Design i-2 comprising derived and/or modified sequence from HRSV(Memphis-37)__AIY60640.1__F-del_DSCav1_mut2 (opt1)
gggagaggcgcugccuacggagguggcagccaucuccuucucggcaucaagcuuaccauggagcugcccauccucaagaccaacgccaucaccacgauccuggccgcggugacccugugcuucgccagcucccagaacaucaccgaggaguucuaccagagcacgugcuccgccgucagcaagggcuaccucggcgcccugcgcaccgggugguacaccagcgugaucaccaucgagcuguccaacaucaaggagaacaagugcaacggcaccgacgccaaggugaagcucaucaagcaggagcuggacaaguacaagaacgcggucacggaccugcagcuccugaugcagagcaccccggccgccggcuccgggagcgcgaucugcuccggcaucgccgucugcaaggugcugcaccucgagggcgaggugaacaagaucaagaacgcccugcuguccaccaacaaggccgucgugagccucuccaacggggugagcguccugaccuucaaggugcuggaccucaagaacuacaucgacaagcagcugcugcccauccugaacaagcagagcugcuccauccccaacaucgagaccgucaucgaguuccagcagaagaacaaccgccuccuggagaucacgcgggaguucagcgugaacgcgggcgugaccacccccgucuccaccuacaugcugacgaacagcgagcuccugucccugaucaacgacaugccgaucaccaacgaccagaagaagcucaugagcaacaacgugcagaucgugcgccagcaguccuacagcaucaugugcaucaucaaggaggagguccuggccuacguggugcagcugccccucuacggggucaucgacacccccugcuggaagcugcacaccagcccccugugcacgaccaacaccaaggagggcuccaacaucugccucacccggacggaccgcgggugguacugcgacaacgccggcagcguguccuucuucccgcaggccgagaccugcaagguccagagcaaccggguguucugcgacaccaugaacucccugacccugcccagcgaggugaaccucugcaacaucgacaucuucaaccccaaguacgacugcaagaucaugacguccaagaccgacgucagcuccagcgugaucaccucccugggcgccaucgugagcugcuacgggaagaccaagugcacggcgagcaacaagaaccgcggcaucaucaagaccuucuccaacgggugcgacuacgucagcaacaagggcguggacaccguguccgucggcaacacccuguacugcgugaacaagcaggagggccagagccucuacgugaagggggagcccaucaucaacuucuacgacccgcuggucuuccccuccgacgaguucgacgccagcaucucccaggugaacgagaagaucaaccagagccuggccuucauccggaaguccgacgagcuccugcacaacgugaacgucggcaagagcaccacgaacaucaugaucaccaccaucaucaucgugaucaucgugauccugcugcuccugaucgccgucgggcuguuccucuacugcaaggcccgcugaggacuagugcaucacauuuaaaagcaucucagccuaccaugagaauaagagaaagaaaaugaagaucaauagcuuauucaucucuuuuucuuuuucguugguguaaagccaacacccugucuaaaaaacauaaauuucuuuaaucauuuugccucuuuucucugugcuucaauuaauaaaaaauggaaagaaccuagaucuaaaaaaaaaaaaaaaaaaaaaaaaaaaaaaaaaaaaaaaaaaaaaaaaaaaaaaaaaaaaaaaaugcaucccccccccccccccccccccccccccccccaaaggcucuuuucagagccaccagaauu

SEQ ID NO: 15393 - RNA, 1931 nt, Artificial Sequence
  mRNA product Design i-2 comprising derived and/or modified sequence from HRSV(Memphis-37)__AIY60640.1__F-del_DSCav1_mut2 (opt1)
gggagaggcgcugccuacggagguggcagccaucuccuucucggcaucaagcuuaccauggagcugcccauccucaagaccaacgccaucaccacgauccuggccgcggugacccugugcuucgccagcucccagaacaucaccgaggaguucuaccagagcacgugcuccgccgucagcaagggcuaccucggggcccugcgcaccggcugguacaccuccgugaucaccaucgagcugagcaacaucaaggagaacaagugcaacgggaccgacgccaaggugaagcucaucaagcaggagcuggacaaguacaagaacgcggucacggaccugcagcuccugaugcaguccaccccggccgccggcagcggguccgccaucugcagcggcaucgcggugugcaaggugcugcaccucgagggcgaggucaacaagaucaagaacgcccugcuguccaccaacaaggccguggugagccucuccaacggggucagcgugcugaccuucaaggugcuggaccucaagaacuacaucgacaagcagcugcugcccauccucaacaagcaguccugcagcauccccaacaucgagacggucaucgaguuccagcagaagaacaaccggcugcuggagaucacccgcgaguucuccgugaacgccggcgugaccacccccgucagcacguacaugcucaccaacuccgagcugcugagccucaucaacgacaugccgaucaccaacgaccagaagaagcugaugagcaacaacgugcagaucgugcggcagcaguccuacagcaucaugugcaucaucaaggaggagguccuggccuacguggugcagcucccccuguacggggucaucgacacccccugcuggaagcugcacacgagcccccucugcaccaccaacaccaaggagggcuccaacaucugccugacgcgcaccgaccgggggugguacugcgacaacgcgggcuccgugagcuucuucccgcaggccgagaccugcaaggugcaguccaaccgcgucuucugcgacaccaugaacagccugacgcuccccuccgaggugaaccugugcaacaucgacaucuucaaccccaaguacgacugcaagaucaugaccagcaagaccgacgucuccagcuccgugaucaccagccugggcgccaucguguccugcuacgggaagacgaagugcaccgccagcaacaagaaccggggcaucaucaagaccuucuccaacgggugcgacuacgucagcaacaagggcguggacaccguguccgucggcaacacgcucuacugcgugaacaagcaggaggggcagagccuguacgugaagggcgagcccaucaucaacuucuacgacccgcuggucuuccccagcgacgaguucgacgccuccaucagccaggugaacgagaagaucaaccagucccucgcguucauccgcaagagcgacgagcugcugcacaacgugaacgucgggaaguccaccaccaacaucaugaucaccaccaucaucaucgugaucaucgugauccuccugcugcucaucgccgucggccuguuccuguacugcaaggcccggugaggacuagugcaucacauuuaaaagcaucucagccuaccaugagaauaagagaaagaaaaugaagaucaauagcuuauucaucucuuuuucuuuuucguugguguaaagccaacacccugucuaaaaaacauaaauuucuuuaaucauuuugccucuuuucucugugcuucaauuaauaaaaaauggaaagaaccuagaucuaaaaaaaaaaaaaaaaaaaaaaaaaaaaaaaaaaaaaaaaaaaaaaaaaaaaaaaaaaaaaaaaugcaucccccccccccccccccccccccccccccccaaaggcucuuuucagagccaccagaauu

SEQ ID NO: 15394 - RNA, 1931 nt, Artificial Sequence
  mRNA product Design i-2 comprising derived and/or modified sequence from HRSV(Memphis-37)__AIY60640.1__F-del_DSCav1_mut2 (opt2)
gggagaggcgcugccuacggagguggcagccaucuccuucucggcaucaagcuuaccauggagcuccccauccucaagaccaacgccaucaccaccauccucgccgccgucacccucugcuucgccuccucccagaacaucaccgaggaguucuaccaguccaccugcuccgccgucuccaagggcuaccucggcgcccuccgcaccggcugguacaccuccgucaucaccaucgagcucuccaacaucaaggagaacaagugcaacggcaccgacgccaaggucaagcucaucaagcaggagcucgacaaguacaagaacgccgucaccgaccuccagcuccucaugcaguccacccccgccgccggcuccggcuccgccaucugcuccggcaucgccgucugcaagguccuccaccucgagggcgaggucaacaagaucaagaacgcccuccucuccaccaacaaggccgucgucucccucuccaacggcgucuccguccucaccuucaagguccucgaccucaagaacuacaucgacaagcagcuccuccccauccucaacaagcaguccugcuccauccccaacaucgagaccgucaucgaguuccagcagaagaacaaccgccuccucgagaucacccgcgaguucuccgucaacgccggcgucaccacccccgucuccaccuacaugcucaccaacuccgagcuccucucccucaucaacgacaugcccaucaccaacgaccagaagaagcucauguccaacaacguccagaucguccgccagcaguccuacuccaucaugugcaucaucaaggaggagguccucgccuacgucguccagcucccccucuacggcgucaucgacacccccugcuggaagcuccacaccuccccccucugcaccaccaacaccaaggagggcuccaacaucugccucacccgcaccgaccgcggcugguacugcgacaacgccggcuccgucuccuucuucccccaggccgagaccugcaagguccaguccaaccgcgucuucugcgacaccaugaacucccucacccuccccuccgaggucaaccucugcaacaucgacaucuucaaccccaaguacgacugcaagaucaugaccuccaagaccgacgucuccuccuccgucaucaccucccucggcgccaucgucuccugcuacggcaagaccaagugcaccgccuccaacaagaaccgcggcaucaucaagaccuucuccaacggcugcgacuacgucuccaacaagggcgucgacaccgucuccgucggcaacacccucuacugcgucaacaagcaggagggccagucccucuacgucaagggcgagcccaucaucaacuucuacgacccccucgucuuccccuccgacgaguucgacgccuccaucucccaggucaacgagaagaucaaccagucccucgccuucauccgcaaguccgacgagcuccuccacaacgucaacgucggcaaguccaccaccaacaucaugaucaccaccaucaucaucgucaucaucgucauccuccuccuccucaucgccgucggccucuuccucuacugcaaggcccgcugaggacuagugcaucacauuuaaaagcaucucagccuaccaugagaauaagagaaagaaaaugaagaucaauagcuuauucaucucuuuuucuuuuucguugguguaaagccaacacccugucuaaaaaacauaaauuucuuuaaucauuuugccucuuuucucugugcuucaauuaauaaaaaauggaaagaaccuagaucuaaaaaaaaaaaaaaaaaaaaaaaaaaaaaaaaaaaaaaaaaaaaaaaaaaaaaaaaaaaaaaaaugcaucccccccccccccccccccccccccccccccaaaggcucuuuucagagccaccagaauu

SEQ ID NO: 15395 - RNA, 1931 nt, Artificial Sequence
  mRNA product Design i-2 comprising derived and/or modified sequence from HRSV(Memphis-37)__AIY60640.1__F-del_DSCav1_mut2 (opt3)
gggagaggcgcugccuacggagguggcagccaucuccuucucggcaucaagcuuaccauggagcugcccauccucaagaccaacgccauuacaacuauacuugcugcagugacgcugugcuucgccagcucccagaauaucaccgaagaguuuuaccaaucuacauguucagcggucaguaaaggcuauuugggggcuuuaagaacuggaugguacaccagcguuauuacaaucgaacuguccaacauuaaggagaauaaaugcaacgguaccgacgccaaggugaaacuaaucaagcaggaacucgauaaguauaaaaaugcaguaacugaccugcagcuucugaugcagucuacuccugccgcuggcucggggucagcaauauguagcggaaucgccgugugcaaggucuugcaccucgagggcgaggugaacaaaauuaagaaugcucugcugaguaccaacaaagccguugugucccucucuaauggugucagcguguuaacguucaagguacuggaucuuaagaacuacaucgacaaacaauugcugccaauucuaaauaagcaguccuguucaaucccgaacauagaaacuguuauugaguuucagcagaaaaauaacaggcuccuggaaaucacccgggaguucagugugaaugcgggggucacaacucccgugagcaccuauaugcuuacaaacucugagcuguugucccucauuaacgauaugccuaucaccaaugaccaaaagaaacugaugucaaacaaugugcagaucguccgccagcagagcuacaguauuaugugcauaaucaaggaagagguuuuagcauaugugguacaacugccacucuacggagugauugauacgcccuguuggaaacuucauacuucuccucugugcacaaccaacacuaaggaaggcuccaauaucuguuugacacgaaccgaccguggcugguacugcgauaacgccgggagcgucucguuuuucccacaggcugagacguguaaggugcagucuaauagaguuuucugcgacaccaugaacucccuaacacugcccucagaagugaaucucugcaacauagauauuuucaauccuaaauaugacuguaagaucaugacaaguaaaaccgaugucagcuccucugugaucacaagccugggagccauuguaucaugcuacgguaagacuaaauguaccgcaaguaacaagaauaggggcaucauuaagacauuuuccaacgggugcgacuauguuagcaauaaaggaguggacaccgucucugugggcaacacucuuuacugugucaacaagcaagagggucagucacuguaugugaaaggggagccaauaaucaauuucuacgauccguugguuuuucccagugacgaauuugaugcuagcauuucccaggugaacgagaagaucaaucagucucucgccuuuauccggaaaucggacgaacuguuacacaacguaaaugucggaaagagcacgacaaacauuaugauaaccacuaucauuaucgugauuaucguuauacugcuacuccugaucgcggugggccuuuucuuguauugcaaggcccgcugaggacuagugcaucacauuuaaaagcaucucagccuaccaugagaauaagagaaagaaaaugaagaucaauagcuuauucaucucuuuuucuuuuucguugguguaaagccaacacccugucuaaaaaacauaaauuucuuuaaucauuuugccucuuuucucugugcuucaauuaauaaaaaauggaaagaaccuagaucuaaaaaaaaaaaaaaaaaaaaaaaaaaaaaaaaaaaaaaaaaaaaaaaaaaaaaaaaaaaaaaaaugcaucccccccccccccccccccccccccccccccaaaggcucuuuucagagccaccagaauu

SEQ ID NO: 15396 - RNA, 1931 nt, Artificial Sequence
  mRNA product Design i-2 comprising derived and/or modified sequence from HRSV(Memphis-37)__AIY60640.1__F-del_DSCav1_mut2 (opt4)
gggagaggcgcugccuacggagguggcagccaucuccuucucggcaucaagcuuaccauggagcugcccauccugaagaccaacgccaucaccaccauccuggccgccgugacccugugcuucgccagcagccagaacaucaccgaggaguucuaccagagcaccugcagcgccgugagcaagggcuaccugggcgcccugagaaccggcugguacaccagcgugaucaccaucgagcugagcaacaucaaggagaacaagugcaacggcaccgacgccaaggugaagcugaucaagcaggagcuggacaaguacaagaacgccgugaccgaccugcagcugcugaugcagagcacccccgccgccggcagcggcagcgccaucugcagcggcaucgccgugugcaaggugcugcaccuggagggcgaggugaacaagaucaagaacgcccugcugagcaccaacaaggccguggugagccugagcaacggcgugagcgugcugaccuucaaggugcuggaccugaagaacuacaucgacaagcagcugcugcccauccugaacaagcagagcugcagcauccccaacaucgagaccgugaucgaguuccagcagaagaacaacagacugcuggagaucaccagagaguucagcgugaacgccggcgugaccacccccgugagcaccuacaugcugaccaacagcgagcugcugagccugaucaacgacaugcccaucaccaacgaccagaagaagcugaugagcaacaacgugcagaucgugagacagcagagcuacagcaucaugugcaucaucaaggaggaggugcuggccuacguggugcagcugccccuguacggcgugaucgacacccccugcuggaagcugcacaccagcccccugugcaccaccaacaccaaggagggcagcaacaucugccugaccagaaccgacagaggcugguacugcgacaacgccggcagcgugagcuucuucccccaggccgagaccugcaaggugcagagcaacagaguguucugcgacaccaugaacagccugacccugcccagcgaggugaaccugugcaacaucgacaucuucaaccccaaguacgacugcaagaucaugaccagcaagaccgacgugagcagcagcgugaucaccagccugggcgccaucgugagcugcuacggcaagaccaagugcaccgccagcaacaagaacagaggcaucaucaagaccuucagcaacggcugcgacuacgugagcaacaagggcguggacaccgugagcgugggcaacacccuguacugcgugaacaagcaggagggccagagccuguacgugaagggcgagcccaucaucaacuucuacgacccccugguguuccccagcgacgaguucgacgccagcaucagccaggugaacgagaagaucaaccagagccuggccuucaucagaaagagcgacgagcugcugcacaacgugaacgugggcaagagcaccaccaacaucaugaucaccaccaucaucaucgugaucaucgugauccugcugcugcugaucgccgugggccuguuccuguacugcaaggccagaugaggacuagugcaucacauuuaaaagcaucucagccuaccaugagaauaagagaaagaaaaugaagaucaauagcuuauucaucucuuuuucuuuuucguugguguaaagccaacacccugucuaaaaaacauaaauuucuuuaaucauuuugccucuuuucucugugcuucaauuaauaaaaaauggaaagaaccuagaucuaaaaaaaaaaaaaaaaaaaaaaaaaaaaaaaaaaaaaaaaaaaaaaaaaaaaaaaaaaaaaaaaugcaucccccccccccccccccccccccccccccccaaaggcucuuuucagagccaccagaauu

SEQ ID NO: 15397 - RNA, 1931 nt, Artificial Sequence
  mRNA product Design i-2 comprising derived and/or modified sequence from HRSV(Memphis-37)__AIY60640.1__F-del_DSCav1_mut2 (opt5)
gggagaggcgcugccuacggagguggcagccaucuccuucucggcaucaagcuuaccauggagcugcccauccucaagaccaacgccauuacaacgauccuggcugccgugacccuuugcuucgcgagcucccagaauauuacagaagaguuuuaccaaucuaccuguagcgcugucuccaaaggcuaucugggggcccucagaacaggaugguacaccucuguuaucacaauugaacugagcaacaucaaggagaauaaaugcaacggcaccgacgccaaggugaaacuuaucaagcaggaacuggauaaguauaaaaaugcugugacggaccuccagcugcugaugcaguccaccccugccgcugggucuggaagcgccauuuguuccggcaucgcggucugcaaggugcuccaccuggagggggagguuaacaaaauuaagaaugcccuucugagcacaaacaaagcuguggucucucucuccaauggagugagcguucugaccuucaaggugcuugaucugaagaacuacaucgacaaacaacuccugccgauucugaauaagcagucuuguuccauccccaacauugaaacagucaucgaguuucagcagaaaaauaaccggcuccuggaaaucacccgcgaguucagcgugaaugccggcgugacgacaccugucucuaccuauaugcuuacaaacuccgagcugcucagccugauuaacgauaugcccaucaccaaugaccaaaagaaacuuauguccaacaauguucagauugugagacagcagucuuacagcaucaugugcauuaucaaggaagaggugcuggcuuaugucgugcaacucccucuguacggcguuaucgauacccccuguuggaaacugcauacauccccucucugcacgaccaacacaaaggaagggagcaauauuugucugacccggacagaccgcggaugguacugcgauaacgccggcucuguguccuuuuucccgcaggcggagaccuguaagguccagagcaauagaguguuuugcgacacgaugaacucucuuacacugcccagcgaaguuaaucucugcaacaucgauauuuucaauccuaaauaugacuguaagaucaugaccuccaaaaccgaugugucuagcuccgucauuacaagccugggggccaucgugucuugcuacggaaagaccaaauguacagcuuccaacaagaaucggggcaucauuaagacguuuagcaacgggugcgacuaugucucuaauaaaggaguggacaccguuuccgugggcaacacacuuuacugugucaacaagcaagagggccagagccuguaugugaaaggggagcccaucauuaauuucuacgauccucucguuuuucccuccgacgaguucgaugccucuaucagccaggugaacgaaaagauuaaucagucccuggcuuuuauccgcaaaucugacgaacugcuccacaacgucaaugugggaaagagcaccacaaacauuaugaucaccacgaucauuaucgugauuaucguuauucugcuucugcucaucgccgucggccuguuccuguauugcaaggccagaugaggacuagugcaucacauuuaaaagcaucucagccuaccaugagaauaagagaaagaaaaugaagaucaauagcuuauucaucucuuuuucuuuuucguugguguaaagccaacacccugucuaaaaaacauaaauuucuuuaaucauuuugccucuuuucucugugcuucaauuaauaaaaaauggaaagaaccuagaucuaaaaaaaaaaaaaaaaaaaaaaaaaaaaaaaaaaaaaaaaaaaaaaaaaaaaaaaaaaaaaaaaugcaucccccccccccccccccccccccccccccccaaaggcucuuuucagagccaccagaauu

SEQ ID NO: 15398 - RNA, 1931 nt, Artificial Sequence
  mRNA product Design i-2 comprising derived and/or modified sequence from HRSV(Memphis-37)__AIY60640.1__F-del_DSCav1_mut2 (opt6)
gggagaggcgcugccuacggagguggcagccaucuccuucucggcaucaagcuuaccauggaacuaccaauacucaaaacaaacgcaauaacaacaauuuuagcugcaguaacacuuuguuucgcauccucccaaaauauaacagaagaauuuuaucaaucaaccugcucagccgucuccaaaggauaucuaggugcacuacgcacuggaugguacacaagugucaucacaauagaacuuuccaacaucaaagaaaauaaauguaauggaacugacgcaaaaguaaaacucauaaaacaagaacuagacaaauacaaaaacgcaguaacagaccuacaacuauuaaugcaaucaacaccagcagcaggauccggcagugccauaugcucuggaauagcagucugcaaaguuuuacacuuagaaggcgaaguaaacaaaaucaaaaacgcccuacuaucuacaaauaaagccgucguaucucucucaaauggaguaucaguacuaacauucaaaguauuagacuuaaaaaacuacaucgauaaacaauuauugccaauauuaaacaaacaaucuugcucaauaccaaauauagaaacagucauagaauuucaacaaaaaaauaaccgauuauuagaaauaacacgagaauuuucaguaaaugccggagucaccacaccaguaucaacauacaugcuaacaaauucagaacuauuaucauuaauaaacgacaugccuauuacaaaugaucaaaaaaaacuaauguccaacaauguacaaauaguccgacaacaaagcuacucaaucauguguauaauaaaagaagaaguacuugcauacguaguacaauuaccacuauacggaguuaucgacacaccaugcuggaaacuccacacuucaccacucugcaccacaaacacaaaagaaggcucaaacauaugccuaacaagaacagaccgaggaugguacugcgacaacgcaggaucaguaucauucuucccacaagcagaaacuugcaaaguacaaucuaacagaguuuucugugacaccaugaauagccuaacacuccccuccgaaguuaaccuauguaacauagauauauuuaaucccaaauaugauugcaaaaucaugacaucuaaaaccgacguaucaucaucuguaaucacaucacuaggugccauagucucaugcuacggcaaaacaaaaugcaccgccucaaacaaaaaccgagguauaauaaaaaccuucaguaauggaugugacuacguaucaaacaaagguguugauaccguaagcgucggcaacacccuauacugcguaaauaaacaagaaggccaaucacuauacgucaaaggcgaaccaauuauuaacuucuaugacccacucgucuuucccuccgacgaauuugacgcaagcauaucacaaguaaacgaaaaaauaaaccaaucacuagcauucauacgcaaaucagaugaacuacuacauaacguaaacguaggaaaauccacuacaaauauaaugaucacaacaauaauaaucguaauuauagucauauuauuacuacuaauagcaguaggacuuuuccuauacuguaaagcaagauaaggacuagugcaucacauuuaaaagcaucucagccuaccaugagaauaagagaaagaaaaugaagaucaauagcuuauucaucucuuuuucuuuuucguugguguaaagccaacacccugucuaaaaaacauaaauuucuuuaaucauuuugccucuuuucucugugcuucaauuaauaaaaaauggaaagaaccuagaucuaaaaaaaaaaaaaaaaaaaaaaaaaaaaaaaaaaaaaaaaaaaaaaaaaaaaaaaaaaaaaaaaugcaucccccccccccccccccccccccccccccccaaaggcucuuuucagagccaccagaauu

SEQ ID NO: 15399 - RNA, 1931 nt, Artificial Sequence
  mRNA product Design i-2 comprising derived and/or modified sequence from HRSV(Memphis-37)__AIY60640.1__F-del_DSCav1_mut2 (opt11)
gggagaggcgcugccuacggagguggcagccaucuccuucucggcaucaagcuuaccauggaacuucccauccucaagaccaacgcuauuacgaccauccucgccgcagucacccucugcuucgcgucaucccaaaacaucaccgaagaauuuuaccaauccacaugcuccgcagucucaaaaggcuaccuaggagcccuacgcaccggaugguacacauccgucaucacaaucgaacucuccaacauaaaagaaaacaaaugcaacggcaccgaugccaaaguaaaacugauuaaacaagaacucgacaaauacaagaacgccgucacagaccuacagcuccucaugcaaucaacucccgccgccggcagcggauccgcuaucugcucaggcaucgccguaugcaaaguccuccaccuagaaggcgaaguaaacaaaaucaagaacgcacuacucucaacaaacaaagccgucgucucccucuccaacggcgucuccguccuuaccuucaaaguccucgaccuuaagaacuacauugacaaacaacuccuacccauccucaacaaacaauccugcucuauaccuaauauagaaaccguaaucgaauuucaacagaaaaacaaccgccuccucgaaauuacccgcgaguucucaguaaacgccggcguaaccacccccgucuccaccuacaugcucacaaauucagaacuccucagccucaucaacgacaugcccauaaccaacgaccaaaagaaacucaugucaaacaacguccaaaucgucaggcaacaaagcuacagcaucaugugcaucauuaaagaagaaguacucgccuacgucgugcaacuaccccucuacggcgucauagacacacccugcuggaaacuucacacaucaccgcucugcaccacaaacaccaaagaaggcaguaacauaugccucacccgaaccgaccgcggaugguacugcgacaacgccggauccgucagcuucuucccacaagccgaaaccugcaaaguacaauccaaccgagucuucugcgacaccaugaacucucuuacgcuccccucagaagucaaccuaugcaacaucgacaucuucaaccccaaauacgacugcaaaaucaugaccuccaaaacagacgucuccuccucagugauaaccucccucggcgccauugucuccugcuacggcaaaaccaaaugcaccgccuccaacaaaaaccgugggaucaucaaaaccuucucaaacggcugcgacuacguauccaauaagggugucgacacagucuccguaggcaauacccucuauugcgucaacaaacaagaaggccaaucccucuacgucaaaggcgaaccuaucaucaacuucuacgacccgcuagucuuccccucagacgaguucgacgcauccaucucacaagucaacgaaaagaucaaccagucccucgcauucauccgaaaauccgacgaacuucuccacaacguuaacgucggcaaauccaccacuaacauaaugaucaccacgaucaucauaguaauuaucgucauacuccuccuccuaaucgcugucggacucuuccucuacugcaaggcccgcuaaggacuagugcaucacauuuaaaagcaucucagccuaccaugagaauaagagaaagaaaaugaagaucaauagcuuauucaucucuuuuucuuuuucguugguguaaagccaacacccugucuaaaaaacauaaauuucuuuaaucauuuugccucuuuucucugugcuucaauuaauaaaaaauggaaagaaccuagaucuaaaaaaaaaaaaaaaaaaaaaaaaaaaaaaaaaaaaaaaaaaaaaaaaaaaaaaaaaaaaaaaaugcaucccccccccccccccccccccccccccccccaaaggcucuuuucagagccaccagaauu

SEQ ID NO: 15400 - RNA, 1927 nt, Artificial Sequence
  mRNA product Design i-2 comprising derived and/or modified sequence from HRSV(Memphis-37)__AIY60640.1__F-del_DSCav1_mut2 (opt1)
ggggcgcugccuacggagguggcagccaucuccuucucggcaucaagcuuaccauggagcugcccauccucaagaccaacgccaucaccacgauccuggccgcggugacccugugcuucgccagcucccagaacaucaccgaggaguucuaccagagcacgugcuccgccgucagcaagggcuaccucggcgcccugcgcaccgggugguacaccagcgugaucaccaucgagcuguccaacaucaaggagaacaagugcaacggcaccgacgccaaggugaagcucaucaagcaggagcuggacaaguacaagaacgcggucacggaccugcagcuccugaugcagagcaccccggccgccggcuccgggagcgcgaucugcuccggcaucgccgucugcaaggugcugcaccucgagggcgaggugaacaagaucaagaacgcccugcuguccaccaacaaggccgucgugagccucuccaacggggugagcguccugaccuucaaggugcuggaccucaagaacuacaucgacaagcagcugcugcccauccugaacaagcagagcugcuccauccccaacaucgagaccgucaucgaguuccagcagaagaacaaccgccuccuggagaucacgcgggaguucagcgugaacgcgggcgugaccacccccgucuccaccuacaugcugacgaacagcgagcuccugucccugaucaacgacaugccgaucaccaacgaccagaagaagcucaugagcaacaacgugcagaucgugcgccagcaguccuacagcaucaugugcaucaucaaggaggagguccuggccuacguggugcagcugccccucuacggggucaucgacacccccugcuggaagcugcacaccagcccccugugcacgaccaacaccaaggagggcuccaacaucugccucacccggacggaccgcgggugguacugcgacaacgccggcagcguguccuucuucccgcaggccgagaccugcaagguccagagcaaccggguguucugcgacaccaugaacucccugacccugcccagcgaggugaaccucugcaacaucgacaucuucaaccccaaguacgacugcaagaucaugacguccaagaccgacgucagcuccagcgugaucaccucccugggcgccaucgugagcugcuacgggaagaccaagugcacggcgagcaacaagaaccgcggcaucaucaagaccuucuccaacgggugcgacuacgucagcaacaagggcguggacaccguguccgucggcaacacccuguacugcgugaacaagcaggagggccagagccucuacgugaagggggagcccaucaucaacuucuacgacccgcuggucuuccccuccgacgaguucgacgccagcaucucccaggugaacgagaagaucaaccagagccuggccuucauccggaaguccgacgagcuccugcacaacgugaacgucggcaagagcaccacgaacaucaugaucaccaccaucaucaucgugaucaucgugauccugcugcuccugaucgccgucgggcuguuccucuacugcaaggcccgcugaggacuagugcaucacauuuaaaagcaucucagccuaccaugagaauaagagaaagaaaaugaagaucaauagcuuauucaucucuuuuucuuuuucguugguguaaagccaacacccugucuaaaaaacauaaauuucuuuaaucauuuugccucuuuucucugugcuucaauuaauaaaaaauggaaagaaccuagaucuaaaaaaaaaaaaaaaaaaaaaaaaaaaaaaaaaaaaaaaaaaaaaaaaaaaaaaaaaaaaaaaaugcaucccccccccccccccccccccccccccccccaaaggcucuuuucagagccaccagaauu

SEQ ID NO: 15401 - RNA, 1927 nt, Artificial Sequence
  mRNA product Design i-2 comprising derived and/or modified sequence from HRSV(Memphis-37)__AIY60640.1__F-del_DSCav1_mut2 (opt1)
ggggcgcugccuacggagguggcagccaucuccuucucggcaucaagcuuaccauggagcugcccauccucaagaccaacgccaucaccacgauccuggccgcggugacccugugcuucgccagcucccagaacaucaccgaggaguucuaccagagcacgugcuccgccgucagcaagggcuaccucggggcccugcgcaccggcugguacaccuccgugaucaccaucgagcugagcaacaucaaggagaacaagugcaacgggaccgacgccaaggugaagcucaucaagcaggagcuggacaaguacaagaacgcggucacggaccugcagcuccugaugcaguccaccccggccgccggcagcggguccgccaucugcagcggcaucgcggugugcaaggugcugcaccucgagggcgaggucaacaagaucaagaacgcccugcuguccaccaacaaggccguggugagccucuccaacggggucagcgugcugaccuucaaggugcuggaccucaagaacuacaucgacaagcagcugcugcccauccucaacaagcaguccugcagcauccccaacaucgagacggucaucgaguuccagcagaagaacaaccggcugcuggagaucacccgcgaguucuccgugaacgccggcgugaccacccccgucagcacguacaugcucaccaacuccgagcugcugagccucaucaacgacaugccgaucaccaacgaccagaagaagcugaugagcaacaacgugcagaucgugcggcagcaguccuacagcaucaugugcaucaucaaggaggagguccuggccuacguggugcagcucccccuguacggggucaucgacacccccugcuggaagcugcacacgagcccccucugcaccaccaacaccaaggagggcuccaacaucugccugacgcgcaccgaccgggggugguacugcgacaacgcgggcuccgugagcuucuucccgcaggccgagaccugcaaggugcaguccaaccgcgucuucugcgacaccaugaacagccugacgcuccccuccgaggugaaccugugcaacaucgacaucuucaaccccaaguacgacugcaagaucaugaccagcaagaccgacgucuccagcuccgugaucaccagccugggcgccaucguguccugcuacgggaagacgaagugcaccgccagcaacaagaaccggggcaucaucaagaccuucuccaacgggugcgacuacgucagcaacaagggcguggacaccguguccgucggcaacacgcucuacugcgugaacaagcaggaggggcagagccuguacgugaagggcgagcccaucaucaacuucuacgacccgcuggucuuccccagcgacgaguucgacgccuccaucagccaggugaacgagaagaucaaccagucccucgcguucauccgcaagagcgacgagcugcugcacaacgugaacgucgggaaguccaccaccaacaucaugaucaccaccaucaucaucgugaucaucgugauccuccugcugcucaucgccgucggccuguuccuguacugcaaggcccggugaggacuagugcaucacauuuaaaagcaucucagccuaccaugagaauaagagaaagaaaaugaagaucaauagcuuauucaucucuuuuucuuuuucguugguguaaagccaacacccugucuaaaaaacauaaauuucuuuaaucauuuugccucuuuucucugugcuucaauuaauaaaaaauggaaagaaccuagaucuaaaaaaaaaaaaaaaaaaaaaaaaaaaaaaaaaaaaaaaaaaaaaaaaaaaaaaaaaaaaaaaaugcaucccccccccccccccccccccccccccccccaaaggcucuuuucagagccaccagaauu

SEQ ID NO: 15402 - RNA, 1927 nt, Artificial Sequence
  mRNA product Design i-2 comprising derived and/or modified sequence from HRSV(Memphis-37)__AIY60640.1__F-del_DSCav1_mut2 (opt2)
ggggcgcugccuacggagguggcagccaucuccuucucggcaucaagcuuaccauggagcuccccauccucaagaccaacgccaucaccaccauccucgccgccgucacccucugcuucgccuccucccagaacaucaccgaggaguucuaccaguccaccugcuccgccgucuccaagggcuaccucggcgcccuccgcaccggcugguacaccuccgucaucaccaucgagcucuccaacaucaaggagaacaagugcaacggcaccgacgccaaggucaagcucaucaagcaggagcucgacaaguacaagaacgccgucaccgaccuccagcuccucaugcaguccacccccgccgccggcuccggcuccgccaucugcuccggcaucgccgucugcaagguccuccaccucgagggcgaggucaacaagaucaagaacgcccuccucuccaccaacaaggccgucgucucccucuccaacggcgucuccguccucaccuucaagguccucgaccucaagaacuacaucgacaagcagcuccuccccauccucaacaagcaguccugcuccauccccaacaucgagaccgucaucgaguuccagcagaagaacaaccgccuccucgagaucacccgcgaguucuccgucaacgccggcgucaccacccccgucuccaccuacaugcucaccaacuccgagcuccucucccucaucaacgacaugcccaucaccaacgaccagaagaagcucauguccaacaacguccagaucguccgccagcaguccuacuccaucaugugcaucaucaaggaggagguccucgccuacgucguccagcucccccucuacggcgucaucgacacccccugcuggaagcuccacaccuccccccucugcaccaccaacaccaaggagggcuccaacaucugccucacccgcaccgaccgcggcugguacugcgacaacgccggcuccgucuccuucuucccccaggccgagaccugcaagguccaguccaaccgcgucuucugcgacaccaugaacucccucacccuccccuccgaggucaaccucugcaacaucgacaucuucaaccccaaguacgacugcaagaucaugaccuccaagaccgacgucuccuccuccgucaucaccucccucggcgccaucgucuccugcuacggcaagaccaagugcaccgccuccaacaagaaccgcggcaucaucaagaccuucuccaacggcugcgacuacgucuccaacaagggcgucgacaccgucuccgucggcaacacccucuacugcgucaacaagcaggagggccagucccucuacgucaagggcgagcccaucaucaacuucuacgacccccucgucuuccccuccgacgaguucgacgccuccaucucccaggucaacgagaagaucaaccagucccucgccuucauccgcaaguccgacgagcuccuccacaacgucaacgucggcaaguccaccaccaacaucaugaucaccaccaucaucaucgucaucaucgucauccuccuccuccucaucgccgucggccucuuccucuacugcaaggcccgcugaggacuagugcaucacauuuaaaagcaucucagccuaccaugagaauaagagaaagaaaaugaagaucaauagcuuauucaucucuuuuucuuuuucguugguguaaagccaacacccugucuaaaaaacauaaauuucuuuaaucauuuugccucuuuucucugugcuucaauuaauaaaaaauggaaagaaccuagaucuaaaaaaaaaaaaaaaaaaaaaaaaaaaaaaaaaaaaaaaaaaaaaaaaaaaaaaaaaaaaaaaaugcaucccccccccccccccccccccccccccccccaaaggcucuuuucagagccaccagaauu

SEQ ID NO: 15403 - RNA, 1927 nt, Artificial Sequence
  mRNA product Design i-2 comprising derived and/or modified sequence from HRSV(Memphis-37)__AIY60640.1__F-del_DSCav1_mut2 (opt3)
ggggcgcugccuacggagguggcagccaucuccuucucggcaucaagcuuaccauggagcugcccauccucaagaccaacgccauuacaacuauacuugcugcagugacgcugugcuucgccagcucccagaauaucaccgaagaguuuuaccaaucuacauguucagcggucaguaaaggcuauuugggggcuuuaagaacuggaugguacaccagcguuauuacaaucgaacuguccaacauuaaggagaauaaaugcaacgguaccgacgccaaggugaaacuaaucaagcaggaacucgauaaguauaaaaaugcaguaacugaccugcagcuucugaugcagucuacuccugccgcuggcucggggucagcaauauguagcggaaucgccgugugcaaggucuugcaccucgagggcgaggugaacaaaauuaagaaugcucugcugaguaccaacaaagccguugugucccucucuaauggugucagcguguuaacguucaagguacuggaucuuaagaacuacaucgacaaacaauugcugccaauucuaaauaagcaguccuguucaaucccgaacauagaaacuguuauugaguuucagcagaaaaauaacaggcuccuggaaaucacccgggaguucagugugaaugcgggggucacaacucccgugagcaccuauaugcuuacaaacucugagcuguugucccucauuaacgauaugccuaucaccaaugaccaaaagaaacugaugucaaacaaugugcagaucguccgccagcagagcuacaguauuaugugcauaaucaaggaagagguuuuagcauaugugguacaacugccacucuacggagugauugauacgcccuguuggaaacuucauacuucuccucugugcacaaccaacacuaaggaaggcuccaauaucuguuugacacgaaccgaccguggcugguacugcgauaacgccgggagcgucucguuuuucccacaggcugagacguguaaggugcagucuaauagaguuuucugcgacaccaugaacucccuaacacugcccucagaagugaaucucugcaacauagauauuuucaauccuaaauaugacuguaagaucaugacaaguaaaaccgaugucagcuccucugugaucacaagccugggagccauuguaucaugcuacgguaagacuaaauguaccgcaaguaacaagaauaggggcaucauuaagacauuuuccaacgggugcgacuauguuagcaauaaaggaguggacaccgucucugugggcaacacucuuuacugugucaacaagcaagagggucagucacuguaugugaaaggggagccaauaaucaauuucuacgauccguugguuuuucccagugacgaauuugaugcuagcauuucccaggugaacgagaagaucaaucagucucucgccuuuauccggaaaucggacgaacuguuacacaacguaaaugucggaaagagcacgacaaacauuaugauaaccacuaucauuaucgugauuaucguuauacugcuacuccugaucgcggugggccuuuucuuguauugcaaggcccgcugaggacuagugcaucacauuuaaaagcaucucagccuaccaugagaauaagagaaagaaaaugaagaucaauagcuuauucaucucuuuuucuuuuucguugguguaaagccaacacccugucuaaaaaacauaaauuucuuuaaucauuuugccucuuuucucugugcuucaauuaauaaaaaauggaaagaaccuagaucuaaaaaaaaaaaaaaaaaaaaaaaaaaaaaaaaaaaaaaaaaaaaaaaaaaaaaaaaaaaaaaaaugcaucccccccccccccccccccccccccccccccaaaggcucuuuucagagccaccagaauu

SEQ ID NO: 15404 - RNA, 1927 nt, Artificial Sequence
  mRNA product Design i-2 comprising derived and/or modified sequence from HRSV(Memphis-37)__AIY60640.1__F-del_DSCav1_mut2 (opt4)
ggggcgcugccuacggagguggcagccaucuccuucucggcaucaagcuuaccauggagcugcccauccugaagaccaacgccaucaccaccauccuggccgccgugacccugugcuucgccagcagccagaacaucaccgaggaguucuaccagagcaccugcagcgccgugagcaagggcuaccugggcgcccugagaaccggcugguacaccagcgugaucaccaucgagcugagcaacaucaaggagaacaagugcaacggcaccgacgccaaggugaagcugaucaagcaggagcuggacaaguacaagaacgccgugaccgaccugcagcugcugaugcagagcacccccgccgccggcagcggcagcgccaucugcagcggcaucgccgugugcaaggugcugcaccuggagggcgaggugaacaagaucaagaacgcccugcugagcaccaacaaggccguggugagccugagcaacggcgugagcgugcugaccuucaaggugcuggaccugaagaacuacaucgacaagcagcugcugcccauccugaacaagcagagcugcagcauccccaacaucgagaccgugaucgaguuccagcagaagaacaacagacugcuggagaucaccagagaguucagcgugaacgccggcgugaccacccccgugagcaccuacaugcugaccaacagcgagcugcugagccugaucaacgacaugcccaucaccaacgaccagaagaagcugaugagcaacaacgugcagaucgugagacagcagagcuacagcaucaugugcaucaucaaggaggaggugcuggccuacguggugcagcugccccuguacggcgugaucgacacccccugcuggaagcugcacaccagcccccugugcaccaccaacaccaaggagggcagcaacaucugccugaccagaaccgacagaggcugguacugcgacaacgccggcagcgugagcuucuucccccaggccgagaccugcaaggugcagagcaacagaguguucugcgacaccaugaacagccugacccugcccagcgaggugaaccugugcaacaucgacaucuucaaccccaaguacgacugcaagaucaugaccagcaagaccgacgugagcagcagcgugaucaccagccugggcgccaucgugagcugcuacggcaagaccaagugcaccgccagcaacaagaacagaggcaucaucaagaccuucagcaacggcugcgacuacgugagcaacaagggcguggacaccgugagcgugggcaacacccuguacugcgugaacaagcaggagggccagagccuguacgugaagggcgagcccaucaucaacuucuacgacccccugguguuccccagcgacgaguucgacgccagcaucagccaggugaacgagaagaucaaccagagccuggccuucaucagaaagagcgacgagcugcugcacaacgugaacgugggcaagagcaccaccaacaucaugaucaccaccaucaucaucgugaucaucgugauccugcugcugcugaucgccgugggccuguuccuguacugcaaggccagaugaggacuagugcaucacauuuaaaagcaucucagccuaccaugagaauaagagaaagaaaaugaagaucaauagcuuauucaucucuuuuucuuuuucguugguguaaagccaacacccugucuaaaaaacauaaauuucuuuaaucauuuugccucuuuucucugugcuucaauuaauaaaaaauggaaagaaccuagaucuaaaaaaaaaaaaaaaaaaaaaaaaaaaaaaaaaaaaaaaaaaaaaaaaaaaaaaaaaaaaaaaaugcaucccccccccccccccccccccccccccccccaaaggcucuuuucagagccaccagaauu

SEQ ID NO: 15405 - RNA, 1927 nt, Artificial Sequence
  mRNA product Design i-2 comprising derived and/or modified sequence from HRSV(Memphis-37)__AIY60640.1__F-del_DSCav1_mut2 (opt5)
ggggcgcugccuacggagguggcagccaucuccuucucggcaucaagcuuaccauggagcugcccauccucaagaccaacgccauuacaacgauccuggcugccgugacccuuugcuucgcgagcucccagaauauuacagaagaguuuuaccaaucuaccuguagcgcugucuccaaaggcuaucugggggcccucagaacaggaugguacaccucuguuaucacaauugaacugagcaacaucaaggagaauaaaugcaacggcaccgacgccaaggugaaacuuaucaagcaggaacuggauaaguauaaaaaugcugugacggaccuccagcugcugaugcaguccaccccugccgcugggucuggaagcgccauuuguuccggcaucgcggucugcaaggugcuccaccuggagggggagguuaacaaaauuaagaaugcccuucugagcacaaacaaagcuguggucucucucuccaauggagugagcguucugaccuucaaggugcuugaucugaagaacuacaucgacaaacaacuccugccgauucugaauaagcagucuuguuccauccccaacauugaaacagucaucgaguuucagcagaaaaauaaccggcuccuggaaaucacccgcgaguucagcgugaaugccggcgugacgacaccugucucuaccuauaugcuuacaaacuccgagcugcucagccugauuaacgauaugcccaucaccaaugaccaaaagaaacuuauguccaacaauguucagauugugagacagcagucuuacagcaucaugugcauuaucaaggaagaggugcuggcuuaugucgugcaacucccucuguacggcguuaucgauacccccuguuggaaacugcauacauccccucucugcacgaccaacacaaaggaagggagcaauauuugucugacccggacagaccgcggaugguacugcgauaacgccggcucuguguccuuuuucccgcaggcggagaccuguaagguccagagcaauagaguguuuugcgacacgaugaacucucuuacacugcccagcgaaguuaaucucugcaacaucgauauuuucaauccuaaauaugacuguaagaucaugaccuccaaaaccgaugugucuagcuccgucauuacaagccugggggccaucgugucuugcuacggaaagaccaaauguacagcuuccaacaagaaucggggcaucauuaagacguuuagcaacgggugcgacuaugucucuaauaaaggaguggacaccguuuccgugggcaacacacuuuacugugucaacaagcaagagggccagagccuguaugugaaaggggagcccaucauuaauuucuacgauccucucguuuuucccuccgacgaguucgaugccucuaucagccaggugaacgaaaagauuaaucagucccuggcuuuuauccgcaaaucugacgaacugcuccacaacgucaaugugggaaagagcaccacaaacauuaugaucaccacgaucauuaucgugauuaucguuauucugcuucugcucaucgccgucggccuguuccuguauugcaaggccagaugaggacuagugcaucacauuuaaaagcaucucagccuaccaugagaauaagagaaagaaaaugaagaucaauagcuuauucaucucuuuuucuuuuucguugguguaaagccaacacccugucuaaaaaacauaaauuucuuuaaucauuuugccucuuuucucugugcuucaauuaauaaaaaauggaaagaaccuagaucuaaaaaaaaaaaaaaaaaaaaaaaaaaaaaaaaaaaaaaaaaaaaaaaaaaaaaaaaaaaaaaaaugcaucccccccccccccccccccccccccccccccaaaggcucuuuucagagccaccagaauu

SEQ ID NO: 15406 - RNA, 1927 nt, Artificial Sequence
  mRNA product Design i-2 comprising derived and/or modified sequence from HRSV(Memphis-37)__AIY60640.1__F-del_DSCav1_mut2 (opt6)
ggggcgcugccuacggagguggcagccaucuccuucucggcaucaagcuuaccauggaacuaccaauacucaaaacaaacgcaauaacaacaauuuuagcugcaguaacacuuuguuucgcauccucccaaaauauaacagaagaauuuuaucaaucaaccugcucagccgucuccaaaggauaucuaggugcacuacgcacuggaugguacacaagugucaucacaauagaacuuuccaacaucaaagaaaauaaauguaauggaacugacgcaaaaguaaaacucauaaaacaagaacuagacaaauacaaaaacgcaguaacagaccuacaacuauuaaugcaaucaacaccagcagcaggauccggcagugccauaugcucuggaauagcagucugcaaaguuuuacacuuagaaggcgaaguaaacaaaaucaaaaacgcccuacuaucuacaaauaaagccgucguaucucucucaaauggaguaucaguacuaacauucaaaguauuagacuuaaaaaacuacaucgauaaacaauuauugccaauauuaaacaaacaaucuugcucaauaccaaauauagaaacagucauagaauuucaacaaaaaaauaaccgauuauuagaaauaacacgagaauuuucaguaaaugccggagucaccacaccaguaucaacauacaugcuaacaaauucagaacuauuaucauuaauaaacgacaugccuauuacaaaugaucaaaaaaaacuaauguccaacaauguacaaauaguccgacaacaaagcuacucaaucauguguauaauaaaagaagaaguacuugcauacguaguacaauuaccacuauacggaguuaucgacacaccaugcuggaaacuccacacuucaccacucugcaccacaaacacaaaagaaggcucaaacauaugccuaacaagaacagaccgaggaugguacugcgacaacgcaggaucaguaucauucuucccacaagcagaaacuugcaaaguacaaucuaacagaguuuucugugacaccaugaauagccuaacacuccccuccgaaguuaaccuauguaacauagauauauuuaaucccaaauaugauugcaaaaucaugacaucuaaaaccgacguaucaucaucuguaaucacaucacuaggugccauagucucaugcuacggcaaaacaaaaugcaccgccucaaacaaaaaccgagguauaauaaaaaccuucaguaauggaugugacuacguaucaaacaaagguguugauaccguaagcgucggcaacacccuauacugcguaaauaaacaagaaggccaaucacuauacgucaaaggcgaaccaauuauuaacuucuaugacccacucgucuuucccuccgacgaauuugacgcaagcauaucacaaguaaacgaaaaaauaaaccaaucacuagcauucauacgcaaaucagaugaacuacuacauaacguaaacguaggaaaauccacuacaaauauaaugaucacaacaauaauaaucguaauuauagucauauuauuacuacuaauagcaguaggacuuuuccuauacuguaaagcaagauaaggacuagugcaucacauuuaaaagcaucucagccuaccaugagaauaagagaaagaaaaugaagaucaauagcuuauucaucucuuuuucuuuuucguugguguaaagccaacacccugucuaaaaaacauaaauuucuuuaaucauuuugccucuuuucucugugcuucaauuaauaaaaaauggaaagaaccuagaucuaaaaaaaaaaaaaaaaaaaaaaaaaaaaaaaaaaaaaaaaaaaaaaaaaaaaaaaaaaaaaaaaugcaucccccccccccccccccccccccccccccccaaaggcucuuuucagagccaccagaauu

SEQ ID NO: 15407 - RNA, 1927 nt, Artificial Sequence
  mRNA product Design i-2 comprising derived and/or modified sequence from HRSV(Memphis-37)__AIY60640.1__F-del_DSCav1_mut2 (opt11)
ggggcgcugccuacggagguggcagccaucuccuucucggcaucaagcuuaccauggaacuucccauccucaagaccaacgcuauuacgaccauccucgccgcagucacccucugcuucgcgucaucccaaaacaucaccgaagaauuuuaccaauccacaugcuccgcagucucaaaaggcuaccuaggagcccuacgcaccggaugguacacauccgucaucacaaucgaacucuccaacauaaaagaaaacaaaugcaacggcaccgaugccaaaguaaaacugauuaaacaagaacucgacaaauacaagaacgccgucacagaccuacagcuccucaugcaaucaacucccgccgccggcagcggauccgcuaucugcucaggcaucgccguaugcaaaguccuccaccuagaaggcgaaguaaacaaaaucaagaacgcacuacucucaacaaacaaagccgucgucucccucuccaacggcgucuccguccuuaccuucaaaguccucgaccuuaagaacuacauugacaaacaacuccuacccauccucaacaaacaauccugcucuauaccuaauauagaaaccguaaucgaauuucaacagaaaaacaaccgccuccucgaaauuacccgcgaguucucaguaaacgccggcguaaccacccccgucuccaccuacaugcucacaaauucagaacuccucagccucaucaacgacaugcccauaaccaacgaccaaaagaaacucaugucaaacaacguccaaaucgucaggcaacaaagcuacagcaucaugugcaucauuaaagaagaaguacucgccuacgucgugcaacuaccccucuacggcgucauagacacacccugcuggaaacuucacacaucaccgcucugcaccacaaacaccaaagaaggcaguaacauaugccucacccgaaccgaccgcggaugguacugcgacaacgccggauccgucagcuucuucccacaagccgaaaccugcaaaguacaauccaaccgagucuucugcgacaccaugaacucucuuacgcuccccucagaagucaaccuaugcaacaucgacaucuucaaccccaaauacgacugcaaaaucaugaccuccaaaacagacgucuccuccucagugauaaccucccucggcgccauugucuccugcuacggcaaaaccaaaugcaccgccuccaacaaaaaccgugggaucaucaaaaccuucucaaacggcugcgacuacguauccaauaagggugucgacacagucuccguaggcaauacccucuauugcgucaacaaacaagaaggccaaucccucuacgucaaaggcgaaccuaucaucaacuucuacgacccgcuagucuuccccucagacgaguucgacgcauccaucucacaagucaacgaaaagaucaaccagucccucgcauucauccgaaaauccgacgaacuucuccacaacguuaacgucggcaaauccaccacuaacauaaugaucaccacgaucaucauaguaauuaucgucauacuccuccuccuaaucgcugucggacucuuccucuacugcaaggcccgcuaaggacuagugcaucacauuuaaaagcaucucagccuaccaugagaauaagagaaagaaaaugaagaucaauagcuuauucaucucuuuuucuuuuucguugguguaaagccaacacccugucuaaaaaacauaaauuucuuuaaucauuuugccucuuuucucugugcuucaauuaauaaaaaauggaaagaaccuagaucuaaaaaaaaaaaaaaaaaaaaaaaaaaaaaaaaaaaaaaaaaaaaaaaaaaaaaaaaaaaaaaaaugcaucccccccccccccccccccccccccccccccaaaggcucuuuucagagccaccagaauu

SEQ ID NO: 15408 - RNA, 1762 nt, Artificial Sequence
  mRNA product Design i-3 comprising derived and/or modified sequence from HRSV(Memphis-37)__AIY60640.1__F-del_DSCav1_mut2 (opt1)
gggagaaagcuuaccauggagcugcccauccucaagaccaacgccaucaccacgauccuggccgcggugacccugugcuucgccagcucccagaacaucaccgaggaguucuaccagagcacgugcuccgccgucagcaagggcuaccucggcgcccugcgcaccgggugguacaccagcgugaucaccaucgagcuguccaacaucaaggagaacaagugcaacggcaccgacgccaaggugaagcucaucaagcaggagcuggacaaguacaagaacgcggucacggaccugcagcuccugaugcagagcaccccggccgccggcuccgggagcgcgaucugcuccggcaucgccgucugcaaggugcugcaccucgagggcgaggugaacaagaucaagaacgcccugcuguccaccaacaaggccgucgugagccucuccaacggggugagcguccugaccuucaaggugcuggaccucaagaacuacaucgacaagcagcugcugcccauccugaacaagcagagcugcuccauccccaacaucgagaccgucaucgaguuccagcagaagaacaaccgccuccuggagaucacgcgggaguucagcgugaacgcgggcgugaccacccccgucuccaccuacaugcugacgaacagcgagcuccugucccugaucaacgacaugccgaucaccaacgaccagaagaagcucaugagcaacaacgugcagaucgugcgccagcaguccuacagcaucaugugcaucaucaaggaggagguccuggccuacguggugcagcugccccucuacggggucaucgacacccccugcuggaagcugcacaccagcccccugugcacgaccaacaccaaggagggcuccaacaucugccucacccggacggaccgcgggugguacugcgacaacgccggcagcguguccuucuucccgcaggccgagaccugcaagguccagagcaaccggguguucugcgacaccaugaacucccugacccugcccagcgaggugaaccucugcaacaucgacaucuucaaccccaaguacgacugcaagaucaugacguccaagaccgacgucagcuccagcgugaucaccucccugggcgccaucgugagcugcuacgggaagaccaagugcacggcgagcaacaagaaccgcggcaucaucaagaccuucuccaacgggugcgacuacgucagcaacaagggcguggacaccguguccgucggcaacacccuguacugcgugaacaagcaggagggccagagccucuacgugaagggggagcccaucaucaacuucuacgacccgcuggucuuccccuccgacgaguucgacgccagcaucucccaggugaacgagaagaucaaccagagccuggccuucauccggaaguccgacgagcuccugcacaacgugaacgucggcaagagcaccacgaacaucaugaucaccaccaucaucaucgugaucaucgugauccugcugcuccugaucgccgucgggcuguuccucuacugcaaggcccgcugaggacuaguuauaagacugacuagcccgaugggccucccaacgggcccuccuccccuccuugcaccgagauuaauaaaaaaaaaaaaaaaaaaaaaaaaaaaaaaaaaaaaaaaaaaaaaaaaaaaaaaaaaaaaaaaaugcaucccccccccccccccccccccccccccccccaaaggcucuuuucagagccaccagaauu

SEQ ID NO: 15409 - RNA, 1762 nt, Artificial Sequence
  mRNA product Design i-3 comprising derived and/or modified sequence from HRSV(Memphis-37)__AIY60640.1__F-del_DSCav1_mut2 (opt1)
gggagaaagcuuaccauggagcugcccauccucaagaccaacgccaucaccacgauccuggccgcggugacccugugcuucgccagcucccagaacaucaccgaggaguucuaccagagcacgugcuccgccgucagcaagggcuaccucggggcccugcgcaccggcugguacaccuccgugaucaccaucgagcugagcaacaucaaggagaacaagugcaacgggaccgacgccaaggugaagcucaucaagcaggagcuggacaaguacaagaacgcggucacggaccugcagcuccugaugcaguccaccccggccgccggcagcggguccgccaucugcagcggcaucgcggugugcaaggugcugcaccucgagggcgaggucaacaagaucaagaacgcccugcuguccaccaacaaggccguggugagccucuccaacggggucagcgugcugaccuucaaggugcuggaccucaagaacuacaucgacaagcagcugcugcccauccucaacaagcaguccugcagcauccccaacaucgagacggucaucgaguuccagcagaagaacaaccggcugcuggagaucacccgcgaguucuccgugaacgccggcgugaccacccccgucagcacguacaugcucaccaacuccgagcugcugagccucaucaacgacaugccgaucaccaacgaccagaagaagcugaugagcaacaacgugcagaucgugcggcagcaguccuacagcaucaugugcaucaucaaggaggagguccuggccuacguggugcagcucccccuguacggggucaucgacacccccugcuggaagcugcacacgagcccccucugcaccaccaacaccaaggagggcuccaacaucugccugacgcgcaccgaccgggggugguacugcgacaacgcgggcuccgugagcuucuucccgcaggccgagaccugcaaggugcaguccaaccgcgucuucugcgacaccaugaacagccugacgcuccccuccgaggugaaccugugcaacaucgacaucuucaaccccaaguacgacugcaagaucaugaccagcaagaccgacgucuccagcuccgugaucaccagccugggcgccaucguguccugcuacgggaagacgaagugcaccgccagcaacaagaaccggggcaucaucaagaccuucuccaacgggugcgacuacgucagcaacaagggcguggacaccguguccgucggcaacacgcucuacugcgugaacaagcaggaggggcagagccuguacgugaagggcgagcccaucaucaacuucuacgacccgcuggucuuccccagcgacgaguucgacgccuccaucagccaggugaacgagaagaucaaccagucccucgcguucauccgcaagagcgacgagcugcugcacaacgugaacgucgggaaguccaccaccaacaucaugaucaccaccaucaucaucgugaucaucgugauccuccugcugcucaucgccgucggccuguuccuguacugcaaggcccggugaggacuaguuauaagacugacuagcccgaugggccucccaacgggcccuccuccccuccuugcaccgagauuaauaaaaaaaaaaaaaaaaaaaaaaaaaaaaaaaaaaaaaaaaaaaaaaaaaaaaaaaaaaaaaaaaugcaucccccccccccccccccccccccccccccccaaaggcucuuuucagagccaccagaauu

SEQ ID NO: 15410 - RNA, 1762 nt, Artificial Sequence
  mRNA product Design i-3 comprising derived and/or modified sequence from HRSV(Memphis-37)__AIY60640.1__F-del_DSCav1_mut2 (opt2)
gggagaaagcuuaccauggagcuccccauccucaagaccaacgccaucaccaccauccucgccgccgucacccucugcuucgccuccucccagaacaucaccgaggaguucuaccaguccaccugcuccgccgucuccaagggcuaccucggcgcccuccgcaccggcugguacaccuccgucaucaccaucgagcucuccaacaucaaggagaacaagugcaacggcaccgacgccaaggucaagcucaucaagcaggagcucgacaaguacaagaacgccgucaccgaccuccagcuccucaugcaguccacccccgccgccggcuccggcuccgccaucugcuccggcaucgccgucugcaagguccuccaccucgagggcgaggucaacaagaucaagaacgcccuccucuccaccaacaaggccgucgucucccucuccaacggcgucuccguccucaccuucaagguccucgaccucaagaacuacaucgacaagcagcuccuccccauccucaacaagcaguccugcuccauccccaacaucgagaccgucaucgaguuccagcagaagaacaaccgccuccucgagaucacccgcgaguucuccgucaacgccggcgucaccacccccgucuccaccuacaugcucaccaacuccgagcuccucucccucaucaacgacaugcccaucaccaacgaccagaagaagcucauguccaacaacguccagaucguccgccagcaguccuacuccaucaugugcaucaucaaggaggagguccucgccuacgucguccagcucccccucuacggcgucaucgacacccccugcuggaagcuccacaccuccccccucugcaccaccaacaccaaggagggcuccaacaucugccucacccgcaccgaccgcggcugguacugcgacaacgccggcuccgucuccuucuucccccaggccgagaccugcaagguccaguccaaccgcgucuucugcgacaccaugaacucccucacccuccccuccgaggucaaccucugcaacaucgacaucuucaaccccaaguacgacugcaagaucaugaccuccaagaccgacgucuccuccuccgucaucaccucccucggcgccaucgucuccugcuacggcaagaccaagugcaccgccuccaacaagaaccgcggcaucaucaagaccuucuccaacggcugcgacuacgucuccaacaagggcgucgacaccgucuccgucggcaacacccucuacugcgucaacaagcaggagggccagucccucuacgucaagggcgagcccaucaucaacuucuacgacccccucgucuuccccuccgacgaguucgacgccuccaucucccaggucaacgagaagaucaaccagucccucgccuucauccgcaaguccgacgagcuccuccacaacgucaacgucggcaaguccaccaccaacaucaugaucaccaccaucaucaucgucaucaucgucauccuccuccuccucaucgccgucggccucuuccucuacugcaaggcccgcugaggacuaguuauaagacugacuagcccgaugggccucccaacgggcccuccuccccuccuugcaccgagauuaauaaaaaaaaaaaaaaaaaaaaaaaaaaaaaaaaaaaaaaaaaaaaaaaaaaaaaaaaaaaaaaaaugcaucccccccccccccccccccccccccccccccaaaggcucuuuucagagccaccagaauu

SEQ ID NO: 15411 - RNA, 1762 nt, Artificial Sequence
  mRNA product Design i-3 comprising derived and/or modified sequence from HRSV(Memphis-37)__AIY60640.1__F-del_DSCav1_mut2 (opt3)
gggagaaagcuuaccauggagcugcccauccucaagaccaacgccauuacaacuauacuugcugcagugacgcugugcuucgccagcucccagaauaucaccgaagaguuuuaccaaucuacauguucagcggucaguaaaggcuauuugggggcuuuaagaacuggaugguacaccagcguuauuacaaucgaacuguccaacauuaaggagaauaaaugcaacgguaccgacgccaaggugaaacuaaucaagcaggaacucgauaaguauaaaaaugcaguaacugaccugcagcuucugaugcagucuacuccugccgcuggcucggggucagcaauauguagcggaaucgccgugugcaaggucuugcaccucgagggcgaggugaacaaaauuaagaaugcucugcugaguaccaacaaagccguugugucccucucuaauggugucagcguguuaacguucaagguacuggaucuuaagaacuacaucgacaaacaauugcugccaauucuaaauaagcaguccuguucaaucccgaacauagaaacuguuauugaguuucagcagaaaaauaacaggcuccuggaaaucacccgggaguucagugugaaugcgggggucacaacucccgugagcaccuauaugcuuacaaacucugagcuguugucccucauuaacgauaugccuaucaccaaugaccaaaagaaacugaugucaaacaaugugcagaucguccgccagcagagcuacaguauuaugugcauaaucaaggaagagguuuuagcauaugugguacaacugccacucuacggagugauugauacgcccuguuggaaacuucauacuucuccucugugcacaaccaacacuaaggaaggcuccaauaucuguuugacacgaaccgaccguggcugguacugcgauaacgccgggagcgucucguuuuucccacaggcugagacguguaaggugcagucuaauagaguuuucugcgacaccaugaacucccuaacacugcccucagaagugaaucucugcaacauagauauuuucaauccuaaauaugacuguaagaucaugacaaguaaaaccgaugucagcuccucugugaucacaagccugggagccauuguaucaugcuacgguaagacuaaauguaccgcaaguaacaagaauaggggcaucauuaagacauuuuccaacgggugcgacuauguuagcaauaaaggaguggacaccgucucugugggcaacacucuuuacugugucaacaagcaagagggucagucacuguaugugaaaggggagccaauaaucaauuucuacgauccguugguuuuucccagugacgaauuugaugcuagcauuucccaggugaacgagaagaucaaucagucucucgccuuuauccggaaaucggacgaacuguuacacaacguaaaugucggaaagagcacgacaaacauuaugauaaccacuaucauuaucgugauuaucguuauacugcuacuccugaucgcggugggccuuuucuuguauugcaaggcccgcugaggacuaguuauaagacugacuagcccgaugggccucccaacgggcccuccuccccuccuugcaccgagauuaauaaaaaaaaaaaaaaaaaaaaaaaaaaaaaaaaaaaaaaaaaaaaaaaaaaaaaaaaaaaaaaaaugcaucccccccccccccccccccccccccccccccaaaggcucuuuucagagccaccagaauu

SEQ ID NO: 15412 - RNA, 1762 nt, Artificial Sequence
  mRNA product Design i-3 comprising derived and/or modified sequence from HRSV(Memphis-37)__AIY60640.1__F-del_DSCav1_mut2 (opt4)
gggagaaagcuuaccauggagcugcccauccugaagaccaacgccaucaccaccauccuggccgccgugacccugugcuucgccagcagccagaacaucaccgaggaguucuaccagagcaccugcagcgccgugagcaagggcuaccugggcgcccugagaaccggcugguacaccagcgugaucaccaucgagcugagcaacaucaaggagaacaagugcaacggcaccgacgccaaggugaagcugaucaagcaggagcuggacaaguacaagaacgccgugaccgaccugcagcugcugaugcagagcacccccgccgccggcagcggcagcgccaucugcagcggcaucgccgugugcaaggugcugcaccuggagggcgaggugaacaagaucaagaacgcccugcugagcaccaacaaggccguggugagccugagcaacggcgugagcgugcugaccuucaaggugcuggaccugaagaacuacaucgacaagcagcugcugcccauccugaacaagcagagcugcagcauccccaacaucgagaccgugaucgaguuccagcagaagaacaacagacugcuggagaucaccagagaguucagcgugaacgccggcgugaccacccccgugagcaccuacaugcugaccaacagcgagcugcugagccugaucaacgacaugcccaucaccaacgaccagaagaagcugaugagcaacaacgugcagaucgugagacagcagagcuacagcaucaugugcaucaucaaggaggaggugcuggccuacguggugcagcugccccuguacggcgugaucgacacccccugcuggaagcugcacaccagcccccugugcaccaccaacaccaaggagggcagcaacaucugccugaccagaaccgacagaggcugguacugcgacaacgccggcagcgugagcuucuucccccaggccgagaccugcaaggugcagagcaacagaguguucugcgacaccaugaacagccugacccugcccagcgaggugaaccugugcaacaucgacaucuucaaccccaaguacgacugcaagaucaugaccagcaagaccgacgugagcagcagcgugaucaccagccugggcgccaucgugagcugcuacggcaagaccaagugcaccgccagcaacaagaacagaggcaucaucaagaccuucagcaacggcugcgacuacgugagcaacaagggcguggacaccgugagcgugggcaacacccuguacugcgugaacaagcaggagggccagagccuguacgugaagggcgagcccaucaucaacuucuacgacccccugguguuccccagcgacgaguucgacgccagcaucagccaggugaacgagaagaucaaccagagccuggccuucaucagaaagagcgacgagcugcugcacaacgugaacgugggcaagagcaccaccaacaucaugaucaccaccaucaucaucgugaucaucgugauccugcugcugcugaucgccgugggccuguuccuguacugcaaggccagaugaggacuaguuauaagacugacuagcccgaugggccucccaacgggcccuccuccccuccuugcaccgagauuaauaaaaaaaaaaaaaaaaaaaaaaaaaaaaaaaaaaaaaaaaaaaaaaaaaaaaaaaaaaaaaaaaugcaucccccccccccccccccccccccccccccccaaaggcucuuuucagagccaccagaauu

SEQ ID NO: 15413 - RNA, 1762 nt, Artificial Sequence
  mRNA product Design i-3 comprising derived and/or modified sequence from HRSV(Memphis-37)__AIY60640.1__F-del_DSCav1_mut2 (opt5)
gggagaaagcuuaccauggagcugcccauccucaagaccaacgccauuacaacgauccuggcugccgugacccuuugcuucgcgagcucccagaauauuacagaagaguuuuaccaaucuaccuguagcgcugucuccaaaggcuaucugggggcccucagaacaggaugguacaccucuguuaucacaauugaacugagcaacaucaaggagaauaaaugcaacggcaccgacgccaaggugaaacuuaucaagcaggaacuggauaaguauaaaaaugcugugacggaccuccagcugcugaugcaguccaccccugccgcugggucuggaagcgccauuuguuccggcaucgcggucugcaaggugcuccaccuggagggggagguuaacaaaauuaagaaugcccuucugagcacaaacaaagcuguggucucucucuccaauggagugagcguucugaccuucaaggugcuugaucugaagaacuacaucgacaaacaacuccugccgauucugaauaagcagucuuguuccauccccaacauugaaacagucaucgaguuucagcagaaaaauaaccggcuccuggaaaucacccgcgaguucagcgugaaugccggcgugacgacaccugucucuaccuauaugcuuacaaacuccgagcugcucagccugauuaacgauaugcccaucaccaaugaccaaaagaaacuuauguccaacaauguucagauugugagacagcagucuuacagcaucaugugcauuaucaaggaagaggugcuggcuuaugucgugcaacucccucuguacggcguuaucgauacccccuguuggaaacugcauacauccccucucugcacgaccaacacaaaggaagggagcaauauuugucugacccggacagaccgcggaugguacugcgauaacgccggcucuguguccuuuuucccgcaggcggagaccuguaagguccagagcaauagaguguuuugcgacacgaugaacucucuuacacugcccagcgaaguuaaucucugcaacaucgauauuuucaauccuaaauaugacuguaagaucaugaccuccaaaaccgaugugucuagcuccgucauuacaagccugggggccaucgugucuugcuacggaaagaccaaauguacagcuuccaacaagaaucggggcaucauuaagacguuuagcaacgggugcgacuaugucucuaauaaaggaguggacaccguuuccgugggcaacacacuuuacugugucaacaagcaagagggccagagccuguaugugaaaggggagcccaucauuaauuucuacgauccucucguuuuucccuccgacgaguucgaugccucuaucagccaggugaacgaaaagauuaaucagucccuggcuuuuauccgcaaaucugacgaacugcuccacaacgucaaugugggaaagagcaccacaaacauuaugaucaccacgaucauuaucgugauuaucguuauucugcuucugcucaucgccgucggccuguuccuguauugcaaggccagaugaggacuaguuauaagacugacuagcccgaugggccucccaacgggcccuccuccccuccuugcaccgagauuaauaaaaaaaaaaaaaaaaaaaaaaaaaaaaaaaaaaaaaaaaaaaaaaaaaaaaaaaaaaaaaaaaugcaucccccccccccccccccccccccccccccccaaaggcucuuuucagagccaccagaauu

SEQ ID NO: 15414 - RNA, 1762 nt, Artificial Sequence
  mRNA product Design i-3 comprising derived and/or modified sequence from HRSV(Memphis-37)__AIY60640.1__F-del_DSCav1_mut2 (opt6)
gggagaaagcuuaccauggaacuaccaauacucaaaacaaacgcaauaacaacaauuuuagcugcaguaacacuuuguuucgcauccucccaaaauauaacagaagaauuuuaucaaucaaccugcucagccgucuccaaaggauaucuaggugcacuacgcacuggaugguacacaagugucaucacaauagaacuuuccaacaucaaagaaaauaaauguaauggaacugacgcaaaaguaaaacucauaaaacaagaacuagacaaauacaaaaacgcaguaacagaccuacaacuauuaaugcaaucaacaccagcagcaggauccggcagugccauaugcucuggaauagcagucugcaaaguuuuacacuuagaaggcgaaguaaacaaaaucaaaaacgcccuacuaucuacaaauaaagccgucguaucucucucaaauggaguaucaguacuaacauucaaaguauuagacuuaaaaaacuacaucgauaaacaauuauugccaauauuaaacaaacaaucuugcucaauaccaaauauagaaacagucauagaauuucaacaaaaaaauaaccgauuauuagaaauaacacgagaauuuucaguaaaugccggagucaccacaccaguaucaacauacaugcuaacaaauucagaacuauuaucauuaauaaacgacaugccuauuacaaaugaucaaaaaaaacuaauguccaacaauguacaaauaguccgacaacaaagcuacucaaucauguguauaauaaaagaagaaguacuugcauacguaguacaauuaccacuauacggaguuaucgacacaccaugcuggaaacuccacacuucaccacucugcaccacaaacacaaaagaaggcucaaacauaugccuaacaagaacagaccgaggaugguacugcgacaacgcaggaucaguaucauucuucccacaagcagaaacuugcaaaguacaaucuaacagaguuuucugugacaccaugaauagccuaacacuccccuccgaaguuaaccuauguaacauagauauauuuaaucccaaauaugauugcaaaaucaugacaucuaaaaccgacguaucaucaucuguaaucacaucacuaggugccauagucucaugcuacggcaaaacaaaaugcaccgccucaaacaaaaaccgagguauaauaaaaaccuucaguaauggaugugacuacguaucaaacaaagguguugauaccguaagcgucggcaacacccuauacugcguaaauaaacaagaaggccaaucacuauacgucaaaggcgaaccaauuauuaacuucuaugacccacucgucuuucccuccgacgaauuugacgcaagcauaucacaaguaaacgaaaaaauaaaccaaucacuagcauucauacgcaaaucagaugaacuacuacauaacguaaacguaggaaaauccacuacaaauauaaugaucacaacaauaauaaucguaauuauagucauauuauuacuacuaauagcaguaggacuuuuccuauacuguaaagcaagauaaggacuaguuauaagacugacuagcccgaugggccucccaacgggcccuccuccccuccuugcaccgagauuaauaaaaaaaaaaaaaaaaaaaaaaaaaaaaaaaaaaaaaaaaaaaaaaaaaaaaaaaaaaaaaaaaugcaucccccccccccccccccccccccccccccccaaaggcucuuuucagagccaccagaauu

SEQ ID NO: 15415 - RNA, 1762 nt, Artificial Sequence
  mRNA product Design i-3 comprising derived and/or modified sequence from HRSV(Memphis-37)__AIY60640.1__F-del_DSCav1_mut2 (opt11)
gggagaaagcuuaccauggaacuucccauccucaagaccaacgcuauuacgaccauccucgccgcagucacccucugcuucgcgucaucccaaaacaucaccgaagaauuuuaccaauccacaugcuccgcagucucaaaaggcuaccuaggagcccuacgcaccggaugguacacauccgucaucacaaucgaacucuccaacauaaaagaaaacaaaugcaacggcaccgaugccaaaguaaaacugauuaaacaagaacucgacaaauacaagaacgccgucacagaccuacagcuccucaugcaaucaacucccgccgccggcagcggauccgcuaucugcucaggcaucgccguaugcaaaguccuccaccuagaaggcgaaguaaacaaaaucaagaacgcacuacucucaacaaacaaagccgucgucucccucuccaacggcgucuccguccuuaccuucaaaguccucgaccuuaagaacuacauugacaaacaacuccuacccauccucaacaaacaauccugcucuauaccuaauauagaaaccguaaucgaauuucaacagaaaaacaaccgccuccucgaaauuacccgcgaguucucaguaaacgccggcguaaccacccccgucuccaccuacaugcucacaaauucagaacuccucagccucaucaacgacaugcccauaaccaacgaccaaaagaaacucaugucaaacaacguccaaaucgucaggcaacaaagcuacagcaucaugugcaucauuaaagaagaaguacucgccuacgucgugcaacuaccccucuacggcgucauagacacacccugcuggaaacuucacacaucaccgcucugcaccacaaacaccaaagaaggcaguaacauaugccucacccgaaccgaccgcggaugguacugcgacaacgccggauccgucagcuucuucccacaagccgaaaccugcaaaguacaauccaaccgagucuucugcgacaccaugaacucucuuacgcuccccucagaagucaaccuaugcaacaucgacaucuucaaccccaaauacgacugcaaaaucaugaccuccaaaacagacgucuccuccucagugauaaccucccucggcgccauugucuccugcuacggcaaaaccaaaugcaccgccuccaacaaaaaccgugggaucaucaaaaccuucucaaacggcugcgacuacguauccaauaagggugucgacacagucuccguaggcaauacccucuauugcgucaacaaacaagaaggccaaucccucuacgucaaaggcgaaccuaucaucaacuucuacgacccgcuagucuuccccucagacgaguucgacgcauccaucucacaagucaacgaaaagaucaaccagucccucgcauucauccgaaaauccgacgaacuucuccacaacguuaacgucggcaaauccaccacuaacauaaugaucaccacgaucaucauaguaauuaucgucauacuccuccuccuaaucgcugucggacucuuccucuacugcaaggcccgcuaaggacuaguuauaagacugacuagcccgaugggccucccaacgggcccuccuccccuccuugcaccgagauuaauaaaaaaaaaaaaaaaaaaaaaaaaaaaaaaaaaaaaaaaaaaaaaaaaaaaaaaaaaaaaaaaaugcaucccccccccccccccccccccccccccccccaaaggcucuuuucagagccaccagaauu

SEQ ID NO: 15416 - protein, 535 aa, Artificial Sequence
  derived and/or modified protein sequence (artificial) from HRSV(Memphis-37)__AIY60640.1__F_DSCav1_mut3
MELPILKTNAITTILAAVTLCFASSQNITEEFYQSTCSAVSKGYLGALRTGWYTSVITIELSNIKEIKCNGTDAKVKLIKQELDKYKNAVTDLQLLMQSTPAAGSGSAICSGIAVCKVLHLEGEVNKIKNALLSTNKAVVSLSNGVSVLTFKVLDLKNYIDKQLLPILNKQSCSIPNIETVIEFQQKNNRLLEITREFSVNAGVTTPVSTYMLTNSELLSLINDMPITNDQKKLMSNNVQIVRQQSYSIMCIIKEEVLAYVVQLPLYGVIDTPCWKLHTSPLCTTNTKEGSNICLTRTDRGWYCDNAGSVSFFPQAETCKVQSNRVFCDTMNSLTLPSEVNLCNIDIFNPKYDCKIMTSKTDVSSSVITSLGAIVSCYGKTKCTASNKNRGIIKTFSNGCDYVSNKGVDTVSVGNTLYCVNKQEGQSLYVKGEPIINFYDPLVFPSDEFDASISQVNEKINQSLAFIRKSDELLHNVNVGKSTTNIMITTIIIVIIVILLLLIAVGLFLYCKARSTPVTLSKDQLSGINNIAFSN

SEQ ID NO: 15417 - RNA, 1608 nt, Artificial Sequence
  derived and/or modified CDS sequence (opt1) from HRSV(Memphis-37)__AIY60640.1__F_DSCav1_mut3
auggagcugcccauccucaagaccaacgccaucaccacgauccuggccgcggugacccugugcuucgccagcucccagaacaucaccgaggaguucuaccagagcacgugcuccgccgucagcaagggcuaccucggcgcccugcgcaccgggugguacaccagcgugaucaccaucgagcuguccaacaucaaggagaucaagugcaacggcaccgacgccaaggugaagcucaucaagcaggagcuggacaaguacaagaacgcggucacggaccugcagcuccugaugcagagcaccccggccgccggcuccgggagcgcgaucugcuccggcaucgccgucugcaaggugcugcaccucgagggcgaggugaacaagaucaagaacgcccugcuguccaccaacaaggccgucgugagccucuccaacggggugagcguccugaccuucaaggugcuggaccucaagaacuacaucgacaagcagcugcugcccauccugaacaagcagagcugcuccauccccaacaucgagaccgucaucgaguuccagcagaagaacaaccgccuccuggagaucacgcgggaguucagcgugaacgcgggcgugaccacccccgucuccaccuacaugcugacgaacagcgagcuccugucccugaucaacgacaugccgaucaccaacgaccagaagaagcucaugagcaacaacgugcagaucgugcgccagcaguccuacagcaucaugugcaucaucaaggaggagguccuggccuacguggugcagcugccccucuacggggucaucgacacccccugcuggaagcugcacaccagcccccugugcacgaccaacaccaaggagggcuccaacaucugccucacccggacggaccgcgggugguacugcgacaacgccggcagcguguccuucuucccgcaggccgagaccugcaagguccagagcaaccggguguucugcgacaccaugaacucccugacccugcccagcgaggugaaccucugcaacaucgacaucuucaaccccaaguacgacugcaagaucaugacguccaagaccgacgucagcuccagcgugaucaccucccugggcgccaucgugagcugcuacgggaagaccaagugcacggcgagcaacaagaaccgcggcaucaucaagaccuucuccaacgggugcgacuacgucagcaacaagggcguggacaccguguccgucggcaacacccuguacugcgugaacaagcaggagggccagagccucuacgugaagggggagcccaucaucaacuucuacgacccgcuggucuuccccuccgacgaguucgacgccagcaucucccaggugaacgagaagaucaaccagagccuggccuucauccggaaguccgacgagcuccugcacaacgugaacgucggcaagagcaccacgaacaucaugaucaccaccaucaucaucgugaucaucgugauccugcugcuccugaucgccgucgggcuguuccucuacugcaaggcccgcuccacccccgugacgcugagcaaggaccagcuguccgggaucaacaacaucgcguucagcaacuga

SEQ ID NO: 15418 - RNA, 1608 nt, Artificial Sequence
  derived and/or modified CDS sequence (opt1) from HRSV(Memphis-37)__AIY60640.1__F_DSCav1_mut3
auggagcugcccauccucaagaccaacgccaucaccacgauccuggccgcggugacccugugcuucgccagcucccagaacaucaccgaggaguucuaccagagcacgugcuccgccgucagcaagggcuaccucggggcccugcgcaccggcugguacaccuccgugaucaccaucgagcugagcaacaucaaggagaucaagugcaacgggaccgacgccaaggugaagcucaucaagcaggagcuggacaaguacaagaacgcggucacggaccugcagcuccugaugcaguccaccccggccgccggcagcggguccgccaucugcagcggcaucgcggugugcaaggugcugcaccucgagggcgaggucaacaagaucaagaacgcccugcuguccaccaacaaggccguggugagccucuccaacggggucagcgugcugaccuucaaggugcuggaccucaagaacuacaucgacaagcagcugcugcccauccucaacaagcaguccugcagcauccccaacaucgagacggucaucgaguuccagcagaagaacaaccggcugcuggagaucacccgcgaguucuccgugaacgccggcgugaccacccccgucagcacguacaugcucaccaacuccgagcugcugagccucaucaacgacaugccgaucaccaacgaccagaagaagcugaugagcaacaacgugcagaucgugcggcagcaguccuacagcaucaugugcaucaucaaggaggagguccuggccuacguggugcagcucccccuguacggggucaucgacacccccugcuggaagcugcacacgagcccccucugcaccaccaacaccaaggagggcuccaacaucugccugacgcgcaccgaccgggggugguacugcgacaacgcgggcuccgugagcuucuucccgcaggccgagaccugcaaggugcaguccaaccgcgucuucugcgacaccaugaacagccugacgcuccccuccgaggugaaccugugcaacaucgacaucuucaaccccaaguacgacugcaagaucaugaccagcaagaccgacgucuccagcuccgugaucaccagccugggcgccaucguguccugcuacgggaagacgaagugcaccgccagcaacaagaaccggggcaucaucaagaccuucuccaacgggugcgacuacgucagcaacaagggcguggacaccguguccgucggcaacacgcucuacugcgugaacaagcaggaggggcagagccuguacgugaagggcgagcccaucaucaacuucuacgacccgcuggucuuccccagcgacgaguucgacgccuccaucagccaggugaacgagaagaucaaccagucccucgcguucauccgcaagagcgacgagcugcugcacaacgugaacgucgggaaguccaccaccaacaucaugaucaccaccaucaucaucgugaucaucgugauccuccugcugcucaucgccgucggccuguuccuguacugcaaggcccggagcacgcccgugacccuguccaaggaccagcucagcgggaucaacaacaucgccuucuccaacuga

SEQ ID NO: 15419 - RNA, 1608 nt, Artificial Sequence
  derived and/or modified CDS sequence (opt2) from HRSV(Memphis-37)__AIY60640.1__F_DSCav1_mut3
auggagcuccccauccucaagaccaacgccaucaccaccauccucgccgccgucacccucugcuucgccuccucccagaacaucaccgaggaguucuaccaguccaccugcuccgccgucuccaagggcuaccucggcgcccuccgcaccggcugguacaccuccgucaucaccaucgagcucuccaacaucaaggagaucaagugcaacggcaccgacgccaaggucaagcucaucaagcaggagcucgacaaguacaagaacgccgucaccgaccuccagcuccucaugcaguccacccccgccgccggcuccggcuccgccaucugcuccggcaucgccgucugcaagguccuccaccucgagggcgaggucaacaagaucaagaacgcccuccucuccaccaacaaggccgucgucucccucuccaacggcgucuccguccucaccuucaagguccucgaccucaagaacuacaucgacaagcagcuccuccccauccucaacaagcaguccugcuccauccccaacaucgagaccgucaucgaguuccagcagaagaacaaccgccuccucgagaucacccgcgaguucuccgucaacgccggcgucaccacccccgucuccaccuacaugcucaccaacuccgagcuccucucccucaucaacgacaugcccaucaccaacgaccagaagaagcucauguccaacaacguccagaucguccgccagcaguccuacuccaucaugugcaucaucaaggaggagguccucgccuacgucguccagcucccccucuacggcgucaucgacacccccugcuggaagcuccacaccuccccccucugcaccaccaacaccaaggagggcuccaacaucugccucacccgcaccgaccgcggcugguacugcgacaacgccggcuccgucuccuucuucccccaggccgagaccugcaagguccaguccaaccgcgucuucugcgacaccaugaacucccucacccuccccuccgaggucaaccucugcaacaucgacaucuucaaccccaaguacgacugcaagaucaugaccuccaagaccgacgucuccuccuccgucaucaccucccucggcgccaucgucuccugcuacggcaagaccaagugcaccgccuccaacaagaaccgcggcaucaucaagaccuucuccaacggcugcgacuacgucuccaacaagggcgucgacaccgucuccgucggcaacacccucuacugcgucaacaagcaggagggccagucccucuacgucaagggcgagcccaucaucaacuucuacgacccccucgucuuccccuccgacgaguucgacgccuccaucucccaggucaacgagaagaucaaccagucccucgccuucauccgcaaguccgacgagcuccuccacaacgucaacgucggcaaguccaccaccaacaucaugaucaccaccaucaucaucgucaucaucgucauccuccuccuccucaucgccgucggccucuuccucuacugcaaggcccgcuccacccccgucacccucuccaaggaccagcucuccggcaucaacaacaucgccuucuccaacuga

SEQ ID NO: 15420 - RNA, 1608 nt, Artificial Sequence
  derived and/or modified CDS sequence (opt3) from HRSV(Memphis-37)__AIY60640.1__F_DSCav1_mut3
auggagcugcccauccucaagaccaacgccauuacaacuauacuugcugcagugacgcugugcuucgccagcucccagaauaucaccgaagaguuuuaccaaucuacauguucagcggucaguaaaggcuauuugggggcuuuaagaacuggaugguacaccagcguuauuacaaucgaacuguccaacauuaaggagaucaaaugcaaugguaccgacgccaaggugaaacuaauaaagcaggaacucgauaaguauaaaaacgcaguaacugaccugcagcuucugaugcagucuacuccugccgcuggcucggggucagcaaucuguagcggaauugccgugugcaaggucuugcaccucgagggcgaggugaauaaaaucaagaacgcucugcugaguaccaauaaagccguugugucccucucuaacggugucagcguguuaacguucaagguacuggaucuuaagaauuacauugacaaacaauugcugccaauccuaaacaagcaguccuguucaauaccgaauauugaaacuguuaucgaguuucagcagaaaaacaauaggcuccuggaaauuacccgggaguucagugugaacgcgggggucacaacucccgugagcaccuauaugcuuacaaauucugagcuguugucccucaucaacgauaugccuaucaccaacgaccaaaagaaacugaugucaaauaacgugcagauuguccgccagcagagcuacaguauaaugugcaucauuaaggaagagguuuuagcauaugugguacaacugccacucuacggagugaucgauacgcccuguuggaaacuucauacuucuccucugugcacaaccaauacuaaggaaggcuccaacauauguuugacacgaaccgaccguggcugguacugcgauaaugccgggagcgucucguuuuucccacaggcugagacguguaaggugcagucuaacagaguuuucugcgacaccaugaacucccuaacacugcccucagaagugaaucucugcaauauugauaucuucaacccuaaauaugacuguaagaucaugacaaguaaaaccgaugucagcuccucugugauuacaagccugggagccaucguaucaugcuacgguaagacuaaauguaccgcaaguaauaagaacaggggcauuauaaagacauuuuccaaugggugcgacuauguuagcaacaaaggaguggacaccgucucugugggcaauacucuuuacugugucaacaagcaagagggucagucacuguaugugaaaggggagccaaucauuaacuucuacgauccguugguuuuucccagugacgaauuugaugcuagcaucucccaggugaaugagaagaucaaccagucucucgccuuuauucggaaaucggacgaacuguuacacaauguaaacgucggaaagagcacgacaaauauaaugaucaccacuauuaucauugugaucauaguuauccugcuacuccugauugcggugggccuuuucuuguauugcaaggcccgcuccaccccugucacacugucaaaagaucaacucaguggcaucaacaauauugcauucucuaacuga

SEQ ID NO: 15421 - RNA, 1608 nt, Artificial Sequence
  derived and/or modified CDS sequence (opt4) from HRSV(Memphis-37)__AIY60640.1__F_DSCav1_mut3
auggagcugcccauccugaagaccaacgccaucaccaccauccuggccgccgugacccugugcuucgccagcagccagaacaucaccgaggaguucuaccagagcaccugcagcgccgugagcaagggcuaccugggcgcccugagaaccggcugguacaccagcgugaucaccaucgagcugagcaacaucaaggagaucaagugcaacggcaccgacgccaaggugaagcugaucaagcaggagcuggacaaguacaagaacgccgugaccgaccugcagcugcugaugcagagcacccccgccgccggcagcggcagcgccaucugcagcggcaucgccgugugcaaggugcugcaccuggagggcgaggugaacaagaucaagaacgcccugcugagcaccaacaaggccguggugagccugagcaacggcgugagcgugcugaccuucaaggugcuggaccugaagaacuacaucgacaagcagcugcugcccauccugaacaagcagagcugcagcauccccaacaucgagaccgugaucgaguuccagcagaagaacaacagacugcuggagaucaccagagaguucagcgugaacgccggcgugaccacccccgugagcaccuacaugcugaccaacagcgagcugcugagccugaucaacgacaugcccaucaccaacgaccagaagaagcugaugagcaacaacgugcagaucgugagacagcagagcuacagcaucaugugcaucaucaaggaggaggugcuggccuacguggugcagcugccccuguacggcgugaucgacacccccugcuggaagcugcacaccagcccccugugcaccaccaacaccaaggagggcagcaacaucugccugaccagaaccgacagaggcugguacugcgacaacgccggcagcgugagcuucuucccccaggccgagaccugcaaggugcagagcaacagaguguucugcgacaccaugaacagccugacccugcccagcgaggugaaccugugcaacaucgacaucuucaaccccaaguacgacugcaagaucaugaccagcaagaccgacgugagcagcagcgugaucaccagccugggcgccaucgugagcugcuacggcaagaccaagugcaccgccagcaacaagaacagaggcaucaucaagaccuucagcaacggcugcgacuacgugagcaacaagggcguggacaccgugagcgugggcaacacccuguacugcgugaacaagcaggagggccagagccuguacgugaagggcgagcccaucaucaacuucuacgacccccugguguuccccagcgacgaguucgacgccagcaucagccaggugaacgagaagaucaaccagagccuggccuucaucagaaagagcgacgagcugcugcacaacgugaacgugggcaagagcaccaccaacaucaugaucaccaccaucaucaucgugaucaucgugauccugcugcugcugaucgccgugggccuguuccuguacugcaaggccagaagcacccccgugacccugagcaaggaccagcugagcggcaucaacaacaucgccuucagcaacuga

SEQ ID NO: 15422 - RNA, 1608 nt, Artificial Sequence
  derived and/or modified CDS sequence (opt5) from HRSV(Memphis-37)__AIY60640.1__F_DSCav1_mut3
auggagcugcccauccucaagaccaacgccauuacaacgauccuggcugccgugacccuuugcuucgcgagcucccagaauauuacagaagaguuuuaccaaucuaccuguagcgcugucuccaaaggcuaucugggggcccucagaacaggaugguacaccucuguuaucacaauugaacugagcaacaucaaggagaucaaaugcaauggcaccgacgccaaggugaaacuuauuaagcaggaacuggauaaguauaaaaacgcugugacggaccuccagcugcugaugcaguccaccccugccgcugggucuggaagcgccaucuguuccggcauugcggucugcaaggugcuccaccuggagggggagguuaauaaaaucaagaacgcccuucugagcacaaauaaagcuguggucucucucuccaacggagugagcguucugaccuucaaggugcuugaucugaagaauuacauugacaaacaacuccugccgauccugaacaagcagucuuguuccauucccaauaucgaaacagucaucgaguuucagcagaaaaacaaucggcuccuggaaauuacccgcgaguucagcgugaacgccggcgugacgacaccugucucuaccuauaugcuuacaaauuccgagcugcucagccugaucaacgauaugcccauuaccaacgaccaaaagaaacuuauguccaauaacguucagaucgugagacagcagucuuacagcauuaugugcaucaucaaggaagaggugcuggcuuaugucgugcaacucccucuguacggcguuauugauacccccuguuggaaacugcauacauccccucucugcacgaccaauacaaaggaagggagcaacaucugucugacccggacagaccgcggaugguacugcgauaaugccggcucuguguccuuuuucccgcaggcggagaccuguaagguccagagcaacagaguguuuugcgacacgaugaacucucuuacacugcccagcgaaguuaaucucugcaauauugauaucuucaacccuaaauaugacuguaagauuaugaccuccaaaaccgaugugucuagcuccgucaucacaagccugggggccaucgugucuugcuacggaaagaccaaauguacagcuuccaauaagaaccggggcauuaucaagacguuuagcaaugggugcgacuaugucucuaacaaaggaguggacaccguuuccgugggcaauacacuuuacugugucaacaagcaagagggccagagccuguaugugaaaggggagcccauuaucaacuucuacgauccucucguuuuucccuccgacgaguucgaugccucuauuagccaggugaaugaaaagaucaaccagucccuggcuuuuauucgcaaaucugacgaacugcuccacaaugucaacgugggaaagagcaccacaaauaucaugaucaccacgauuaucauugugaucauuguuauccugcuucugcucaucgccgucggccuguuccuguauugcaaggccagauccaccccggugacacuuagcaaagaucaacucucugggauuaacaauaucgcuuucuccaacuga

SEQ ID NO: 15423 - RNA, 1608 nt, Artificial Sequence
  derived and/or modified CDS sequence (opt6) from HRSV(Memphis-37)__AIY60640.1__F_DSCav1_mut3
auggaauuaccaauacuaaaaacaaaugccaucaccaccauccuggccgccguaacauuaugcuucgcaaguucacaaaauauaacagaagaauuuuaucaaucaacuugcagcgccguaucaaaaggcuacuuaggcgcacuacguacaggaugguacacaucaguaauaaccauagaacuauccaauauuaaagaaauaaaaugcaauggaacagacgcaaaaguuaaacuaauaaaacaagaauuagacaaauacaaaaacgcaguaaccgaccuucaauuacuaaugcaaucuacccccgcugcagguuccggaucagcaauauguucaggaauugcaguaugcaaaguccuacacuuagaaggagaaguaaacaaaauaaaaaacgcacuauuaagcaccaauaaagcagucguaucauuauccaacggcguuucaguacuaacauuuaaaguacuugaccuaaaaaacuauauagacaaacaacuacuucccauccuuaacaaacaaagcugcucaauaccuaauaucgaaacaguaauagaauuucaacaaaaaaacaaucgauuauuagaaaucacacgagaauuuucugucaacgcaggagucaccacacccguaucuacuuauauguuaaccaacucugaauuauuaucacuaaucaaugacaugccaauaacaaacgaucaaaaaaaauuaaugucaaauaacguacaaauaguaagacaacaaucauacucaauaaugugcauuauaaaagaagaaguacuagccuauguuguacaacucccacucuacggcguaauagacacaccaugcuggaaauuacacacuucaccacuaugcacaacaaacacaaaagaaggaucaaacaucugccuaaccagaaccgauagaggaugguauugcgacaaugccggaucaguuucauucuucccacaagcagaaacaugcaaaguacaauccaacagaguuuucugugacacaaugaacucgcuaacauuacccagcgaaguaaaccucugcaacauagacauauucaacccaaaauacgauugcaaaauaaugacuucuaaaacagauguuuccucaagcgucauaacgaguuuaggagcaauaguaagcuguuacggaaaaaccaaauguaccgcaucaaacaaaaaccgaggaauaauaaaaaccuuuucaaacggaugcgauuacgucuccaacaaaggagucgacacaguaucaguuggcaauacucuuuacugcguaaauaaacaagaaggacaaucacuauacguaaaaggcgaaccaauaauaaacuucuacgacccccucgucuucccuucagaugaauuugacgcaagcaucucacaaguuaaugaaaaaauaaaucaauccuuagcauucauacgaaaaucagacgaacuauuacacaacguaaacguaggaaaaucaacgacaaacauaaugauaacaacuaucauuauagucauaauagucauacuacuacuauuaauagccguaggcuuauuccuauacugcaaagcaagaucuacuccaguaacacucucaaaagaccaauuaucuggaauaaauaacauagcauucucuaauuaa

SEQ ID NO: 15424 - RNA, 1608 nt, Artificial Sequence
  derived and/or modified CDS sequence (opt11) from HRSV(Memphis-37)__AIY60640.1__F_DSCav1_mut3
auggaacuccccauccucaaaaccaacgccauuaccacgauccucgccgcagucacccucugcuucgccuccucacaaaacaucacagaagaauuuuaccaaaguaccugcuccgccgucagcaaaggauaccucggcgcccuccgcaccggcugguacacauccgucauaaccaucgaacucagcaacaucaaagaaaucaaauguaacggaaccgacgccaaaguaaaacuaauaaaacaagaacucgacaaauacaagaacgccgucaccgaccuccaacuccucaugcaaucuacccccgccgccggcucagguagcgccaucugcagcgguauugccgucugcaaaguacuccaccuagaaggagaagucaauaaaaucaaaaacgcccuacucuccaccaacaaggcagucgucagccucuccaacggcgucucagucuuaaccuucaaagugcucgaccucaaaaauuacauagacaaacaacuacuccccauucucaacaaacaauccugcuccauacccaacauagaaaccgucauugaauuucaacagaaaaacaaccgccuccucgaaaucacgcgcgaguucagugucaacgccggcgucaccaccccagucucgacauacaugcucacaaacucagaacuccucucguuaaucaacgacaugccaauaaccaacgaccaaaagaaacuaauguccaacaacguucaaauaguucgccaacaaucauacuccauaaugugcaucaucaaagaagaaguccucgccuacguuguacaauuaccccucuacggcgucaucgacacaccaugcuggaaacuccacacaucgccccucugcaccaccaacaccaaagaaggcagcaacauuugccucacccggacagaccgcggcugguacugcgacaaugcaggcagcgucucauucuucccacaagccgaaaccugcaaaguccaaagcaaccgugucuucugcgacacaaugaacucccuuacccucccaagcgaaguaaaccucugcaauauugacaucuucaaccccaaauacgacugcaaaaucaugaccuccaaaaccgacgucuccucaucagucaucaccucccuuggcgccauugucuccuguuacgguaaaaccaaaugcaccgccuccaacaaaaaccgcggcaucaucaaaaccuucucuaacggcugcgacuacgucucaaacaaaggcgucgacacugucuccgucggcaacacccuauacugcgucaacaagcaagaaggacagucccuauacguaaaaggugaaccaauuaucaacuucuacgacccccuagucuucccauccgacgaguucgaugccuccaucucccaaguaaaugaaaagaucaaucaaagccuggccuucauccgcaaauccgacgaacuacuccacaaugucaacgucggaaaaucaacaacaaacaucaugaucaccaccaucaucaucgucaucauaguaauccuccuacugcucaucgccgucggucucuuccuauacugcaaagcccguucuacuccagucacccucuccaaagaccaacuaucaggaaucaacaacaucgccuucagcaacuaa

SEQ ID NO: 15425 - RNA, 1884 nt, Artificial Sequence
  mRNA product Design a-1 comprising derived and/or modified sequence from HRSV(Memphis-37)__AIY60640.1__F_DSCav1_mut3 (opt1)
gggagagucccgcagucggcguccagcggcucugcuuguucgugugugugucguugcaggccuuauucaagcuuaccauggagcugcccauccucaagaccaacgccaucaccacgauccuggccgcggugacccugugcuucgccagcucccagaacaucaccgaggaguucuaccagagcacgugcuccgccgucagcaagggcuaccucggcgcccugcgcaccgggugguacaccagcgugaucaccaucgagcuguccaacaucaaggagaucaagugcaacggcaccgacgccaaggugaagcucaucaagcaggagcuggacaaguacaagaacgcggucacggaccugcagcuccugaugcagagcaccccggccgccggcuccgggagcgcgaucugcuccggcaucgccgucugcaaggugcugcaccucgagggcgaggugaacaagaucaagaacgcccugcuguccaccaacaaggccgucgugagccucuccaacggggugagcguccugaccuucaaggugcuggaccucaagaacuacaucgacaagcagcugcugcccauccugaacaagcagagcugcuccauccccaacaucgagaccgucaucgaguuccagcagaagaacaaccgccuccuggagaucacgcgggaguucagcgugaacgcgggcgugaccacccccgucuccaccuacaugcugacgaacagcgagcuccugucccugaucaacgacaugccgaucaccaacgaccagaagaagcucaugagcaacaacgugcagaucgugcgccagcaguccuacagcaucaugugcaucaucaaggaggagguccuggccuacguggugcagcugccccucuacggggucaucgacacccccugcuggaagcugcacaccagcccccugugcacgaccaacaccaaggagggcuccaacaucugccucacccggacggaccgcgggugguacugcgacaacgccggcagcguguccuucuucccgcaggccgagaccugcaagguccagagcaaccggguguucugcgacaccaugaacucccugacccugcccagcgaggugaaccucugcaacaucgacaucuucaaccccaaguacgacugcaagaucaugacguccaagaccgacgucagcuccagcgugaucaccucccugggcgccaucgugagcugcuacgggaagaccaagugcacggcgagcaacaagaaccgcggcaucaucaagaccuucuccaacgggugcgacuacgucagcaacaagggcguggacaccguguccgucggcaacacccuguacugcgugaacaagcaggagggccagagccucuacgugaagggggagcccaucaucaacuucuacgacccgcuggucuuccccuccgacgaguucgacgccagcaucucccaggugaacgagaagaucaaccagagccuggccuucauccggaaguccgacgagcuccugcacaacgugaacgucggcaagagcaccacgaacaucaugaucaccaccaucaucaucgugaucaucgugauccugcugcuccugaucgccgucgggcuguuccucuacugcaaggcccgcuccacccccgugacgcugagcaaggaccagcuguccgggaucaacaacaucgcguucagcaacugaggacuagucccuguucccagagcccacuuuuuuuucuuuuuuugaaauaaaauagccugucuuucagaucuaaaaaaaaaaaaaaaaaaaaaaaaaaaaaaaaaaaaaaaaaaaaaaaaaaaaaaaaaaaaaaaaugcaucccccccccccccccccccccccccccccccaaaggcucuuuucagagccaccagaauu

SEQ ID NO: 15426 - RNA, 1884 nt, Artificial Sequence
  mRNA product Design a-1 comprising derived and/or modified sequence from HRSV(Memphis-37)__AIY60640.1__F_DSCav1_mut3 (opt1)
gggagagucccgcagucggcguccagcggcucugcuuguucgugugugugucguugcaggccuuauucaagcuuaccauggagcugcccauccucaagaccaacgccaucaccacgauccuggccgcggugacccugugcuucgccagcucccagaacaucaccgaggaguucuaccagagcacgugcuccgccgucagcaagggcuaccucggggcccugcgcaccggcugguacaccuccgugaucaccaucgagcugagcaacaucaaggagaucaagugcaacgggaccgacgccaaggugaagcucaucaagcaggagcuggacaaguacaagaacgcggucacggaccugcagcuccugaugcaguccaccccggccgccggcagcggguccgccaucugcagcggcaucgcggugugcaaggugcugcaccucgagggcgaggucaacaagaucaagaacgcccugcuguccaccaacaaggccguggugagccucuccaacggggucagcgugcugaccuucaaggugcuggaccucaagaacuacaucgacaagcagcugcugcccauccucaacaagcaguccugcagcauccccaacaucgagacggucaucgaguuccagcagaagaacaaccggcugcuggagaucacccgcgaguucuccgugaacgccggcgugaccacccccgucagcacguacaugcucaccaacuccgagcugcugagccucaucaacgacaugccgaucaccaacgaccagaagaagcugaugagcaacaacgugcagaucgugcggcagcaguccuacagcaucaugugcaucaucaaggaggagguccuggccuacguggugcagcucccccuguacggggucaucgacacccccugcuggaagcugcacacgagcccccucugcaccaccaacaccaaggagggcuccaacaucugccugacgcgcaccgaccgggggugguacugcgacaacgcgggcuccgugagcuucuucccgcaggccgagaccugcaaggugcaguccaaccgcgucuucugcgacaccaugaacagccugacgcuccccuccgaggugaaccugugcaacaucgacaucuucaaccccaaguacgacugcaagaucaugaccagcaagaccgacgucuccagcuccgugaucaccagccugggcgccaucguguccugcuacgggaagacgaagugcaccgccagcaacaagaaccggggcaucaucaagaccuucuccaacgggugcgacuacgucagcaacaagggcguggacaccguguccgucggcaacacgcucuacugcgugaacaagcaggaggggcagagccuguacgugaagggcgagcccaucaucaacuucuacgacccgcuggucuuccccagcgacgaguucgacgccuccaucagccaggugaacgagaagaucaaccagucccucgcguucauccgcaagagcgacgagcugcugcacaacgugaacgucgggaaguccaccaccaacaucaugaucaccaccaucaucaucgugaucaucgugauccuccugcugcucaucgccgucggccuguuccuguacugcaaggcccggagcacgcccgugacccuguccaaggaccagcucagcgggaucaacaacaucgccuucuccaacugaggacuagucccuguucccagagcccacuuuuuuuucuuuuuuugaaauaaaauagccugucuuucagaucuaaaaaaaaaaaaaaaaaaaaaaaaaaaaaaaaaaaaaaaaaaaaaaaaaaaaaaaaaaaaaaaaugcaucccccccccccccccccccccccccccccccaaaggcucuuuucagagccaccagaauu

SEQ ID NO: 15427 - RNA, 1884 nt, Artificial Sequence
  mRNA product Design a-1 comprising derived and/or modified sequence from HRSV(Memphis-37)__AIY60640.1__F_DSCav1_mut3 (opt2)
gggagagucccgcagucggcguccagcggcucugcuuguucgugugugugucguugcaggccuuauucaagcuuaccauggagcuccccauccucaagaccaacgccaucaccaccauccucgccgccgucacccucugcuucgccuccucccagaacaucaccgaggaguucuaccaguccaccugcuccgccgucuccaagggcuaccucggcgcccuccgcaccggcugguacaccuccgucaucaccaucgagcucuccaacaucaaggagaucaagugcaacggcaccgacgccaaggucaagcucaucaagcaggagcucgacaaguacaagaacgccgucaccgaccuccagcuccucaugcaguccacccccgccgccggcuccggcuccgccaucugcuccggcaucgccgucugcaagguccuccaccucgagggcgaggucaacaagaucaagaacgcccuccucuccaccaacaaggccgucgucucccucuccaacggcgucuccguccucaccuucaagguccucgaccucaagaacuacaucgacaagcagcuccuccccauccucaacaagcaguccugcuccauccccaacaucgagaccgucaucgaguuccagcagaagaacaaccgccuccucgagaucacccgcgaguucuccgucaacgccggcgucaccacccccgucuccaccuacaugcucaccaacuccgagcuccucucccucaucaacgacaugcccaucaccaacgaccagaagaagcucauguccaacaacguccagaucguccgccagcaguccuacuccaucaugugcaucaucaaggaggagguccucgccuacgucguccagcucccccucuacggcgucaucgacacccccugcuggaagcuccacaccuccccccucugcaccaccaacaccaaggagggcuccaacaucugccucacccgcaccgaccgcggcugguacugcgacaacgccggcuccgucuccuucuucccccaggccgagaccugcaagguccaguccaaccgcgucuucugcgacaccaugaacucccucacccuccccuccgaggucaaccucugcaacaucgacaucuucaaccccaaguacgacugcaagaucaugaccuccaagaccgacgucuccuccuccgucaucaccucccucggcgccaucgucuccugcuacggcaagaccaagugcaccgccuccaacaagaaccgcggcaucaucaagaccuucuccaacggcugcgacuacgucuccaacaagggcgucgacaccgucuccgucggcaacacccucuacugcgucaacaagcaggagggccagucccucuacgucaagggcgagcccaucaucaacuucuacgacccccucgucuuccccuccgacgaguucgacgccuccaucucccaggucaacgagaagaucaaccagucccucgccuucauccgcaaguccgacgagcuccuccacaacgucaacgucggcaaguccaccaccaacaucaugaucaccaccaucaucaucgucaucaucgucauccuccuccuccucaucgccgucggccucuuccucuacugcaaggcccgcuccacccccgucacccucuccaaggaccagcucuccggcaucaacaacaucgccuucuccaacugaggacuagucccuguucccagagcccacuuuuuuuucuuuuuuugaaauaaaauagccugucuuucagaucuaaaaaaaaaaaaaaaaaaaaaaaaaaaaaaaaaaaaaaaaaaaaaaaaaaaaaaaaaaaaaaaaugcaucccccccccccccccccccccccccccccccaaaggcucuuuucagagccaccagaauu

SEQ ID NO: 15428 - RNA, 1884 nt, Artificial Sequence
  mRNA product Design a-1 comprising derived and/or modified sequence from HRSV(Memphis-37)__AIY60640.1__F_DSCav1_mut3 (opt3)
gggagagucccgcagucggcguccagcggcucugcuuguucgugugugugucguugcaggccuuauucaagcuuaccauggagcugcccauccucaagaccaacgccauuacaacuauacuugcugcagugacgcugugcuucgccagcucccagaauaucaccgaagaguuuuaccaaucuacauguucagcggucaguaaaggcuauuugggggcuuuaagaacuggaugguacaccagcguuauuacaaucgaacuguccaacauuaaggagaucaaaugcaaugguaccgacgccaaggugaaacuaauaaagcaggaacucgauaaguauaaaaacgcaguaacugaccugcagcuucugaugcagucuacuccugccgcuggcucggggucagcaaucuguagcggaauugccgugugcaaggucuugcaccucgagggcgaggugaauaaaaucaagaacgcucugcugaguaccaauaaagccguugugucccucucuaacggugucagcguguuaacguucaagguacuggaucuuaagaauuacauugacaaacaauugcugccaauccuaaacaagcaguccuguucaauaccgaauauugaaacuguuaucgaguuucagcagaaaaacaauaggcuccuggaaauuacccgggaguucagugugaacgcgggggucacaacucccgugagcaccuauaugcuuacaaauucugagcuguugucccucaucaacgauaugccuaucaccaacgaccaaaagaaacugaugucaaauaacgugcagauuguccgccagcagagcuacaguauaaugugcaucauuaaggaagagguuuuagcauaugugguacaacugccacucuacggagugaucgauacgcccuguuggaaacuucauacuucuccucugugcacaaccaauacuaaggaaggcuccaacauauguuugacacgaaccgaccguggcugguacugcgauaaugccgggagcgucucguuuuucccacaggcugagacguguaaggugcagucuaacagaguuuucugcgacaccaugaacucccuaacacugcccucagaagugaaucucugcaauauugauaucuucaacccuaaauaugacuguaagaucaugacaaguaaaaccgaugucagcuccucugugauuacaagccugggagccaucguaucaugcuacgguaagacuaaauguaccgcaaguaauaagaacaggggcauuauaaagacauuuuccaaugggugcgacuauguuagcaacaaaggaguggacaccgucucugugggcaauacucuuuacugugucaacaagcaagagggucagucacuguaugugaaaggggagccaaucauuaacuucuacgauccguugguuuuucccagugacgaauuugaugcuagcaucucccaggugaaugagaagaucaaccagucucucgccuuuauucggaaaucggacgaacuguuacacaauguaaacgucggaaagagcacgacaaauauaaugaucaccacuauuaucauugugaucauaguuauccugcuacuccugauugcggugggccuuuucuuguauugcaaggcccgcuccaccccugucacacugucaaaagaucaacucaguggcaucaacaauauugcauucucuaacugaggacuagucccuguucccagagcccacuuuuuuuucuuuuuuugaaauaaaauagccugucuuucagaucuaaaaaaaaaaaaaaaaaaaaaaaaaaaaaaaaaaaaaaaaaaaaaaaaaaaaaaaaaaaaaaaaugcaucccccccccccccccccccccccccccccccaaaggcucuuuucagagccaccagaauu

SEQ ID NO: 15429 - RNA, 1884 nt, Artificial Sequence
  mRNA product Design a-1 comprising derived and/or modified sequence from HRSV(Memphis-37)__AIY60640.1__F_DSCav1_mut3 (opt4)
gggagagucccgcagucggcguccagcggcucugcuuguucgugugugugucguugcaggccuuauucaagcuuaccauggagcugcccauccugaagaccaacgccaucaccaccauccuggccgccgugacccugugcuucgccagcagccagaacaucaccgaggaguucuaccagagcaccugcagcgccgugagcaagggcuaccugggcgcccugagaaccggcugguacaccagcgugaucaccaucgagcugagcaacaucaaggagaucaagugcaacggcaccgacgccaaggugaagcugaucaagcaggagcuggacaaguacaagaacgccgugaccgaccugcagcugcugaugcagagcacccccgccgccggcagcggcagcgccaucugcagcggcaucgccgugugcaaggugcugcaccuggagggcgaggugaacaagaucaagaacgcccugcugagcaccaacaaggccguggugagccugagcaacggcgugagcgugcugaccuucaaggugcuggaccugaagaacuacaucgacaagcagcugcugcccauccugaacaagcagagcugcagcauccccaacaucgagaccgugaucgaguuccagcagaagaacaacagacugcuggagaucaccagagaguucagcgugaacgccggcgugaccacccccgugagcaccuacaugcugaccaacagcgagcugcugagccugaucaacgacaugcccaucaccaacgaccagaagaagcugaugagcaacaacgugcagaucgugagacagcagagcuacagcaucaugugcaucaucaaggaggaggugcuggccuacguggugcagcugccccuguacggcgugaucgacacccccugcuggaagcugcacaccagcccccugugcaccaccaacaccaaggagggcagcaacaucugccugaccagaaccgacagaggcugguacugcgacaacgccggcagcgugagcuucuucccccaggccgagaccugcaaggugcagagcaacagaguguucugcgacaccaugaacagccugacccugcccagcgaggugaaccugugcaacaucgacaucuucaaccccaaguacgacugcaagaucaugaccagcaagaccgacgugagcagcagcgugaucaccagccugggcgccaucgugagcugcuacggcaagaccaagugcaccgccagcaacaagaacagaggcaucaucaagaccuucagcaacggcugcgacuacgugagcaacaagggcguggacaccgugagcgugggcaacacccuguacugcgugaacaagcaggagggccagagccuguacgugaagggcgagcccaucaucaacuucuacgacccccugguguuccccagcgacgaguucgacgccagcaucagccaggugaacgagaagaucaaccagagccuggccuucaucagaaagagcgacgagcugcugcacaacgugaacgugggcaagagcaccaccaacaucaugaucaccaccaucaucaucgugaucaucgugauccugcugcugcugaucgccgugggccuguuccuguacugcaaggccagaagcacccccgugacccugagcaaggaccagcugagcggcaucaacaacaucgccuucagcaacugaggacuagucccuguucccagagcccacuuuuuuuucuuuuuuugaaauaaaauagccugucuuucagaucuaaaaaaaaaaaaaaaaaaaaaaaaaaaaaaaaaaaaaaaaaaaaaaaaaaaaaaaaaaaaaaaaugcaucccccccccccccccccccccccccccccccaaaggcucuuuucagagccaccagaauu

SEQ ID NO: 15430 - RNA, 1884 nt, Artificial Sequence
  mRNA product Design a-1 comprising derived and/or modified sequence from HRSV(Memphis-37)__AIY60640.1__F_DSCav1_mut3 (opt5)
gggagagucccgcagucggcguccagcggcucugcuuguucgugugugugucguugcaggccuuauucaagcuuaccauggagcugcccauccucaagaccaacgccauuacaacgauccuggcugccgugacccuuugcuucgcgagcucccagaauauuacagaagaguuuuaccaaucuaccuguagcgcugucuccaaaggcuaucugggggcccucagaacaggaugguacaccucuguuaucacaauugaacugagcaacaucaaggagaucaaaugcaauggcaccgacgccaaggugaaacuuauuaagcaggaacuggauaaguauaaaaacgcugugacggaccuccagcugcugaugcaguccaccccugccgcugggucuggaagcgccaucuguuccggcauugcggucugcaaggugcuccaccuggagggggagguuaauaaaaucaagaacgcccuucugagcacaaauaaagcuguggucucucucuccaacggagugagcguucugaccuucaaggugcuugaucugaagaauuacauugacaaacaacuccugccgauccugaacaagcagucuuguuccauucccaauaucgaaacagucaucgaguuucagcagaaaaacaaucggcuccuggaaauuacccgcgaguucagcgugaacgccggcgugacgacaccugucucuaccuauaugcuuacaaauuccgagcugcucagccugaucaacgauaugcccauuaccaacgaccaaaagaaacuuauguccaauaacguucagaucgugagacagcagucuuacagcauuaugugcaucaucaaggaagaggugcuggcuuaugucgugcaacucccucuguacggcguuauugauacccccuguuggaaacugcauacauccccucucugcacgaccaauacaaaggaagggagcaacaucugucugacccggacagaccgcggaugguacugcgauaaugccggcucuguguccuuuuucccgcaggcggagaccuguaagguccagagcaacagaguguuuugcgacacgaugaacucucuuacacugcccagcgaaguuaaucucugcaauauugauaucuucaacccuaaauaugacuguaagauuaugaccuccaaaaccgaugugucuagcuccgucaucacaagccugggggccaucgugucuugcuacggaaagaccaaauguacagcuuccaauaagaaccggggcauuaucaagacguuuagcaaugggugcgacuaugucucuaacaaaggaguggacaccguuuccgugggcaauacacuuuacugugucaacaagcaagagggccagagccuguaugugaaaggggagcccauuaucaacuucuacgauccucucguuuuucccuccgacgaguucgaugccucuauuagccaggugaaugaaaagaucaaccagucccuggcuuuuauucgcaaaucugacgaacugcuccacaaugucaacgugggaaagagcaccacaaauaucaugaucaccacgauuaucauugugaucauuguuauccugcuucugcucaucgccgucggccuguuccuguauugcaaggccagauccaccccggugacacuuagcaaagaucaacucucugggauuaacaauaucgcuuucuccaacugaggacuagucccuguucccagagcccacuuuuuuuucuuuuuuugaaauaaaauagccugucuuucagaucuaaaaaaaaaaaaaaaaaaaaaaaaaaaaaaaaaaaaaaaaaaaaaaaaaaaaaaaaaaaaaaaaugcaucccccccccccccccccccccccccccccccaaaggcucuuuucagagccaccagaauu

SEQ ID NO: 15431 - RNA, 1884 nt, Artificial Sequence
  mRNA product Design a-1 comprising derived and/or modified sequence from HRSV(Memphis-37)__AIY60640.1__F_DSCav1_mut3 (opt6)
gggagagucccgcagucggcguccagcggcucugcuuguucgugugugugucguugcaggccuuauucaagcuuaccauggaauuaccaauacuaaaaacaaaugccaucaccaccauccuggccgccguaacauuaugcuucgcaaguucacaaaauauaacagaagaauuuuaucaaucaacuugcagcgccguaucaaaaggcuacuuaggcgcacuacguacaggaugguacacaucaguaauaaccauagaacuauccaauauuaaagaaauaaaaugcaauggaacagacgcaaaaguuaaacuaauaaaacaagaauuagacaaauacaaaaacgcaguaaccgaccuucaauuacuaaugcaaucuacccccgcugcagguuccggaucagcaauauguucaggaauugcaguaugcaaaguccuacacuuagaaggagaaguaaacaaaauaaaaaacgcacuauuaagcaccaauaaagcagucguaucauuauccaacggcguuucaguacuaacauuuaaaguacuugaccuaaaaaacuauauagacaaacaacuacuucccauccuuaacaaacaaagcugcucaauaccuaauaucgaaacaguaauagaauuucaacaaaaaaacaaucgauuauuagaaaucacacgagaauuuucugucaacgcaggagucaccacacccguaucuacuuauauguuaaccaacucugaauuauuaucacuaaucaaugacaugccaauaacaaacgaucaaaaaaaauuaaugucaaauaacguacaaauaguaagacaacaaucauacucaauaaugugcauuauaaaagaagaaguacuagccuauguuguacaacucccacucuacggcguaauagacacaccaugcuggaaauuacacacuucaccacuaugcacaacaaacacaaaagaaggaucaaacaucugccuaaccagaaccgauagaggaugguauugcgacaaugccggaucaguuucauucuucccacaagcagaaacaugcaaaguacaauccaacagaguuuucugugacacaaugaacucgcuaacauuacccagcgaaguaaaccucugcaacauagacauauucaacccaaaauacgauugcaaaauaaugacuucuaaaacagauguuuccucaagcgucauaacgaguuuaggagcaauaguaagcuguuacggaaaaaccaaauguaccgcaucaaacaaaaaccgaggaauaauaaaaaccuuuucaaacggaugcgauuacgucuccaacaaaggagucgacacaguaucaguuggcaauacucuuuacugcguaaauaaacaagaaggacaaucacuauacguaaaaggcgaaccaauaauaaacuucuacgacccccucgucuucccuucagaugaauuugacgcaagcaucucacaaguuaaugaaaaaauaaaucaauccuuagcauucauacgaaaaucagacgaacuauuacacaacguaaacguaggaaaaucaacgacaaacauaaugauaacaacuaucauuauagucauaauagucauacuacuacuauuaauagccguaggcuuauuccuauacugcaaagcaagaucuacuccaguaacacucucaaaagaccaauuaucuggaauaaauaacauagcauucucuaauuaaggacuagucccuguucccagagcccacuuuuuuuucuuuuuuugaaauaaaauagccugucuuucagaucuaaaaaaaaaaaaaaaaaaaaaaaaaaaaaaaaaaaaaaaaaaaaaaaaaaaaaaaaaaaaaaaaugcaucccccccccccccccccccccccccccccccaaaggcucuuuucagagccaccagaauu

SEQ ID NO: 15432 - RNA, 1884 nt, Artificial Sequence
  mRNA product Design a-1 comprising derived and/or modified sequence from HRSV(Memphis-37)__AIY60640.1__F_DSCav1_mut3 (opt11)
gggagagucccgcagucggcguccagcggcucugcuuguucgugugugugucguugcaggccuuauucaagcuuaccauggaacuccccauccucaaaaccaacgccauuaccacgauccucgccgcagucacccucugcuucgccuccucacaaaacaucacagaagaauuuuaccaaaguaccugcuccgccgucagcaaaggauaccucggcgcccuccgcaccggcugguacacauccgucauaaccaucgaacucagcaacaucaaagaaaucaaauguaacggaaccgacgccaaaguaaaacuaauaaaacaagaacucgacaaauacaagaacgccgucaccgaccuccaacuccucaugcaaucuacccccgccgccggcucagguagcgccaucugcagcgguauugccgucugcaaaguacuccaccuagaaggagaagucaauaaaaucaaaaacgcccuacucuccaccaacaaggcagucgucagccucuccaacggcgucucagucuuaaccuucaaagugcucgaccucaaaaauuacauagacaaacaacuacuccccauucucaacaaacaauccugcuccauacccaacauagaaaccgucauugaauuucaacagaaaaacaaccgccuccucgaaaucacgcgcgaguucagugucaacgccggcgucaccaccccagucucgacauacaugcucacaaacucagaacuccucucguuaaucaacgacaugccaauaaccaacgaccaaaagaaacuaauguccaacaacguucaaauaguucgccaacaaucauacuccauaaugugcaucaucaaagaagaaguccucgccuacguuguacaauuaccccucuacggcgucaucgacacaccaugcuggaaacuccacacaucgccccucugcaccaccaacaccaaagaaggcagcaacauuugccucacccggacagaccgcggcugguacugcgacaaugcaggcagcgucucauucuucccacaagccgaaaccugcaaaguccaaagcaaccgugucuucugcgacacaaugaacucccuuacccucccaagcgaaguaaaccucugcaauauugacaucuucaaccccaaauacgacugcaaaaucaugaccuccaaaaccgacgucuccucaucagucaucaccucccuuggcgccauugucuccuguuacgguaaaaccaaaugcaccgccuccaacaaaaaccgcggcaucaucaaaaccuucucuaacggcugcgacuacgucucaaacaaaggcgucgacacugucuccgucggcaacacccuauacugcgucaacaagcaagaaggacagucccuauacguaaaaggugaaccaauuaucaacuucuacgacccccuagucuucccauccgacgaguucgaugccuccaucucccaaguaaaugaaaagaucaaucaaagccuggccuucauccgcaaauccgacgaacuacuccacaaugucaacgucggaaaaucaacaacaaacaucaugaucaccaccaucaucaucgucaucauaguaauccuccuacugcucaucgccgucggucucuuccuauacugcaaagcccguucuacuccagucacccucuccaaagaccaacuaucaggaaucaacaacaucgccuucagcaacuaaggacuagucccuguucccagagcccacuuuuuuuucuuuuuuugaaauaaaauagccugucuuucagaucuaaaaaaaaaaaaaaaaaaaaaaaaaaaaaaaaaaaaaaaaaaaaaaaaaaaaaaaaaaaaaaaaugcaucccccccccccccccccccccccccccccccaaaggcucuuuucagagccaccagaauu

SEQ ID NO: 15433 - RNA, 1903 nt, Artificial Sequence
  mRNA product Design a-2 comprising derived and/or modified sequence from HRSV(Memphis-37)__AIY60640.1__F_DSCav1_mut3 (opt1)
gggagaguccgcucagccagguugcagaagcggcuuagcguguguccuaaucuucucucugcguguagguaggccugugccgcaaacaagcuuaccauggagcugcccauccucaagaccaacgccaucaccacgauccuggccgcggugacccugugcuucgccagcucccagaacaucaccgaggaguucuaccagagcacgugcuccgccgucagcaagggcuaccucggcgcccugcgcaccgggugguacaccagcgugaucaccaucgagcuguccaacaucaaggagaucaagugcaacggcaccgacgccaaggugaagcucaucaagcaggagcuggacaaguacaagaacgcggucacggaccugcagcuccugaugcagagcaccccggccgccggcuccgggagcgcgaucugcuccggcaucgccgucugcaaggugcugcaccucgagggcgaggugaacaagaucaagaacgcccugcuguccaccaacaaggccgucgugagccucuccaacggggugagcguccugaccuucaaggugcuggaccucaagaacuacaucgacaagcagcugcugcccauccugaacaagcagagcugcuccauccccaacaucgagaccgucaucgaguuccagcagaagaacaaccgccuccuggagaucacgcgggaguucagcgugaacgcgggcgugaccacccccgucuccaccuacaugcugacgaacagcgagcuccugucccugaucaacgacaugccgaucaccaacgaccagaagaagcucaugagcaacaacgugcagaucgugcgccagcaguccuacagcaucaugugcaucaucaaggaggagguccuggccuacguggugcagcugccccucuacggggucaucgacacccccugcuggaagcugcacaccagcccccugugcacgaccaacaccaaggagggcuccaacaucugccucacccggacggaccgcgggugguacugcgacaacgccggcagcguguccuucuucccgcaggccgagaccugcaagguccagagcaaccggguguucugcgacaccaugaacucccugacccugcccagcgaggugaaccucugcaacaucgacaucuucaaccccaaguacgacugcaagaucaugacguccaagaccgacgucagcuccagcgugaucaccucccugggcgccaucgugagcugcuacgggaagaccaagugcacggcgagcaacaagaaccgcggcaucaucaagaccuucuccaacgggugcgacuacgucagcaacaagggcguggacaccguguccgucggcaacacccuguacugcgugaacaagcaggagggccagagccucuacgugaagggggagcccaucaucaacuucuacgacccgcuggucuuccccuccgacgaguucgacgccagcaucucccaggugaacgagaagaucaaccagagccuggccuucauccggaaguccgacgagcuccugcacaacgugaacgucggcaagagcaccacgaacaucaugaucaccaccaucaucaucgugaucaucgugauccugcugcuccugaucgccgucgggcuguuccucuacugcaaggcccgcuccacccccgugacgcugagcaaggaccagcuguccgggaucaacaacaucgcguucagcaacugaggacuagucccuguucccagagcccacuuuuuuuucuuuuuuugaaauaaaauagccugucuuucagaucuaaaaaaaaaaaaaaaaaaaaaaaaaaaaaaaaaaaaaaaaaaaaaaaaaaaaaaaaaaaaaaaaugcaucccccccccccccccccccccccccccccccaaaggcucuuuucagagccaccagaauu

SEQ ID NO: 15434 - RNA, 1903 nt, Artificial Sequence
  mRNA product Design a-2 comprising derived and/or modified sequence from HRSV(Memphis-37)__AIY60640.1__F_DSCav1_mut3 (opt1)
gggagaguccgcucagccagguugcagaagcggcuuagcguguguccuaaucuucucucugcguguagguaggccugugccgcaaacaagcuuaccauggagcugcccauccucaagaccaacgccaucaccacgauccuggccgcggugacccugugcuucgccagcucccagaacaucaccgaggaguucuaccagagcacgugcuccgccgucagcaagggcuaccucggggcccugcgcaccggcugguacaccuccgugaucaccaucgagcugagcaacaucaaggagaucaagugcaacgggaccgacgccaaggugaagcucaucaagcaggagcuggacaaguacaagaacgcggucacggaccugcagcuccugaugcaguccaccccggccgccggcagcggguccgccaucugcagcggcaucgcggugugcaaggugcugcaccucgagggcgaggucaacaagaucaagaacgcccugcuguccaccaacaaggccguggugagccucuccaacggggucagcgugcugaccuucaaggugcuggaccucaagaacuacaucgacaagcagcugcugcccauccucaacaagcaguccugcagcauccccaacaucgagacggucaucgaguuccagcagaagaacaaccggcugcuggagaucacccgcgaguucuccgugaacgccggcgugaccacccccgucagcacguacaugcucaccaacuccgagcugcugagccucaucaacgacaugccgaucaccaacgaccagaagaagcugaugagcaacaacgugcagaucgugcggcagcaguccuacagcaucaugugcaucaucaaggaggagguccuggccuacguggugcagcucccccuguacggggucaucgacacccccugcuggaagcugcacacgagcccccucugcaccaccaacaccaaggagggcuccaacaucugccugacgcgcaccgaccgggggugguacugcgacaacgcgggcuccgugagcuucuucccgcaggccgagaccugcaaggugcaguccaaccgcgucuucugcgacaccaugaacagccugacgcuccccuccgaggugaaccugugcaacaucgacaucuucaaccccaaguacgacugcaagaucaugaccagcaagaccgacgucuccagcuccgugaucaccagccugggcgccaucguguccugcuacgggaagacgaagugcaccgccagcaacaagaaccggggcaucaucaagaccuucuccaacgggugcgacuacgucagcaacaagggcguggacaccguguccgucggcaacacgcucuacugcgugaacaagcaggaggggcagagccuguacgugaagggcgagcccaucaucaacuucuacgacccgcuggucuuccccagcgacgaguucgacgccuccaucagccaggugaacgagaagaucaaccagucccucgcguucauccgcaagagcgacgagcugcugcacaacgugaacgucgggaaguccaccaccaacaucaugaucaccaccaucaucaucgugaucaucgugauccuccugcugcucaucgccgucggccuguuccuguacugcaaggcccggagcacgcccgugacccuguccaaggaccagcucagcgggaucaacaacaucgccuucuccaacugaggacuagucccuguucccagagcccacuuuuuuuucuuuuuuugaaauaaaauagccugucuuucagaucuaaaaaaaaaaaaaaaaaaaaaaaaaaaaaaaaaaaaaaaaaaaaaaaaaaaaaaaaaaaaaaaaugcaucccccccccccccccccccccccccccccccaaaggcucuuuucagagccaccagaauu

SEQ ID NO: 15435 - RNA, 1903 nt, Artificial Sequence
  mRNA product Design a-2 comprising derived and/or modified sequence from HRSV(Memphis-37)__AIY60640.1__F_DSCav1_mut3 (opt2)
gggagaguccgcucagccagguugcagaagcggcuuagcguguguccuaaucuucucucugcguguagguaggccugugccgcaaacaagcuuaccauggagcuccccauccucaagaccaacgccaucaccaccauccucgccgccgucacccucugcuucgccuccucccagaacaucaccgaggaguucuaccaguccaccugcuccgccgucuccaagggcuaccucggcgcccuccgcaccggcugguacaccuccgucaucaccaucgagcucuccaacaucaaggagaucaagugcaacggcaccgacgccaaggucaagcucaucaagcaggagcucgacaaguacaagaacgccgucaccgaccuccagcuccucaugcaguccacccccgccgccggcuccggcuccgccaucugcuccggcaucgccgucugcaagguccuccaccucgagggcgaggucaacaagaucaagaacgcccuccucuccaccaacaaggccgucgucucccucuccaacggcgucuccguccucaccuucaagguccucgaccucaagaacuacaucgacaagcagcuccuccccauccucaacaagcaguccugcuccauccccaacaucgagaccgucaucgaguuccagcagaagaacaaccgccuccucgagaucacccgcgaguucuccgucaacgccggcgucaccacccccgucuccaccuacaugcucaccaacuccgagcuccucucccucaucaacgacaugcccaucaccaacgaccagaagaagcucauguccaacaacguccagaucguccgccagcaguccuacuccaucaugugcaucaucaaggaggagguccucgccuacgucguccagcucccccucuacggcgucaucgacacccccugcuggaagcuccacaccuccccccucugcaccaccaacaccaaggagggcuccaacaucugccucacccgcaccgaccgcggcugguacugcgacaacgccggcuccgucuccuucuucccccaggccgagaccugcaagguccaguccaaccgcgucuucugcgacaccaugaacucccucacccuccccuccgaggucaaccucugcaacaucgacaucuucaaccccaaguacgacugcaagaucaugaccuccaagaccgacgucuccuccuccgucaucaccucccucggcgccaucgucuccugcuacggcaagaccaagugcaccgccuccaacaagaaccgcggcaucaucaagaccuucuccaacggcugcgacuacgucuccaacaagggcgucgacaccgucuccgucggcaacacccucuacugcgucaacaagcaggagggccagucccucuacgucaagggcgagcccaucaucaacuucuacgacccccucgucuuccccuccgacgaguucgacgccuccaucucccaggucaacgagaagaucaaccagucccucgccuucauccgcaaguccgacgagcuccuccacaacgucaacgucggcaaguccaccaccaacaucaugaucaccaccaucaucaucgucaucaucgucauccuccuccuccucaucgccgucggccucuuccucuacugcaaggcccgcuccacccccgucacccucuccaaggaccagcucuccggcaucaacaacaucgccuucuccaacugaggacuagucccuguucccagagcccacuuuuuuuucuuuuuuugaaauaaaauagccugucuuucagaucuaaaaaaaaaaaaaaaaaaaaaaaaaaaaaaaaaaaaaaaaaaaaaaaaaaaaaaaaaaaaaaaaugcaucccccccccccccccccccccccccccccccaaaggcucuuuucagagccaccagaauu

SEQ ID NO: 15436 - RNA, 1903 nt, Artificial Sequence
  mRNA product Design a-2 comprising derived and/or modified sequence from HRSV(Memphis-37)__AIY60640.1__F_DSCav1_mut3 (opt3)
gggagaguccgcucagccagguugcagaagcggcuuagcguguguccuaaucuucucucugcguguagguaggccugugccgcaaacaagcuuaccauggagcugcccauccucaagaccaacgccauuacaacuauacuugcugcagugacgcugugcuucgccagcucccagaauaucaccgaagaguuuuaccaaucuacauguucagcggucaguaaaggcuauuugggggcuuuaagaacuggaugguacaccagcguuauuacaaucgaacuguccaacauuaaggagaucaaaugcaaugguaccgacgccaaggugaaacuaauaaagcaggaacucgauaaguauaaaaacgcaguaacugaccugcagcuucugaugcagucuacuccugccgcuggcucggggucagcaaucuguagcggaauugccgugugcaaggucuugcaccucgagggcgaggugaauaaaaucaagaacgcucugcugaguaccaauaaagccguugugucccucucuaacggugucagcguguuaacguucaagguacuggaucuuaagaauuacauugacaaacaauugcugccaauccuaaacaagcaguccuguucaauaccgaauauugaaacuguuaucgaguuucagcagaaaaacaauaggcuccuggaaauuacccgggaguucagugugaacgcgggggucacaacucccgugagcaccuauaugcuuacaaauucugagcuguugucccucaucaacgauaugccuaucaccaacgaccaaaagaaacugaugucaaauaacgugcagauuguccgccagcagagcuacaguauaaugugcaucauuaaggaagagguuuuagcauaugugguacaacugccacucuacggagugaucgauacgcccuguuggaaacuucauacuucuccucugugcacaaccaauacuaaggaaggcuccaacauauguuugacacgaaccgaccguggcugguacugcgauaaugccgggagcgucucguuuuucccacaggcugagacguguaaggugcagucuaacagaguuuucugcgacaccaugaacucccuaacacugcccucagaagugaaucucugcaauauugauaucuucaacccuaaauaugacuguaagaucaugacaaguaaaaccgaugucagcuccucugugauuacaagccugggagccaucguaucaugcuacgguaagacuaaauguaccgcaaguaauaagaacaggggcauuauaaagacauuuuccaaugggugcgacuauguuagcaacaaaggaguggacaccgucucugugggcaauacucuuuacugugucaacaagcaagagggucagucacuguaugugaaaggggagccaaucauuaacuucuacgauccguugguuuuucccagugacgaauuugaugcuagcaucucccaggugaaugagaagaucaaccagucucucgccuuuauucggaaaucggacgaacuguuacacaauguaaacgucggaaagagcacgacaaauauaaugaucaccacuauuaucauugugaucauaguuauccugcuacuccugauugcggugggccuuuucuuguauugcaaggcccgcuccaccccugucacacugucaaaagaucaacucaguggcaucaacaauauugcauucucuaacugaggacuagucccuguucccagagcccacuuuuuuuucuuuuuuugaaauaaaauagccugucuuucagaucuaaaaaaaaaaaaaaaaaaaaaaaaaaaaaaaaaaaaaaaaaaaaaaaaaaaaaaaaaaaaaaaaugcaucccccccccccccccccccccccccccccccaaaggcucuuuucagagccaccagaauu

SEQ ID NO: 15437 - RNA, 1903 nt, Artificial Sequence
  mRNA product Design a-2 comprising derived and/or modified sequence from HRSV(Memphis-37)__AIY60640.1__F_DSCav1_mut3 (opt4)
gggagaguccgcucagccagguugcagaagcggcuuagcguguguccuaaucuucucucugcguguagguaggccugugccgcaaacaagcuuaccauggagcugcccauccugaagaccaacgccaucaccaccauccuggccgccgugacccugugcuucgccagcagccagaacaucaccgaggaguucuaccagagcaccugcagcgccgugagcaagggcuaccugggcgcccugagaaccggcugguacaccagcgugaucaccaucgagcugagcaacaucaaggagaucaagugcaacggcaccgacgccaaggugaagcugaucaagcaggagcuggacaaguacaagaacgccgugaccgaccugcagcugcugaugcagagcacccccgccgccggcagcggcagcgccaucugcagcggcaucgccgugugcaaggugcugcaccuggagggcgaggugaacaagaucaagaacgcccugcugagcaccaacaaggccguggugagccugagcaacggcgugagcgugcugaccuucaaggugcuggaccugaagaacuacaucgacaagcagcugcugcccauccugaacaagcagagcugcagcauccccaacaucgagaccgugaucgaguuccagcagaagaacaacagacugcuggagaucaccagagaguucagcgugaacgccggcgugaccacccccgugagcaccuacaugcugaccaacagcgagcugcugagccugaucaacgacaugcccaucaccaacgaccagaagaagcugaugagcaacaacgugcagaucgugagacagcagagcuacagcaucaugugcaucaucaaggaggaggugcuggccuacguggugcagcugccccuguacggcgugaucgacacccccugcuggaagcugcacaccagcccccugugcaccaccaacaccaaggagggcagcaacaucugccugaccagaaccgacagaggcugguacugcgacaacgccggcagcgugagcuucuucccccaggccgagaccugcaaggugcagagcaacagaguguucugcgacaccaugaacagccugacccugcccagcgaggugaaccugugcaacaucgacaucuucaaccccaaguacgacugcaagaucaugaccagcaagaccgacgugagcagcagcgugaucaccagccugggcgccaucgugagcugcuacggcaagaccaagugcaccgccagcaacaagaacagaggcaucaucaagaccuucagcaacggcugcgacuacgugagcaacaagggcguggacaccgugagcgugggcaacacccuguacugcgugaacaagcaggagggccagagccuguacgugaagggcgagcccaucaucaacuucuacgacccccugguguuccccagcgacgaguucgacgccagcaucagccaggugaacgagaagaucaaccagagccuggccuucaucagaaagagcgacgagcugcugcacaacgugaacgugggcaagagcaccaccaacaucaugaucaccaccaucaucaucgugaucaucgugauccugcugcugcugaucgccgugggccuguuccuguacugcaaggccagaagcacccccgugacccugagcaaggaccagcugagcggcaucaacaacaucgccuucagcaacugaggacuagucccuguucccagagcccacuuuuuuuucuuuuuuugaaauaaaauagccugucuuucagaucuaaaaaaaaaaaaaaaaaaaaaaaaaaaaaaaaaaaaaaaaaaaaaaaaaaaaaaaaaaaaaaaaugcaucccccccccccccccccccccccccccccccaaaggcucuuuucagagccaccagaauu

SEQ ID NO: 15438 - RNA, 1903 nt, Artificial Sequence
  mRNA product Design a-2 comprising derived and/or modified sequence from HRSV(Memphis-37)__AIY60640.1__F_DSCav1_mut3 (opt5)
gggagaguccgcucagccagguugcagaagcggcuuagcguguguccuaaucuucucucugcguguagguaggccugugccgcaaacaagcuuaccauggagcugcccauccucaagaccaacgccauuacaacgauccuggcugccgugacccuuugcuucgcgagcucccagaauauuacagaagaguuuuaccaaucuaccuguagcgcugucuccaaaggcuaucugggggcccucagaacaggaugguacaccucuguuaucacaauugaacugagcaacaucaaggagaucaaaugcaauggcaccgacgccaaggugaaacuuauuaagcaggaacuggauaaguauaaaaacgcugugacggaccuccagcugcugaugcaguccaccccugccgcugggucuggaagcgccaucuguuccggcauugcggucugcaaggugcuccaccuggagggggagguuaauaaaaucaagaacgcccuucugagcacaaauaaagcuguggucucucucuccaacggagugagcguucugaccuucaaggugcuugaucugaagaauuacauugacaaacaacuccugccgauccugaacaagcagucuuguuccauucccaauaucgaaacagucaucgaguuucagcagaaaaacaaucggcuccuggaaauuacccgcgaguucagcgugaacgccggcgugacgacaccugucucuaccuauaugcuuacaaauuccgagcugcucagccugaucaacgauaugcccauuaccaacgaccaaaagaaacuuauguccaauaacguucagaucgugagacagcagucuuacagcauuaugugcaucaucaaggaagaggugcuggcuuaugucgugcaacucccucuguacggcguuauugauacccccuguuggaaacugcauacauccccucucugcacgaccaauacaaaggaagggagcaacaucugucugacccggacagaccgcggaugguacugcgauaaugccggcucuguguccuuuuucccgcaggcggagaccuguaagguccagagcaacagaguguuuugcgacacgaugaacucucuuacacugcccagcgaaguuaaucucugcaauauugauaucuucaacccuaaauaugacuguaagauuaugaccuccaaaaccgaugugucuagcuccgucaucacaagccugggggccaucgugucuugcuacggaaagaccaaauguacagcuuccaauaagaaccggggcauuaucaagacguuuagcaaugggugcgacuaugucucuaacaaaggaguggacaccguuuccgugggcaauacacuuuacugugucaacaagcaagagggccagagccuguaugugaaaggggagcccauuaucaacuucuacgauccucucguuuuucccuccgacgaguucgaugccucuauuagccaggugaaugaaaagaucaaccagucccuggcuuuuauucgcaaaucugacgaacugcuccacaaugucaacgugggaaagagcaccacaaauaucaugaucaccacgauuaucauugugaucauuguuauccugcuucugcucaucgccgucggccuguuccuguauugcaaggccagauccaccccggugacacuuagcaaagaucaacucucugggauuaacaauaucgcuuucuccaacugaggacuagucccuguucccagagcccacuuuuuuuucuuuuuuugaaauaaaauagccugucuuucagaucuaaaaaaaaaaaaaaaaaaaaaaaaaaaaaaaaaaaaaaaaaaaaaaaaaaaaaaaaaaaaaaaaugcaucccccccccccccccccccccccccccccccaaaggcucuuuucagagccaccagaauu

SEQ ID NO: 15439 - RNA, 1903 nt, Artificial Sequence
  mRNA product Design a-2 comprising derived and/or modified sequence from HRSV(Memphis-37)__AIY60640.1__F_DSCav1_mut3 (opt6)
gggagaguccgcucagccagguugcagaagcggcuuagcguguguccuaaucuucucucugcguguagguaggccugugccgcaaacaagcuuaccauggaauuaccaauacuaaaaacaaaugccaucaccaccauccuggccgccguaacauuaugcuucgcaaguucacaaaauauaacagaagaauuuuaucaaucaacuugcagcgccguaucaaaaggcuacuuaggcgcacuacguacaggaugguacacaucaguaauaaccauagaacuauccaauauuaaagaaauaaaaugcaauggaacagacgcaaaaguuaaacuaauaaaacaagaauuagacaaauacaaaaacgcaguaaccgaccuucaauuacuaaugcaaucuacccccgcugcagguuccggaucagcaauauguucaggaauugcaguaugcaaaguccuacacuuagaaggagaaguaaacaaaauaaaaaacgcacuauuaagcaccaauaaagcagucguaucauuauccaacggcguuucaguacuaacauuuaaaguacuugaccuaaaaaacuauauagacaaacaacuacuucccauccuuaacaaacaaagcugcucaauaccuaauaucgaaacaguaauagaauuucaacaaaaaaacaaucgauuauuagaaaucacacgagaauuuucugucaacgcaggagucaccacacccguaucuacuuauauguuaaccaacucugaauuauuaucacuaaucaaugacaugccaauaacaaacgaucaaaaaaaauuaaugucaaauaacguacaaauaguaagacaacaaucauacucaauaaugugcauuauaaaagaagaaguacuagccuauguuguacaacucccacucuacggcguaauagacacaccaugcuggaaauuacacacuucaccacuaugcacaacaaacacaaaagaaggaucaaacaucugccuaaccagaaccgauagaggaugguauugcgacaaugccggaucaguuucauucuucccacaagcagaaacaugcaaaguacaauccaacagaguuuucugugacacaaugaacucgcuaacauuacccagcgaaguaaaccucugcaacauagacauauucaacccaaaauacgauugcaaaauaaugacuucuaaaacagauguuuccucaagcgucauaacgaguuuaggagcaauaguaagcuguuacggaaaaaccaaauguaccgcaucaaacaaaaaccgaggaauaauaaaaaccuuuucaaacggaugcgauuacgucuccaacaaaggagucgacacaguaucaguuggcaauacucuuuacugcguaaauaaacaagaaggacaaucacuauacguaaaaggcgaaccaauaauaaacuucuacgacccccucgucuucccuucagaugaauuugacgcaagcaucucacaaguuaaugaaaaaauaaaucaauccuuagcauucauacgaaaaucagacgaacuauuacacaacguaaacguaggaaaaucaacgacaaacauaaugauaacaacuaucauuauagucauaauagucauacuacuacuauuaauagccguaggcuuauuccuauacugcaaagcaagaucuacuccaguaacacucucaaaagaccaauuaucuggaauaaauaacauagcauucucuaauuaaggacuagucccuguucccagagcccacuuuuuuuucuuuuuuugaaauaaaauagccugucuuucagaucuaaaaaaaaaaaaaaaaaaaaaaaaaaaaaaaaaaaaaaaaaaaaaaaaaaaaaaaaaaaaaaaaugcaucccccccccccccccccccccccccccccccaaaggcucuuuucagagccaccagaauu

SEQ ID NO: 15440 - RNA, 1903 nt, Artificial Sequence
  mRNA product Design a-2 comprising derived and/or modified sequence from HRSV(Memphis-37)__AIY60640.1__F_DSCav1_mut3 (opt11)
gggagaguccgcucagccagguugcagaagcggcuuagcguguguccuaaucuucucucugcguguagguaggccugugccgcaaacaagcuuaccauggaacuccccauccucaaaaccaacgccauuaccacgauccucgccgcagucacccucugcuucgccuccucacaaaacaucacagaagaauuuuaccaaaguaccugcuccgccgucagcaaaggauaccucggcgcccuccgcaccggcugguacacauccgucauaaccaucgaacucagcaacaucaaagaaaucaaauguaacggaaccgacgccaaaguaaaacuaauaaaacaagaacucgacaaauacaagaacgccgucaccgaccuccaacuccucaugcaaucuacccccgccgccggcucagguagcgccaucugcagcgguauugccgucugcaaaguacuccaccuagaaggagaagucaauaaaaucaaaaacgcccuacucuccaccaacaaggcagucgucagccucuccaacggcgucucagucuuaaccuucaaagugcucgaccucaaaaauuacauagacaaacaacuacuccccauucucaacaaacaauccugcuccauacccaacauagaaaccgucauugaauuucaacagaaaaacaaccgccuccucgaaaucacgcgcgaguucagugucaacgccggcgucaccaccccagucucgacauacaugcucacaaacucagaacuccucucguuaaucaacgacaugccaauaaccaacgaccaaaagaaacuaauguccaacaacguucaaauaguucgccaacaaucauacuccauaaugugcaucaucaaagaagaaguccucgccuacguuguacaauuaccccucuacggcgucaucgacacaccaugcuggaaacuccacacaucgccccucugcaccaccaacaccaaagaaggcagcaacauuugccucacccggacagaccgcggcugguacugcgacaaugcaggcagcgucucauucuucccacaagccgaaaccugcaaaguccaaagcaaccgugucuucugcgacacaaugaacucccuuacccucccaagcgaaguaaaccucugcaauauugacaucuucaaccccaaauacgacugcaaaaucaugaccuccaaaaccgacgucuccucaucagucaucaccucccuuggcgccauugucuccuguuacgguaaaaccaaaugcaccgccuccaacaaaaaccgcggcaucaucaaaaccuucucuaacggcugcgacuacgucucaaacaaaggcgucgacacugucuccgucggcaacacccuauacugcgucaacaagcaagaaggacagucccuauacguaaaaggugaaccaauuaucaacuucuacgacccccuagucuucccauccgacgaguucgaugccuccaucucccaaguaaaugaaaagaucaaucaaagccuggccuucauccgcaaauccgacgaacuacuccacaaugucaacgucggaaaaucaacaacaaacaucaugaucaccaccaucaucaucgucaucauaguaauccuccuacugcucaucgccgucggucucuuccuauacugcaaagcccguucuacuccagucacccucuccaaagaccaacuaucaggaaucaacaacaucgccuucagcaacuaaggacuagucccuguucccagagcccacuuuuuuuucuuuuuuugaaauaaaauagccugucuuucagaucuaaaaaaaaaaaaaaaaaaaaaaaaaaaaaaaaaaaaaaaaaaaaaaaaaaaaaaaaaaaaaaaaugcaucccccccccccccccccccccccccccccccaaaggcucuuuucagagccaccagaauu

SEQ ID NO: 15441 - RNA, 1981 nt, Artificial Sequence
  mRNA product Design a-3 comprising derived and/or modified sequence from HRSV(Memphis-37)__AIY60640.1__F_DSCav1_mut3 (opt1)
gggagagggcgcuuggcuugcaaggacccugagcugcggcauugaagcacacccaacccaacucgacugaagucagccucacugaaccggaucugagaaucuucucucucugggcuugccagggcucuccgaaccuagcuagcauccucuucaauuccaacuagaaagcuuaccauggagcugcccauccucaagaccaacgccaucaccacgauccuggccgcggugacccugugcuucgccagcucccagaacaucaccgaggaguucuaccagagcacgugcuccgccgucagcaagggcuaccucggcgcccugcgcaccgggugguacaccagcgugaucaccaucgagcuguccaacaucaaggagaucaagugcaacggcaccgacgccaaggugaagcucaucaagcaggagcuggacaaguacaagaacgcggucacggaccugcagcuccugaugcagagcaccccggccgccggcuccgggagcgcgaucugcuccggcaucgccgucugcaaggugcugcaccucgagggcgaggugaacaagaucaagaacgcccugcuguccaccaacaaggccgucgugagccucuccaacggggugagcguccugaccuucaaggugcuggaccucaagaacuacaucgacaagcagcugcugcccauccugaacaagcagagcugcuccauccccaacaucgagaccgucaucgaguuccagcagaagaacaaccgccuccuggagaucacgcgggaguucagcgugaacgcgggcgugaccacccccgucuccaccuacaugcugacgaacagcgagcuccugucccugaucaacgacaugccgaucaccaacgaccagaagaagcucaugagcaacaacgugcagaucgugcgccagcaguccuacagcaucaugugcaucaucaaggaggagguccuggccuacguggugcagcugccccucuacggggucaucgacacccccugcuggaagcugcacaccagcccccugugcacgaccaacaccaaggagggcuccaacaucugccucacccggacggaccgcgggugguacugcgacaacgccggcagcguguccuucuucccgcaggccgagaccugcaagguccagagcaaccggguguucugcgacaccaugaacucccugacccugcccagcgaggugaaccucugcaacaucgacaucuucaaccccaaguacgacugcaagaucaugacguccaagaccgacgucagcuccagcgugaucaccucccugggcgccaucgugagcugcuacgggaagaccaagugcacggcgagcaacaagaaccgcggcaucaucaagaccuucuccaacgggugcgacuacgucagcaacaagggcguggacaccguguccgucggcaacacccuguacugcgugaacaagcaggagggccagagccucuacgugaagggggagcccaucaucaacuucuacgacccgcuggucuuccccuccgacgaguucgacgccagcaucucccaggugaacgagaagaucaaccagagccuggccuucauccggaaguccgacgagcuccugcacaacgugaacgucggcaagagcaccacgaacaucaugaucaccaccaucaucaucgugaucaucgugauccugcugcuccugaucgccgucgggcuguuccucuacugcaaggcccgcuccacccccgugacgcugagcaaggaccagcuguccgggaucaacaacaucgcguucagcaacugaggacuagucccuguucccagagcccacuuuuuuuucuuuuuuugaaauaaaauagccugucuuucagaucuaaaaaaaaaaaaaaaaaaaaaaaaaaaaaaaaaaaaaaaaaaaaaaaaaaaaaaaaaaaaaaaaugcaucccccccccccccccccccccccccccccccaaaggcucuuuucagagccaccagaauu

SEQ ID NO: 15442 - RNA, 1981 nt, Artificial Sequence
  mRNA product Design a-3 comprising derived and/or modified sequence from HRSV(Memphis-37)__AIY60640.1__F_DSCav1_mut3 (opt1)
gggagagggcgcuuggcuugcaaggacccugagcugcggcauugaagcacacccaacccaacucgacugaagucagccucacugaaccggaucugagaaucuucucucucugggcuugccagggcucuccgaaccuagcuagcauccucuucaauuccaacuagaaagcuuaccauggagcugcccauccucaagaccaacgccaucaccacgauccuggccgcggugacccugugcuucgccagcucccagaacaucaccgaggaguucuaccagagcacgugcuccgccgucagcaagggcuaccucggggcccugcgcaccggcugguacaccuccgugaucaccaucgagcugagcaacaucaaggagaucaagugcaacgggaccgacgccaaggugaagcucaucaagcaggagcuggacaaguacaagaacgcggucacggaccugcagcuccugaugcaguccaccccggccgccggcagcggguccgccaucugcagcggcaucgcggugugcaaggugcugcaccucgagggcgaggucaacaagaucaagaacgcccugcuguccaccaacaaggccguggugagccucuccaacggggucagcgugcugaccuucaaggugcuggaccucaagaacuacaucgacaagcagcugcugcccauccucaacaagcaguccugcagcauccccaacaucgagacggucaucgaguuccagcagaagaacaaccggcugcuggagaucacccgcgaguucuccgugaacgccggcgugaccacccccgucagcacguacaugcucaccaacuccgagcugcugagccucaucaacgacaugccgaucaccaacgaccagaagaagcugaugagcaacaacgugcagaucgugcggcagcaguccuacagcaucaugugcaucaucaaggaggagguccuggccuacguggugcagcucccccuguacggggucaucgacacccccugcuggaagcugcacacgagcccccucugcaccaccaacaccaaggagggcuccaacaucugccugacgcgcaccgaccgggggugguacugcgacaacgcgggcuccgugagcuucuucccgcaggccgagaccugcaaggugcaguccaaccgcgucuucugcgacaccaugaacagccugacgcuccccuccgaggugaaccugugcaacaucgacaucuucaaccccaaguacgacugcaagaucaugaccagcaagaccgacgucuccagcuccgugaucaccagccugggcgccaucguguccugcuacgggaagacgaagugcaccgccagcaacaagaaccggggcaucaucaagaccuucuccaacgggugcgacuacgucagcaacaagggcguggacaccguguccgucggcaacacgcucuacugcgugaacaagcaggaggggcagagccuguacgugaagggcgagcccaucaucaacuucuacgacccgcuggucuuccccagcgacgaguucgacgccuccaucagccaggugaacgagaagaucaaccagucccucgcguucauccgcaagagcgacgagcugcugcacaacgugaacgucgggaaguccaccaccaacaucaugaucaccaccaucaucaucgugaucaucgugauccuccugcugcucaucgccgucggccuguuccuguacugcaaggcccggagcacgcccgugacccuguccaaggaccagcucagcgggaucaacaacaucgccuucuccaacugaggacuagucccuguucccagagcccacuuuuuuuucuuuuuuugaaauaaaauagccugucuuucagaucuaaaaaaaaaaaaaaaaaaaaaaaaaaaaaaaaaaaaaaaaaaaaaaaaaaaaaaaaaaaaaaaaugcaucccccccccccccccccccccccccccccccaaaggcucuuuucagagccaccagaauu

SEQ ID NO: 15443 - RNA, 1981 nt, Artificial Sequence
  mRNA product Design a-3 comprising derived and/or modified sequence from HRSV(Memphis-37)__AIY60640.1__F_DSCav1_mut3 (opt2)
gggagagggcgcuuggcuugcaaggacccugagcugcggcauugaagcacacccaacccaacucgacugaagucagccucacugaaccggaucugagaaucuucucucucugggcuugccagggcucuccgaaccuagcuagcauccucuucaauuccaacuagaaagcuuaccauggagcuccccauccucaagaccaacgccaucaccaccauccucgccgccgucacccucugcuucgccuccucccagaacaucaccgaggaguucuaccaguccaccugcuccgccgucuccaagggcuaccucggcgcccuccgcaccggcugguacaccuccgucaucaccaucgagcucuccaacaucaaggagaucaagugcaacggcaccgacgccaaggucaagcucaucaagcaggagcucgacaaguacaagaacgccgucaccgaccuccagcuccucaugcaguccacccccgccgccggcuccggcuccgccaucugcuccggcaucgccgucugcaagguccuccaccucgagggcgaggucaacaagaucaagaacgcccuccucuccaccaacaaggccgucgucucccucuccaacggcgucuccguccucaccuucaagguccucgaccucaagaacuacaucgacaagcagcuccuccccauccucaacaagcaguccugcuccauccccaacaucgagaccgucaucgaguuccagcagaagaacaaccgccuccucgagaucacccgcgaguucuccgucaacgccggcgucaccacccccgucuccaccuacaugcucaccaacuccgagcuccucucccucaucaacgacaugcccaucaccaacgaccagaagaagcucauguccaacaacguccagaucguccgccagcaguccuacuccaucaugugcaucaucaaggaggagguccucgccuacgucguccagcucccccucuacggcgucaucgacacccccugcuggaagcuccacaccuccccccucugcaccaccaacaccaaggagggcuccaacaucugccucacccgcaccgaccgcggcugguacugcgacaacgccggcuccgucuccuucuucccccaggccgagaccugcaagguccaguccaaccgcgucuucugcgacaccaugaacucccucacccuccccuccgaggucaaccucugcaacaucgacaucuucaaccccaaguacgacugcaagaucaugaccuccaagaccgacgucuccuccuccgucaucaccucccucggcgccaucgucuccugcuacggcaagaccaagugcaccgccuccaacaagaaccgcggcaucaucaagaccuucuccaacggcugcgacuacgucuccaacaagggcgucgacaccgucuccgucggcaacacccucuacugcgucaacaagcaggagggccagucccucuacgucaagggcgagcccaucaucaacuucuacgacccccucgucuuccccuccgacgaguucgacgccuccaucucccaggucaacgagaagaucaaccagucccucgccuucauccgcaaguccgacgagcuccuccacaacgucaacgucggcaaguccaccaccaacaucaugaucaccaccaucaucaucgucaucaucgucauccuccuccuccucaucgccgucggccucuuccucuacugcaaggcccgcuccacccccgucacccucuccaaggaccagcucuccggcaucaacaacaucgccuucuccaacugaggacuagucccuguucccagagcccacuuuuuuuucuuuuuuugaaauaaaauagccugucuuucagaucuaaaaaaaaaaaaaaaaaaaaaaaaaaaaaaaaaaaaaaaaaaaaaaaaaaaaaaaaaaaaaaaaugcaucccccccccccccccccccccccccccccccaaaggcucuuuucagagccaccagaauu

SEQ ID NO: 15444 - RNA, 1981 nt, Artificial Sequence
  mRNA product Design a-3 comprising derived and/or modified sequence from HRSV(Memphis-37)__AIY60640.1__F_DSCav1_mut3 (opt3)
gggagagggcgcuuggcuugcaaggacccugagcugcggcauugaagcacacccaacccaacucgacugaagucagccucacugaaccggaucugagaaucuucucucucugggcuugccagggcucuccgaaccuagcuagcauccucuucaauuccaacuagaaagcuuaccauggagcugcccauccucaagaccaacgccauuacaacuauacuugcugcagugacgcugugcuucgccagcucccagaauaucaccgaagaguuuuaccaaucuacauguucagcggucaguaaaggcuauuugggggcuuuaagaacuggaugguacaccagcguuauuacaaucgaacuguccaacauuaaggagaucaaaugcaaugguaccgacgccaaggugaaacuaauaaagcaggaacucgauaaguauaaaaacgcaguaacugaccugcagcuucugaugcagucuacuccugccgcuggcucggggucagcaaucuguagcggaauugccgugugcaaggucuugcaccucgagggcgaggugaauaaaaucaagaacgcucugcugaguaccaauaaagccguugugucccucucuaacggugucagcguguuaacguucaagguacuggaucuuaagaauuacauugacaaacaauugcugccaauccuaaacaagcaguccuguucaauaccgaauauugaaacuguuaucgaguuucagcagaaaaacaauaggcuccuggaaauuacccgggaguucagugugaacgcgggggucacaacucccgugagcaccuauaugcuuacaaauucugagcuguugucccucaucaacgauaugccuaucaccaacgaccaaaagaaacugaugucaaauaacgugcagauuguccgccagcagagcuacaguauaaugugcaucauuaaggaagagguuuuagcauaugugguacaacugccacucuacggagugaucgauacgcccuguuggaaacuucauacuucuccucugugcacaaccaauacuaaggaaggcuccaacauauguuugacacgaaccgaccguggcugguacugcgauaaugccgggagcgucucguuuuucccacaggcugagacguguaaggugcagucuaacagaguuuucugcgacaccaugaacucccuaacacugcccucagaagugaaucucugcaauauugauaucuucaacccuaaauaugacuguaagaucaugacaaguaaaaccgaugucagcuccucugugauuacaagccugggagccaucguaucaugcuacgguaagacuaaauguaccgcaaguaauaagaacaggggcauuauaaagacauuuuccaaugggugcgacuauguuagcaacaaaggaguggacaccgucucugugggcaauacucuuuacugugucaacaagcaagagggucagucacuguaugugaaaggggagccaaucauuaacuucuacgauccguugguuuuucccagugacgaauuugaugcuagcaucucccaggugaaugagaagaucaaccagucucucgccuuuauucggaaaucggacgaacuguuacacaauguaaacgucggaaagagcacgacaaauauaaugaucaccacuauuaucauugugaucauaguuauccugcuacuccugauugcggugggccuuuucuuguauugcaaggcccgcuccaccccugucacacugucaaaagaucaacucaguggcaucaacaauauugcauucucuaacugaggacuagucccuguucccagagcccacuuuuuuuucuuuuuuugaaauaaaauagccugucuuucagaucuaaaaaaaaaaaaaaaaaaaaaaaaaaaaaaaaaaaaaaaaaaaaaaaaaaaaaaaaaaaaaaaaugcaucccccccccccccccccccccccccccccccaaaggcucuuuucagagccaccagaauu

SEQ ID NO: 15445 - RNA, 1981 nt, Artificial Sequence
  mRNA product Design a-3 comprising derived and/or modified sequence from HRSV(Memphis-37)__AIY60640.1__F_DSCav1_mut3 (opt4)
gggagagggcgcuuggcuugcaaggacccugagcugcggcauugaagcacacccaacccaacucgacugaagucagccucacugaaccggaucugagaaucuucucucucugggcuugccagggcucuccgaaccuagcuagcauccucuucaauuccaacuagaaagcuuaccauggagcugcccauccugaagaccaacgccaucaccaccauccuggccgccgugacccugugcuucgccagcagccagaacaucaccgaggaguucuaccagagcaccugcagcgccgugagcaagggcuaccugggcgcccugagaaccggcugguacaccagcgugaucaccaucgagcugagcaacaucaaggagaucaagugcaacggcaccgacgccaaggugaagcugaucaagcaggagcuggacaaguacaagaacgccgugaccgaccugcagcugcugaugcagagcacccccgccgccggcagcggcagcgccaucugcagcggcaucgccgugugcaaggugcugcaccuggagggcgaggugaacaagaucaagaacgcccugcugagcaccaacaaggccguggugagccugagcaacggcgugagcgugcugaccuucaaggugcuggaccugaagaacuacaucgacaagcagcugcugcccauccugaacaagcagagcugcagcauccccaacaucgagaccgugaucgaguuccagcagaagaacaacagacugcuggagaucaccagagaguucagcgugaacgccggcgugaccacccccgugagcaccuacaugcugaccaacagcgagcugcugagccugaucaacgacaugcccaucaccaacgaccagaagaagcugaugagcaacaacgugcagaucgugagacagcagagcuacagcaucaugugcaucaucaaggaggaggugcuggccuacguggugcagcugccccuguacggcgugaucgacacccccugcuggaagcugcacaccagcccccugugcaccaccaacaccaaggagggcagcaacaucugccugaccagaaccgacagaggcugguacugcgacaacgccggcagcgugagcuucuucccccaggccgagaccugcaaggugcagagcaacagaguguucugcgacaccaugaacagccugacccugcccagcgaggugaaccugugcaacaucgacaucuucaaccccaaguacgacugcaagaucaugaccagcaagaccgacgugagcagcagcgugaucaccagccugggcgccaucgugagcugcuacggcaagaccaagugcaccgccagcaacaagaacagaggcaucaucaagaccuucagcaacggcugcgacuacgugagcaacaagggcguggacaccgugagcgugggcaacacccuguacugcgugaacaagcaggagggccagagccuguacgugaagggcgagcccaucaucaacuucuacgacccccugguguuccccagcgacgaguucgacgccagcaucagccaggugaacgagaagaucaaccagagccuggccuucaucagaaagagcgacgagcugcugcacaacgugaacgugggcaagagcaccaccaacaucaugaucaccaccaucaucaucgugaucaucgugauccugcugcugcugaucgccgugggccuguuccuguacugcaaggccagaagcacccccgugacccugagcaaggaccagcugagcggcaucaacaacaucgccuucagcaacugaggacuagucccuguucccagagcccacuuuuuuuucuuuuuuugaaauaaaauagccugucuuucagaucuaaaaaaaaaaaaaaaaaaaaaaaaaaaaaaaaaaaaaaaaaaaaaaaaaaaaaaaaaaaaaaaaugcaucccccccccccccccccccccccccccccccaaaggcucuuuucagagccaccagaauu

SEQ ID NO: 15446 - RNA, 1981 nt, Artificial Sequence
  mRNA product Design a-3 comprising derived and/or modified sequence from HRSV(Memphis-37)__AIY60640.1__F_DSCav1_mut3 (opt5)
gggagagggcgcuuggcuugcaaggacccugagcugcggcauugaagcacacccaacccaacucgacugaagucagccucacugaaccggaucugagaaucuucucucucugggcuugccagggcucuccgaaccuagcuagcauccucuucaauuccaacuagaaagcuuaccauggagcugcccauccucaagaccaacgccauuacaacgauccuggcugccgugacccuuugcuucgcgagcucccagaauauuacagaagaguuuuaccaaucuaccuguagcgcugucuccaaaggcuaucugggggcccucagaacaggaugguacaccucuguuaucacaauugaacugagcaacaucaaggagaucaaaugcaauggcaccgacgccaaggugaaacuuauuaagcaggaacuggauaaguauaaaaacgcugugacggaccuccagcugcugaugcaguccaccccugccgcugggucuggaagcgccaucuguuccggcauugcggucugcaaggugcuccaccuggagggggagguuaauaaaaucaagaacgcccuucugagcacaaauaaagcuguggucucucucuccaacggagugagcguucugaccuucaaggugcuugaucugaagaauuacauugacaaacaacuccugccgauccugaacaagcagucuuguuccauucccaauaucgaaacagucaucgaguuucagcagaaaaacaaucggcuccuggaaauuacccgcgaguucagcgugaacgccggcgugacgacaccugucucuaccuauaugcuuacaaauuccgagcugcucagccugaucaacgauaugcccauuaccaacgaccaaaagaaacuuauguccaauaacguucagaucgugagacagcagucuuacagcauuaugugcaucaucaaggaagaggugcuggcuuaugucgugcaacucccucuguacggcguuauugauacccccuguuggaaacugcauacauccccucucugcacgaccaauacaaaggaagggagcaacaucugucugacccggacagaccgcggaugguacugcgauaaugccggcucuguguccuuuuucccgcaggcggagaccuguaagguccagagcaacagaguguuuugcgacacgaugaacucucuuacacugcccagcgaaguuaaucucugcaauauugauaucuucaacccuaaauaugacuguaagauuaugaccuccaaaaccgaugugucuagcuccgucaucacaagccugggggccaucgugucuugcuacggaaagaccaaauguacagcuuccaauaagaaccggggcauuaucaagacguuuagcaaugggugcgacuaugucucuaacaaaggaguggacaccguuuccgugggcaauacacuuuacugugucaacaagcaagagggccagagccuguaugugaaaggggagcccauuaucaacuucuacgauccucucguuuuucccuccgacgaguucgaugccucuauuagccaggugaaugaaaagaucaaccagucccuggcuuuuauucgcaaaucugacgaacugcuccacaaugucaacgugggaaagagcaccacaaauaucaugaucaccacgauuaucauugugaucauuguuauccugcuucugcucaucgccgucggccuguuccuguauugcaaggccagauccaccccggugacacuuagcaaagaucaacucucugggauuaacaauaucgcuuucuccaacugaggacuagucccuguucccagagcccacuuuuuuuucuuuuuuugaaauaaaauagccugucuuucagaucuaaaaaaaaaaaaaaaaaaaaaaaaaaaaaaaaaaaaaaaaaaaaaaaaaaaaaaaaaaaaaaaaugcaucccccccccccccccccccccccccccccccaaaggcucuuuucagagccaccagaauu

SEQ ID NO: 15447 - RNA, 1981 nt, Artificial Sequence
  mRNA product Design a-3 comprising derived and/or modified sequence from HRSV(Memphis-37)__AIY60640.1__F_DSCav1_mut3 (opt6)
gggagagggcgcuuggcuugcaaggacccugagcugcggcauugaagcacacccaacccaacucgacugaagucagccucacugaaccggaucugagaaucuucucucucugggcuugccagggcucuccgaaccuagcuagcauccucuucaauuccaacuagaaagcuuaccauggaauuaccaauacuaaaaacaaaugccaucaccaccauccuggccgccguaacauuaugcuucgcaaguucacaaaauauaacagaagaauuuuaucaaucaacuugcagcgccguaucaaaaggcuacuuaggcgcacuacguacaggaugguacacaucaguaauaaccauagaacuauccaauauuaaagaaauaaaaugcaauggaacagacgcaaaaguuaaacuaauaaaacaagaauuagacaaauacaaaaacgcaguaaccgaccuucaauuacuaaugcaaucuacccccgcugcagguuccggaucagcaauauguucaggaauugcaguaugcaaaguccuacacuuagaaggagaaguaaacaaaauaaaaaacgcacuauuaagcaccaauaaagcagucguaucauuauccaacggcguuucaguacuaacauuuaaaguacuugaccuaaaaaacuauauagacaaacaacuacuucccauccuuaacaaacaaagcugcucaauaccuaauaucgaaacaguaauagaauuucaacaaaaaaacaaucgauuauuagaaaucacacgagaauuuucugucaacgcaggagucaccacacccguaucuacuuauauguuaaccaacucugaauuauuaucacuaaucaaugacaugccaauaacaaacgaucaaaaaaaauuaaugucaaauaacguacaaauaguaagacaacaaucauacucaauaaugugcauuauaaaagaagaaguacuagccuauguuguacaacucccacucuacggcguaauagacacaccaugcuggaaauuacacacuucaccacuaugcacaacaaacacaaaagaaggaucaaacaucugccuaaccagaaccgauagaggaugguauugcgacaaugccggaucaguuucauucuucccacaagcagaaacaugcaaaguacaauccaacagaguuuucugugacacaaugaacucgcuaacauuacccagcgaaguaaaccucugcaacauagacauauucaacccaaaauacgauugcaaaauaaugacuucuaaaacagauguuuccucaagcgucauaacgaguuuaggagcaauaguaagcuguuacggaaaaaccaaauguaccgcaucaaacaaaaaccgaggaauaauaaaaaccuuuucaaacggaugcgauuacgucuccaacaaaggagucgacacaguaucaguuggcaauacucuuuacugcguaaauaaacaagaaggacaaucacuauacguaaaaggcgaaccaauaauaaacuucuacgacccccucgucuucccuucagaugaauuugacgcaagcaucucacaaguuaaugaaaaaauaaaucaauccuuagcauucauacgaaaaucagacgaacuauuacacaacguaaacguaggaaaaucaacgacaaacauaaugauaacaacuaucauuauagucauaauagucauacuacuacuauuaauagccguaggcuuauuccuauacugcaaagcaagaucuacuccaguaacacucucaaaagaccaauuaucuggaauaaauaacauagcauucucuaauuaaggacuagucccuguucccagagcccacuuuuuuuucuuuuuuugaaauaaaauagccugucuuucagaucuaaaaaaaaaaaaaaaaaaaaaaaaaaaaaaaaaaaaaaaaaaaaaaaaaaaaaaaaaaaaaaaaugcaucccccccccccccccccccccccccccccccaaaggcucuuuucagagccaccagaauu

SEQ ID NO: 15448 - RNA, 1981 nt, Artificial Sequence
  mRNA product Design a-3 comprising derived and/or modified sequence from HRSV(Memphis-37)__AIY60640.1__F_DSCav1_mut3 (opt11)
gggagagggcgcuuggcuugcaaggacccugagcugcggcauugaagcacacccaacccaacucgacugaagucagccucacugaaccggaucugagaaucuucucucucugggcuugccagggcucuccgaaccuagcuagcauccucuucaauuccaacuagaaagcuuaccauggaacuccccauccucaaaaccaacgccauuaccacgauccucgccgcagucacccucugcuucgccuccucacaaaacaucacagaagaauuuuaccaaaguaccugcuccgccgucagcaaaggauaccucggcgcccuccgcaccggcugguacacauccgucauaaccaucgaacucagcaacaucaaagaaaucaaauguaacggaaccgacgccaaaguaaaacuaauaaaacaagaacucgacaaauacaagaacgccgucaccgaccuccaacuccucaugcaaucuacccccgccgccggcucagguagcgccaucugcagcgguauugccgucugcaaaguacuccaccuagaaggagaagucaauaaaaucaaaaacgcccuacucuccaccaacaaggcagucgucagccucuccaacggcgucucagucuuaaccuucaaagugcucgaccucaaaaauuacauagacaaacaacuacuccccauucucaacaaacaauccugcuccauacccaacauagaaaccgucauugaauuucaacagaaaaacaaccgccuccucgaaaucacgcgcgaguucagugucaacgccggcgucaccaccccagucucgacauacaugcucacaaacucagaacuccucucguuaaucaacgacaugccaauaaccaacgaccaaaagaaacuaauguccaacaacguucaaauaguucgccaacaaucauacuccauaaugugcaucaucaaagaagaaguccucgccuacguuguacaauuaccccucuacggcgucaucgacacaccaugcuggaaacuccacacaucgccccucugcaccaccaacaccaaagaaggcagcaacauuugccucacccggacagaccgcggcugguacugcgacaaugcaggcagcgucucauucuucccacaagccgaaaccugcaaaguccaaagcaaccgugucuucugcgacacaaugaacucccuuacccucccaagcgaaguaaaccucugcaauauugacaucuucaaccccaaauacgacugcaaaaucaugaccuccaaaaccgacgucuccucaucagucaucaccucccuuggcgccauugucuccuguuacgguaaaaccaaaugcaccgccuccaacaaaaaccgcggcaucaucaaaaccuucucuaacggcugcgacuacgucucaaacaaaggcgucgacacugucuccgucggcaacacccuauacugcgucaacaagcaagaaggacagucccuauacguaaaaggugaaccaauuaucaacuucuacgacccccuagucuucccauccgacgaguucgaugccuccaucucccaaguaaaugaaaagaucaaucaaagccuggccuucauccgcaaauccgacgaacuacuccacaaugucaacgucggaaaaucaacaacaaacaucaugaucaccaccaucaucaucgucaucauaguaauccuccuacugcucaucgccgucggucucuuccuauacugcaaagcccguucuacuccagucacccucuccaaagaccaacuaucaggaaucaacaacaucgccuucagcaacuaaggacuagucccuguucccagagcccacuuuuuuuucuuuuuuugaaauaaaauagccugucuuucagaucuaaaaaaaaaaaaaaaaaaaaaaaaaaaaaaaaaaaaaaaaaaaaaaaaaaaaaaaaaaaaaaaaugcaucccccccccccccccccccccccccccccccaaaggcucuuuucagagccaccagaauu

SEQ ID NO: 15449 - RNA, 1930 nt, Artificial Sequence
  mRNA product Design a-4 comprising derived and/or modified sequence from HRSV(Memphis-37)__AIY60640.1__F_DSCav1_mut3 (opt1)
gggagacuccugucgggcggaaguaggaggaguagaguuuaaaaacaguacucuuuuuccgguucgggacguaguugaagcaacgacaagccggauaaccgcucuugagacaggaagcuuaccauggagcugcccauccucaagaccaacgccaucaccacgauccuggccgcggugacccugugcuucgccagcucccagaacaucaccgaggaguucuaccagagcacgugcuccgccgucagcaagggcuaccucggcgcccugcgcaccgggugguacaccagcgugaucaccaucgagcuguccaacaucaaggagaucaagugcaacggcaccgacgccaaggugaagcucaucaagcaggagcuggacaaguacaagaacgcggucacggaccugcagcuccugaugcagagcaccccggccgccggcuccgggagcgcgaucugcuccggcaucgccgucugcaaggugcugcaccucgagggcgaggugaacaagaucaagaacgcccugcuguccaccaacaaggccgucgugagccucuccaacggggugagcguccugaccuucaaggugcuggaccucaagaacuacaucgacaagcagcugcugcccauccugaacaagcagagcugcuccauccccaacaucgagaccgucaucgaguuccagcagaagaacaaccgccuccuggagaucacgcgggaguucagcgugaacgcgggcgugaccacccccgucuccaccuacaugcugacgaacagcgagcuccugucccugaucaacgacaugccgaucaccaacgaccagaagaagcucaugagcaacaacgugcagaucgugcgccagcaguccuacagcaucaugugcaucaucaaggaggagguccuggccuacguggugcagcugccccucuacggggucaucgacacccccugcuggaagcugcacaccagcccccugugcacgaccaacaccaaggagggcuccaacaucugccucacccggacggaccgcgggugguacugcgacaacgccggcagcguguccuucuucccgcaggccgagaccugcaagguccagagcaaccggguguucugcgacaccaugaacucccugacccugcccagcgaggugaaccucugcaacaucgacaucuucaaccccaaguacgacugcaagaucaugacguccaagaccgacgucagcuccagcgugaucaccucccugggcgccaucgugagcugcuacgggaagaccaagugcacggcgagcaacaagaaccgcggcaucaucaagaccuucuccaacgggugcgacuacgucagcaacaagggcguggacaccguguccgucggcaacacccuguacugcgugaacaagcaggagggccagagccucuacgugaagggggagcccaucaucaacuucuacgacccgcuggucuuccccuccgacgaguucgacgccagcaucucccaggugaacgagaagaucaaccagagccuggccuucauccggaaguccgacgagcuccugcacaacgugaacgucggcaagagcaccacgaacaucaugaucaccaccaucaucaucgugaucaucgugauccugcugcuccugaucgccgucgggcuguuccucuacugcaaggcccgcuccacccccgugacgcugagcaaggaccagcuguccgggaucaacaacaucgcguucagcaacugaggacuagucccuguucccagagcccacuuuuuuuucuuuuuuugaaauaaaauagccugucuuucagaucuaaaaaaaaaaaaaaaaaaaaaaaaaaaaaaaaaaaaaaaaaaaaaaaaaaaaaaaaaaaaaaaaugcaucccccccccccccccccccccccccccccccaaaggcucuuuucagagccaccagaauu

SEQ ID NO: 15450 - RNA, 1930 nt, Artificial Sequence
  mRNA product Design a-4 comprising derived and/or modified sequence from HRSV(Memphis-37)__AIY60640.1__F_DSCav1_mut3 (opt1)
gggagacuccugucgggcggaaguaggaggaguagaguuuaaaaacaguacucuuuuuccgguucgggacguaguugaagcaacgacaagccggauaaccgcucuugagacaggaagcuuaccauggagcugcccauccucaagaccaacgccaucaccacgauccuggccgcggugacccugugcuucgccagcucccagaacaucaccgaggaguucuaccagagcacgugcuccgccgucagcaagggcuaccucggggcccugcgcaccggcugguacaccuccgugaucaccaucgagcugagcaacaucaaggagaucaagugcaacgggaccgacgccaaggugaagcucaucaagcaggagcuggacaaguacaagaacgcggucacggaccugcagcuccugaugcaguccaccccggccgccggcagcggguccgccaucugcagcggcaucgcggugugcaaggugcugcaccucgagggcgaggucaacaagaucaagaacgcccugcuguccaccaacaaggccguggugagccucuccaacggggucagcgugcugaccuucaaggugcuggaccucaagaacuacaucgacaagcagcugcugcccauccucaacaagcaguccugcagcauccccaacaucgagacggucaucgaguuccagcagaagaacaaccggcugcuggagaucacccgcgaguucuccgugaacgccggcgugaccacccccgucagcacguacaugcucaccaacuccgagcugcugagccucaucaacgacaugccgaucaccaacgaccagaagaagcugaugagcaacaacgugcagaucgugcggcagcaguccuacagcaucaugugcaucaucaaggaggagguccuggccuacguggugcagcucccccuguacggggucaucgacacccccugcuggaagcugcacacgagcccccucugcaccaccaacaccaaggagggcuccaacaucugccugacgcgcaccgaccgggggugguacugcgacaacgcgggcuccgugagcuucuucccgcaggccgagaccugcaaggugcaguccaaccgcgucuucugcgacaccaugaacagccugacgcuccccuccgaggugaaccugugcaacaucgacaucuucaaccccaaguacgacugcaagaucaugaccagcaagaccgacgucuccagcuccgugaucaccagccugggcgccaucguguccugcuacgggaagacgaagugcaccgccagcaacaagaaccggggcaucaucaagaccuucuccaacgggugcgacuacgucagcaacaagggcguggacaccguguccgucggcaacacgcucuacugcgugaacaagcaggaggggcagagccuguacgugaagggcgagcccaucaucaacuucuacgacccgcuggucuuccccagcgacgaguucgacgccuccaucagccaggugaacgagaagaucaaccagucccucgcguucauccgcaagagcgacgagcugcugcacaacgugaacgucgggaaguccaccaccaacaucaugaucaccaccaucaucaucgugaucaucgugauccuccugcugcucaucgccgucggccuguuccuguacugcaaggcccggagcacgcccgugacccuguccaaggaccagcucagcgggaucaacaacaucgccuucuccaacugaggacuagucccuguucccagagcccacuuuuuuuucuuuuuuugaaauaaaauagccugucuuucagaucuaaaaaaaaaaaaaaaaaaaaaaaaaaaaaaaaaaaaaaaaaaaaaaaaaaaaaaaaaaaaaaaaugcaucccccccccccccccccccccccccccccccaaaggcucuuuucagagccaccagaauu

SEQ ID NO: 15451 - RNA, 1930 nt, Artificial Sequence
  mRNA product Design a-4 comprising derived and/or modified sequence from HRSV(Memphis-37)__AIY60640.1__F_DSCav1_mut3 (opt2)
gggagacuccugucgggcggaaguaggaggaguagaguuuaaaaacaguacucuuuuuccgguucgggacguaguugaagcaacgacaagccggauaaccgcucuugagacaggaagcuuaccauggagcuccccauccucaagaccaacgccaucaccaccauccucgccgccgucacccucugcuucgccuccucccagaacaucaccgaggaguucuaccaguccaccugcuccgccgucuccaagggcuaccucggcgcccuccgcaccggcugguacaccuccgucaucaccaucgagcucuccaacaucaaggagaucaagugcaacggcaccgacgccaaggucaagcucaucaagcaggagcucgacaaguacaagaacgccgucaccgaccuccagcuccucaugcaguccacccccgccgccggcuccggcuccgccaucugcuccggcaucgccgucugcaagguccuccaccucgagggcgaggucaacaagaucaagaacgcccuccucuccaccaacaaggccgucgucucccucuccaacggcgucuccguccucaccuucaagguccucgaccucaagaacuacaucgacaagcagcuccuccccauccucaacaagcaguccugcuccauccccaacaucgagaccgucaucgaguuccagcagaagaacaaccgccuccucgagaucacccgcgaguucuccgucaacgccggcgucaccacccccgucuccaccuacaugcucaccaacuccgagcuccucucccucaucaacgacaugcccaucaccaacgaccagaagaagcucauguccaacaacguccagaucguccgccagcaguccuacuccaucaugugcaucaucaaggaggagguccucgccuacgucguccagcucccccucuacggcgucaucgacacccccugcuggaagcuccacaccuccccccucugcaccaccaacaccaaggagggcuccaacaucugccucacccgcaccgaccgcggcugguacugcgacaacgccggcuccgucuccuucuucccccaggccgagaccugcaagguccaguccaaccgcgucuucugcgacaccaugaacucccucacccuccccuccgaggucaaccucugcaacaucgacaucuucaaccccaaguacgacugcaagaucaugaccuccaagaccgacgucuccuccuccgucaucaccucccucggcgccaucgucuccugcuacggcaagaccaagugcaccgccuccaacaagaaccgcggcaucaucaagaccuucuccaacggcugcgacuacgucuccaacaagggcgucgacaccgucuccgucggcaacacccucuacugcgucaacaagcaggagggccagucccucuacgucaagggcgagcccaucaucaacuucuacgacccccucgucuuccccuccgacgaguucgacgccuccaucucccaggucaacgagaagaucaaccagucccucgccuucauccgcaaguccgacgagcuccuccacaacgucaacgucggcaaguccaccaccaacaucaugaucaccaccaucaucaucgucaucaucgucauccuccuccuccucaucgccgucggccucuuccucuacugcaaggcccgcuccacccccgucacccucuccaaggaccagcucuccggcaucaacaacaucgccuucuccaacugaggacuagucccuguucccagagcccacuuuuuuuucuuuuuuugaaauaaaauagccugucuuucagaucuaaaaaaaaaaaaaaaaaaaaaaaaaaaaaaaaaaaaaaaaaaaaaaaaaaaaaaaaaaaaaaaaugcaucccccccccccccccccccccccccccccccaaaggcucuuuucagagccaccagaauu

SEQ ID NO: 15452 - RNA, 1930 nt, Artificial Sequence
  mRNA product Design a-4 comprising derived and/or modified sequence from HRSV(Memphis-37)__AIY60640.1__F_DSCav1_mut3 (opt3)
gggagacuccugucgggcggaaguaggaggaguagaguuuaaaaacaguacucuuuuuccgguucgggacguaguugaagcaacgacaagccggauaaccgcucuugagacaggaagcuuaccauggagcugcccauccucaagaccaacgccauuacaacuauacuugcugcagugacgcugugcuucgccagcucccagaauaucaccgaagaguuuuaccaaucuacauguucagcggucaguaaaggcuauuugggggcuuuaagaacuggaugguacaccagcguuauuacaaucgaacuguccaacauuaaggagaucaaaugcaaugguaccgacgccaaggugaaacuaauaaagcaggaacucgauaaguauaaaaacgcaguaacugaccugcagcuucugaugcagucuacuccugccgcuggcucggggucagcaaucuguagcggaauugccgugugcaaggucuugcaccucgagggcgaggugaauaaaaucaagaacgcucugcugaguaccaauaaagccguugugucccucucuaacggugucagcguguuaacguucaagguacuggaucuuaagaauuacauugacaaacaauugcugccaauccuaaacaagcaguccuguucaauaccgaauauugaaacuguuaucgaguuucagcagaaaaacaauaggcuccuggaaauuacccgggaguucagugugaacgcgggggucacaacucccgugagcaccuauaugcuuacaaauucugagcuguugucccucaucaacgauaugccuaucaccaacgaccaaaagaaacugaugucaaauaacgugcagauuguccgccagcagagcuacaguauaaugugcaucauuaaggaagagguuuuagcauaugugguacaacugccacucuacggagugaucgauacgcccuguuggaaacuucauacuucuccucugugcacaaccaauacuaaggaaggcuccaacauauguuugacacgaaccgaccguggcugguacugcgauaaugccgggagcgucucguuuuucccacaggcugagacguguaaggugcagucuaacagaguuuucugcgacaccaugaacucccuaacacugcccucagaagugaaucucugcaauauugauaucuucaacccuaaauaugacuguaagaucaugacaaguaaaaccgaugucagcuccucugugauuacaagccugggagccaucguaucaugcuacgguaagacuaaauguaccgcaaguaauaagaacaggggcauuauaaagacauuuuccaaugggugcgacuauguuagcaacaaaggaguggacaccgucucugugggcaauacucuuuacugugucaacaagcaagagggucagucacuguaugugaaaggggagccaaucauuaacuucuacgauccguugguuuuucccagugacgaauuugaugcuagcaucucccaggugaaugagaagaucaaccagucucucgccuuuauucggaaaucggacgaacuguuacacaauguaaacgucggaaagagcacgacaaauauaaugaucaccacuauuaucauugugaucauaguuauccugcuacuccugauugcggugggccuuuucuuguauugcaaggcccgcuccaccccugucacacugucaaaagaucaacucaguggcaucaacaauauugcauucucuaacugaggacuagucccuguucccagagcccacuuuuuuuucuuuuuuugaaauaaaauagccugucuuucagaucuaaaaaaaaaaaaaaaaaaaaaaaaaaaaaaaaaaaaaaaaaaaaaaaaaaaaaaaaaaaaaaaaugcaucccccccccccccccccccccccccccccccaaaggcucuuuucagagccaccagaauu

SEQ ID NO: 15453 - RNA, 1930 nt, Artificial Sequence
  mRNA product Design a-4 comprising derived and/or modified sequence from HRSV(Memphis-37)__AIY60640.1__F_DSCav1_mut3 (opt4)
gggagacuccugucgggcggaaguaggaggaguagaguuuaaaaacaguacucuuuuuccgguucgggacguaguugaagcaacgacaagccggauaaccgcucuugagacaggaagcuuaccauggagcugcccauccugaagaccaacgccaucaccaccauccuggccgccgugacccugugcuucgccagcagccagaacaucaccgaggaguucuaccagagcaccugcagcgccgugagcaagggcuaccugggcgcccugagaaccggcugguacaccagcgugaucaccaucgagcugagcaacaucaaggagaucaagugcaacggcaccgacgccaaggugaagcugaucaagcaggagcuggacaaguacaagaacgccgugaccgaccugcagcugcugaugcagagcacccccgccgccggcagcggcagcgccaucugcagcggcaucgccgugugcaaggugcugcaccuggagggcgaggugaacaagaucaagaacgcccugcugagcaccaacaaggccguggugagccugagcaacggcgugagcgugcugaccuucaaggugcuggaccugaagaacuacaucgacaagcagcugcugcccauccugaacaagcagagcugcagcauccccaacaucgagaccgugaucgaguuccagcagaagaacaacagacugcuggagaucaccagagaguucagcgugaacgccggcgugaccacccccgugagcaccuacaugcugaccaacagcgagcugcugagccugaucaacgacaugcccaucaccaacgaccagaagaagcugaugagcaacaacgugcagaucgugagacagcagagcuacagcaucaugugcaucaucaaggaggaggugcuggccuacguggugcagcugccccuguacggcgugaucgacacccccugcuggaagcugcacaccagcccccugugcaccaccaacaccaaggagggcagcaacaucugccugaccagaaccgacagaggcugguacugcgacaacgccggcagcgugagcuucuucccccaggccgagaccugcaaggugcagagcaacagaguguucugcgacaccaugaacagccugacccugcccagcgaggugaaccugugcaacaucgacaucuucaaccccaaguacgacugcaagaucaugaccagcaagaccgacgugagcagcagcgugaucaccagccugggcgccaucgugagcugcuacggcaagaccaagugcaccgccagcaacaagaacagaggcaucaucaagaccuucagcaacggcugcgacuacgugagcaacaagggcguggacaccgugagcgugggcaacacccuguacugcgugaacaagcaggagggccagagccuguacgugaagggcgagcccaucaucaacuucuacgacccccugguguuccccagcgacgaguucgacgccagcaucagccaggugaacgagaagaucaaccagagccuggccuucaucagaaagagcgacgagcugcugcacaacgugaacgugggcaagagcaccaccaacaucaugaucaccaccaucaucaucgugaucaucgugauccugcugcugcugaucgccgugggccuguuccuguacugcaaggccagaagcacccccgugacccugagcaaggaccagcugagcggcaucaacaacaucgccuucagcaacugaggacuagucccuguucccagagcccacuuuuuuuucuuuuuuugaaauaaaauagccugucuuucagaucuaaaaaaaaaaaaaaaaaaaaaaaaaaaaaaaaaaaaaaaaaaaaaaaaaaaaaaaaaaaaaaaaugcaucccccccccccccccccccccccccccccccaaaggcucuuuucagagccaccagaauu

SEQ ID NO: 15454 - RNA, 1930 nt, Artificial Sequence
  mRNA product Design a-4 comprising derived and/or modified sequence from HRSV(Memphis-37)__AIY60640.1__F_DSCav1_mut3 (opt5)
gggagacuccugucgggcggaaguaggaggaguagaguuuaaaaacaguacucuuuuuccgguucgggacguaguugaagcaacgacaagccggauaaccgcucuugagacaggaagcuuaccauggagcugcccauccucaagaccaacgccauuacaacgauccuggcugccgugacccuuugcuucgcgagcucccagaauauuacagaagaguuuuaccaaucuaccuguagcgcugucuccaaaggcuaucugggggcccucagaacaggaugguacaccucuguuaucacaauugaacugagcaacaucaaggagaucaaaugcaauggcaccgacgccaaggugaaacuuauuaagcaggaacuggauaaguauaaaaacgcugugacggaccuccagcugcugaugcaguccaccccugccgcugggucuggaagcgccaucuguuccggcauugcggucugcaaggugcuccaccuggagggggagguuaauaaaaucaagaacgcccuucugagcacaaauaaagcuguggucucucucuccaacggagugagcguucugaccuucaaggugcuugaucugaagaauuacauugacaaacaacuccugccgauccugaacaagcagucuuguuccauucccaauaucgaaacagucaucgaguuucagcagaaaaacaaucggcuccuggaaauuacccgcgaguucagcgugaacgccggcgugacgacaccugucucuaccuauaugcuuacaaauuccgagcugcucagccugaucaacgauaugcccauuaccaacgaccaaaagaaacuuauguccaauaacguucagaucgugagacagcagucuuacagcauuaugugcaucaucaaggaagaggugcuggcuuaugucgugcaacucccucuguacggcguuauugauacccccuguuggaaacugcauacauccccucucugcacgaccaauacaaaggaagggagcaacaucugucugacccggacagaccgcggaugguacugcgauaaugccggcucuguguccuuuuucccgcaggcggagaccuguaagguccagagcaacagaguguuuugcgacacgaugaacucucuuacacugcccagcgaaguuaaucucugcaauauugauaucuucaacccuaaauaugacuguaagauuaugaccuccaaaaccgaugugucuagcuccgucaucacaagccugggggccaucgugucuugcuacggaaagaccaaauguacagcuuccaauaagaaccggggcauuaucaagacguuuagcaaugggugcgacuaugucucuaacaaaggaguggacaccguuuccgugggcaauacacuuuacugugucaacaagcaagagggccagagccuguaugugaaaggggagcccauuaucaacuucuacgauccucucguuuuucccuccgacgaguucgaugccucuauuagccaggugaaugaaaagaucaaccagucccuggcuuuuauucgcaaaucugacgaacugcuccacaaugucaacgugggaaagagcaccacaaauaucaugaucaccacgauuaucauugugaucauuguuauccugcuucugcucaucgccgucggccuguuccuguauugcaaggccagauccaccccggugacacuuagcaaagaucaacucucugggauuaacaauaucgcuuucuccaacugaggacuagucccuguucccagagcccacuuuuuuuucuuuuuuugaaauaaaauagccugucuuucagaucuaaaaaaaaaaaaaaaaaaaaaaaaaaaaaaaaaaaaaaaaaaaaaaaaaaaaaaaaaaaaaaaaugcaucccccccccccccccccccccccccccccccaaaggcucuuuucagagccaccagaauu

SEQ ID NO: 15455 - RNA, 1930 nt, Artificial Sequence
  mRNA product Design a-4 comprising derived and/or modified sequence from HRSV(Memphis-37)__AIY60640.1__F_DSCav1_mut3 (opt6)
gggagacuccugucgggcggaaguaggaggaguagaguuuaaaaacaguacucuuuuuccgguucgggacguaguugaagcaacgacaagccggauaaccgcucuugagacaggaagcuuaccauggaauuaccaauacuaaaaacaaaugccaucaccaccauccuggccgccguaacauuaugcuucgcaaguucacaaaauauaacagaagaauuuuaucaaucaacuugcagcgccguaucaaaaggcuacuuaggcgcacuacguacaggaugguacacaucaguaauaaccauagaacuauccaauauuaaagaaauaaaaugcaauggaacagacgcaaaaguuaaacuaauaaaacaagaauuagacaaauacaaaaacgcaguaaccgaccuucaauuacuaaugcaaucuacccccgcugcagguuccggaucagcaauauguucaggaauugcaguaugcaaaguccuacacuuagaaggagaaguaaacaaaauaaaaaacgcacuauuaagcaccaauaaagcagucguaucauuauccaacggcguuucaguacuaacauuuaaaguacuugaccuaaaaaacuauauagacaaacaacuacuucccauccuuaacaaacaaagcugcucaauaccuaauaucgaaacaguaauagaauuucaacaaaaaaacaaucgauuauuagaaaucacacgagaauuuucugucaacgcaggagucaccacacccguaucuacuuauauguuaaccaacucugaauuauuaucacuaaucaaugacaugccaauaacaaacgaucaaaaaaaauuaaugucaaauaacguacaaauaguaagacaacaaucauacucaauaaugugcauuauaaaagaagaaguacuagccuauguuguacaacucccacucuacggcguaauagacacaccaugcuggaaauuacacacuucaccacuaugcacaacaaacacaaaagaaggaucaaacaucugccuaaccagaaccgauagaggaugguauugcgacaaugccggaucaguuucauucuucccacaagcagaaacaugcaaaguacaauccaacagaguuuucugugacacaaugaacucgcuaacauuacccagcgaaguaaaccucugcaacauagacauauucaacccaaaauacgauugcaaaauaaugacuucuaaaacagauguuuccucaagcgucauaacgaguuuaggagcaauaguaagcuguuacggaaaaaccaaauguaccgcaucaaacaaaaaccgaggaauaauaaaaaccuuuucaaacggaugcgauuacgucuccaacaaaggagucgacacaguaucaguuggcaauacucuuuacugcguaaauaaacaagaaggacaaucacuauacguaaaaggcgaaccaauaauaaacuucuacgacccccucgucuucccuucagaugaauuugacgcaagcaucucacaaguuaaugaaaaaauaaaucaauccuuagcauucauacgaaaaucagacgaacuauuacacaacguaaacguaggaaaaucaacgacaaacauaaugauaacaacuaucauuauagucauaauagucauacuacuacuauuaauagccguaggcuuauuccuauacugcaaagcaagaucuacuccaguaacacucucaaaagaccaauuaucuggaauaaauaacauagcauucucuaauuaaggacuagucccuguucccagagcccacuuuuuuuucuuuuuuugaaauaaaauagccugucuuucagaucuaaaaaaaaaaaaaaaaaaaaaaaaaaaaaaaaaaaaaaaaaaaaaaaaaaaaaaaaaaaaaaaaugcaucccccccccccccccccccccccccccccccaaaggcucuuuucagagccaccagaauu

SEQ ID NO: 15456 - RNA, 1930 nt, Artificial Sequence
  mRNA product Design a-4 comprising derived and/or modified sequence from HRSV(Memphis-37)__AIY60640.1__F_DSCav1_mut3 (opt11)
gggagacuccugucgggcggaaguaggaggaguagaguuuaaaaacaguacucuuuuuccgguucgggacguaguugaagcaacgacaagccggauaaccgcucuugagacaggaagcuuaccauggaacuccccauccucaaaaccaacgccauuaccacgauccucgccgcagucacccucugcuucgccuccucacaaaacaucacagaagaauuuuaccaaaguaccugcuccgccgucagcaaaggauaccucggcgcccuccgcaccggcugguacacauccgucauaaccaucgaacucagcaacaucaaagaaaucaaauguaacggaaccgacgccaaaguaaaacuaauaaaacaagaacucgacaaauacaagaacgccgucaccgaccuccaacuccucaugcaaucuacccccgccgccggcucagguagcgccaucugcagcgguauugccgucugcaaaguacuccaccuagaaggagaagucaauaaaaucaaaaacgcccuacucuccaccaacaaggcagucgucagccucuccaacggcgucucagucuuaaccuucaaagugcucgaccucaaaaauuacauagacaaacaacuacuccccauucucaacaaacaauccugcuccauacccaacauagaaaccgucauugaauuucaacagaaaaacaaccgccuccucgaaaucacgcgcgaguucagugucaacgccggcgucaccaccccagucucgacauacaugcucacaaacucagaacuccucucguuaaucaacgacaugccaauaaccaacgaccaaaagaaacuaauguccaacaacguucaaauaguucgccaacaaucauacuccauaaugugcaucaucaaagaagaaguccucgccuacguuguacaauuaccccucuacggcgucaucgacacaccaugcuggaaacuccacacaucgccccucugcaccaccaacaccaaagaaggcagcaacauuugccucacccggacagaccgcggcugguacugcgacaaugcaggcagcgucucauucuucccacaagccgaaaccugcaaaguccaaagcaaccgugucuucugcgacacaaugaacucccuuacccucccaagcgaaguaaaccucugcaauauugacaucuucaaccccaaauacgacugcaaaaucaugaccuccaaaaccgacgucuccucaucagucaucaccucccuuggcgccauugucuccuguuacgguaaaaccaaaugcaccgccuccaacaaaaaccgcggcaucaucaaaaccuucucuaacggcugcgacuacgucucaaacaaaggcgucgacacugucuccgucggcaacacccuauacugcgucaacaagcaagaaggacagucccuauacguaaaaggugaaccaauuaucaacuucuacgacccccuagucuucccauccgacgaguucgaugccuccaucucccaaguaaaugaaaagaucaaucaaagccuggccuucauccgcaaauccgacgaacuacuccacaaugucaacgucggaaaaucaacaacaaacaucaugaucaccaccaucaucaucgucaucauaguaauccuccuacugcucaucgccgucggucucuuccuauacugcaaagcccguucuacuccagucacccucuccaaagaccaacuaucaggaaucaacaacaucgccuucagcaacuaaggacuagucccuguucccagagcccacuuuuuuuucuuuuuuugaaauaaaauagccugucuuucagaucuaaaaaaaaaaaaaaaaaaaaaaaaaaaaaaaaaaaaaaaaaaaaaaaaaaaaaaaaaaaaaaaaugcaucccccccccccccccccccccccccccccccaaaggcucuuuucagagccaccagaauu

SEQ ID NO: 15457 - RNA, 1876 nt, Artificial Sequence
  mRNA product Design a-5 comprising derived and/or modified sequence from HRSV(Memphis-37)__AIY60640.1__F_DSCav1_mut3 (opt1)
gggagacuuucccauucuguagcagaauuugguguugccuguggucuuggucccgcggagaagcuuaccauggagcugcccauccucaagaccaacgccaucaccacgauccuggccgcggugacccugugcuucgccagcucccagaacaucaccgaggaguucuaccagagcacgugcuccgccgucagcaagggcuaccucggcgcccugcgcaccgggugguacaccagcgugaucaccaucgagcuguccaacaucaaggagaucaagugcaacggcaccgacgccaaggugaagcucaucaagcaggagcuggacaaguacaagaacgcggucacggaccugcagcuccugaugcagagcaccccggccgccggcuccgggagcgcgaucugcuccggcaucgccgucugcaaggugcugcaccucgagggcgaggugaacaagaucaagaacgcccugcuguccaccaacaaggccgucgugagccucuccaacggggugagcguccugaccuucaaggugcuggaccucaagaacuacaucgacaagcagcugcugcccauccugaacaagcagagcugcuccauccccaacaucgagaccgucaucgaguuccagcagaagaacaaccgccuccuggagaucacgcgggaguucagcgugaacgcgggcgugaccacccccgucuccaccuacaugcugacgaacagcgagcuccugucccugaucaacgacaugccgaucaccaacgaccagaagaagcucaugagcaacaacgugcagaucgugcgccagcaguccuacagcaucaugugcaucaucaaggaggagguccuggccuacguggugcagcugccccucuacggggucaucgacacccccugcuggaagcugcacaccagcccccugugcacgaccaacaccaaggagggcuccaacaucugccucacccggacggaccgcgggugguacugcgacaacgccggcagcguguccuucuucccgcaggccgagaccugcaagguccagagcaaccggguguucugcgacaccaugaacucccugacccugcccagcgaggugaaccucugcaacaucgacaucuucaaccccaaguacgacugcaagaucaugacguccaagaccgacgucagcuccagcgugaucaccucccugggcgccaucgugagcugcuacgggaagaccaagugcacggcgagcaacaagaaccgcggcaucaucaagaccuucuccaacgggugcgacuacgucagcaacaagggcguggacaccguguccgucggcaacacccuguacugcgugaacaagcaggagggccagagccucuacgugaagggggagcccaucaucaacuucuacgacccgcuggucuuccccuccgacgaguucgacgccagcaucucccaggugaacgagaagaucaaccagagccuggccuucauccggaaguccgacgagcuccugcacaacgugaacgucggcaagagcaccacgaacaucaugaucaccaccaucaucaucgugaucaucgugauccugcugcuccugaucgccgucgggcuguuccucuacugcaaggcccgcuccacccccgugacgcugagcaaggaccagcuguccgggaucaacaacaucgcguucagcaacugaggacuagucccuguucccagagcccacuuuuuuuucuuuuuuugaaauaaaauagccugucuuucagaucuaaaaaaaaaaaaaaaaaaaaaaaaaaaaaaaaaaaaaaaaaaaaaaaaaaaaaaaaaaaaaaaaugcaucccccccccccccccccccccccccccccccaaaggcucuuuucagagccaccagaauu

SEQ ID NO: 15458 - RNA, 1876 nt, Artificial Sequence
  mRNA product Design a-5 comprising derived and/or modified sequence from HRSV(Memphis-37)__AIY60640.1__F_DSCav1_mut3 (opt1)
gggagacuuucccauucuguagcagaauuugguguugccuguggucuuggucccgcggagaagcuuaccauggagcugcccauccucaagaccaacgccaucaccacgauccuggccgcggugacccugugcuucgccagcucccagaacaucaccgaggaguucuaccagagcacgugcuccgccgucagcaagggcuaccucggggcccugcgcaccggcugguacaccuccgugaucaccaucgagcugagcaacaucaaggagaucaagugcaacgggaccgacgccaaggugaagcucaucaagcaggagcuggacaaguacaagaacgcggucacggaccugcagcuccugaugcaguccaccccggccgccggcagcggguccgccaucugcagcggcaucgcggugugcaaggugcugcaccucgagggcgaggucaacaagaucaagaacgcccugcuguccaccaacaaggccguggugagccucuccaacggggucagcgugcugaccuucaaggugcuggaccucaagaacuacaucgacaagcagcugcugcccauccucaacaagcaguccugcagcauccccaacaucgagacggucaucgaguuccagcagaagaacaaccggcugcuggagaucacccgcgaguucuccgugaacgccggcgugaccacccccgucagcacguacaugcucaccaacuccgagcugcugagccucaucaacgacaugccgaucaccaacgaccagaagaagcugaugagcaacaacgugcagaucgugcggcagcaguccuacagcaucaugugcaucaucaaggaggagguccuggccuacguggugcagcucccccuguacggggucaucgacacccccugcuggaagcugcacacgagcccccucugcaccaccaacaccaaggagggcuccaacaucugccugacgcgcaccgaccgggggugguacugcgacaacgcgggcuccgugagcuucuucccgcaggccgagaccugcaaggugcaguccaaccgcgucuucugcgacaccaugaacagccugacgcuccccuccgaggugaaccugugcaacaucgacaucuucaaccccaaguacgacugcaagaucaugaccagcaagaccgacgucuccagcuccgugaucaccagccugggcgccaucguguccugcuacgggaagacgaagugcaccgccagcaacaagaaccggggcaucaucaagaccuucuccaacgggugcgacuacgucagcaacaagggcguggacaccguguccgucggcaacacgcucuacugcgugaacaagcaggaggggcagagccuguacgugaagggcgagcccaucaucaacuucuacgacccgcuggucuuccccagcgacgaguucgacgccuccaucagccaggugaacgagaagaucaaccagucccucgcguucauccgcaagagcgacgagcugcugcacaacgugaacgucgggaaguccaccaccaacaucaugaucaccaccaucaucaucgugaucaucgugauccuccugcugcucaucgccgucggccuguuccuguacugcaaggcccggagcacgcccgugacccuguccaaggaccagcucagcgggaucaacaacaucgccuucuccaacugaggacuagucccuguucccagagcccacuuuuuuuucuuuuuuugaaauaaaauagccugucuuucagaucuaaaaaaaaaaaaaaaaaaaaaaaaaaaaaaaaaaaaaaaaaaaaaaaaaaaaaaaaaaaaaaaaugcaucccccccccccccccccccccccccccccccaaaggcucuuuucagagccaccagaauu

SEQ ID NO: 15459 - RNA, 1876 nt, Artificial Sequence
  mRNA product Design a-5 comprising derived and/or modified sequence from HRSV(Memphis-37)__AIY60640.1__F_DSCav1_mut3 (opt2)
gggagacuuucccauucuguagcagaauuugguguugccuguggucuuggucccgcggagaagcuuaccauggagcuccccauccucaagaccaacgccaucaccaccauccucgccgccgucacccucugcuucgccuccucccagaacaucaccgaggaguucuaccaguccaccugcuccgccgucuccaagggcuaccucggcgcccuccgcaccggcugguacaccuccgucaucaccaucgagcucuccaacaucaaggagaucaagugcaacggcaccgacgccaaggucaagcucaucaagcaggagcucgacaaguacaagaacgccgucaccgaccuccagcuccucaugcaguccacccccgccgccggcuccggcuccgccaucugcuccggcaucgccgucugcaagguccuccaccucgagggcgaggucaacaagaucaagaacgcccuccucuccaccaacaaggccgucgucucccucuccaacggcgucuccguccucaccuucaagguccucgaccucaagaacuacaucgacaagcagcuccuccccauccucaacaagcaguccugcuccauccccaacaucgagaccgucaucgaguuccagcagaagaacaaccgccuccucgagaucacccgcgaguucuccgucaacgccggcgucaccacccccgucuccaccuacaugcucaccaacuccgagcuccucucccucaucaacgacaugcccaucaccaacgaccagaagaagcucauguccaacaacguccagaucguccgccagcaguccuacuccaucaugugcaucaucaaggaggagguccucgccuacgucguccagcucccccucuacggcgucaucgacacccccugcuggaagcuccacaccuccccccucugcaccaccaacaccaaggagggcuccaacaucugccucacccgcaccgaccgcggcugguacugcgacaacgccggcuccgucuccuucuucccccaggccgagaccugcaagguccaguccaaccgcgucuucugcgacaccaugaacucccucacccuccccuccgaggucaaccucugcaacaucgacaucuucaaccccaaguacgacugcaagaucaugaccuccaagaccgacgucuccuccuccgucaucaccucccucggcgccaucgucuccugcuacggcaagaccaagugcaccgccuccaacaagaaccgcggcaucaucaagaccuucuccaacggcugcgacuacgucuccaacaagggcgucgacaccgucuccgucggcaacacccucuacugcgucaacaagcaggagggccagucccucuacgucaagggcgagcccaucaucaacuucuacgacccccucgucuuccccuccgacgaguucgacgccuccaucucccaggucaacgagaagaucaaccagucccucgccuucauccgcaaguccgacgagcuccuccacaacgucaacgucggcaaguccaccaccaacaucaugaucaccaccaucaucaucgucaucaucgucauccuccuccuccucaucgccgucggccucuuccucuacugcaaggcccgcuccacccccgucacccucuccaaggaccagcucuccggcaucaacaacaucgccuucuccaacugaggacuagucccuguucccagagcccacuuuuuuuucuuuuuuugaaauaaaauagccugucuuucagaucuaaaaaaaaaaaaaaaaaaaaaaaaaaaaaaaaaaaaaaaaaaaaaaaaaaaaaaaaaaaaaaaaugcaucccccccccccccccccccccccccccccccaaaggcucuuuucagagccaccagaauu

SEQ ID NO: 15460 - RNA, 1876 nt, Artificial Sequence
  mRNA product Design a-5 comprising derived and/or modified sequence from HRSV(Memphis-37)__AIY60640.1__F_DSCav1_mut3 (opt3)
gggagacuuucccauucuguagcagaauuugguguugccuguggucuuggucccgcggagaagcuuaccauggagcugcccauccucaagaccaacgccauuacaacuauacuugcugcagugacgcugugcuucgccagcucccagaauaucaccgaagaguuuuaccaaucuacauguucagcggucaguaaaggcuauuugggggcuuuaagaacuggaugguacaccagcguuauuacaaucgaacuguccaacauuaaggagaucaaaugcaaugguaccgacgccaaggugaaacuaauaaagcaggaacucgauaaguauaaaaacgcaguaacugaccugcagcuucugaugcagucuacuccugccgcuggcucggggucagcaaucuguagcggaauugccgugugcaaggucuugcaccucgagggcgaggugaauaaaaucaagaacgcucugcugaguaccaauaaagccguugugucccucucuaacggugucagcguguuaacguucaagguacuggaucuuaagaauuacauugacaaacaauugcugccaauccuaaacaagcaguccuguucaauaccgaauauugaaacuguuaucgaguuucagcagaaaaacaauaggcuccuggaaauuacccgggaguucagugugaacgcgggggucacaacucccgugagcaccuauaugcuuacaaauucugagcuguugucccucaucaacgauaugccuaucaccaacgaccaaaagaaacugaugucaaauaacgugcagauuguccgccagcagagcuacaguauaaugugcaucauuaaggaagagguuuuagcauaugugguacaacugccacucuacggagugaucgauacgcccuguuggaaacuucauacuucuccucugugcacaaccaauacuaaggaaggcuccaacauauguuugacacgaaccgaccguggcugguacugcgauaaugccgggagcgucucguuuuucccacaggcugagacguguaaggugcagucuaacagaguuuucugcgacaccaugaacucccuaacacugcccucagaagugaaucucugcaauauugauaucuucaacccuaaauaugacuguaagaucaugacaaguaaaaccgaugucagcuccucugugauuacaagccugggagccaucguaucaugcuacgguaagacuaaauguaccgcaaguaauaagaacaggggcauuauaaagacauuuuccaaugggugcgacuauguuagcaacaaaggaguggacaccgucucugugggcaauacucuuuacugugucaacaagcaagagggucagucacuguaugugaaaggggagccaaucauuaacuucuacgauccguugguuuuucccagugacgaauuugaugcuagcaucucccaggugaaugagaagaucaaccagucucucgccuuuauucggaaaucggacgaacuguuacacaauguaaacgucggaaagagcacgacaaauauaaugaucaccacuauuaucauugugaucauaguuauccugcuacuccugauugcggugggccuuuucuuguauugcaaggcccgcuccaccccugucacacugucaaaagaucaacucaguggcaucaacaauauugcauucucuaacugaggacuagucccuguucccagagcccacuuuuuuuucuuuuuuugaaauaaaauagccugucuuucagaucuaaaaaaaaaaaaaaaaaaaaaaaaaaaaaaaaaaaaaaaaaaaaaaaaaaaaaaaaaaaaaaaaugcaucccccccccccccccccccccccccccccccaaaggcucuuuucagagccaccagaauu

SEQ ID NO: 15461 - RNA, 1876 nt, Artificial Sequence
  mRNA product Design a-5 comprising derived and/or modified sequence from HRSV(Memphis-37)__AIY60640.1__F_DSCav1_mut3 (opt4)
gggagacuuucccauucuguagcagaauuugguguugccuguggucuuggucccgcggagaagcuuaccauggagcugcccauccugaagaccaacgccaucaccaccauccuggccgccgugacccugugcuucgccagcagccagaacaucaccgaggaguucuaccagagcaccugcagcgccgugagcaagggcuaccugggcgcccugagaaccggcugguacaccagcgugaucaccaucgagcugagcaacaucaaggagaucaagugcaacggcaccgacgccaaggugaagcugaucaagcaggagcuggacaaguacaagaacgccgugaccgaccugcagcugcugaugcagagcacccccgccgccggcagcggcagcgccaucugcagcggcaucgccgugugcaaggugcugcaccuggagggcgaggugaacaagaucaagaacgcccugcugagcaccaacaaggccguggugagccugagcaacggcgugagcgugcugaccuucaaggugcuggaccugaagaacuacaucgacaagcagcugcugcccauccugaacaagcagagcugcagcauccccaacaucgagaccgugaucgaguuccagcagaagaacaacagacugcuggagaucaccagagaguucagcgugaacgccggcgugaccacccccgugagcaccuacaugcugaccaacagcgagcugcugagccugaucaacgacaugcccaucaccaacgaccagaagaagcugaugagcaacaacgugcagaucgugagacagcagagcuacagcaucaugugcaucaucaaggaggaggugcuggccuacguggugcagcugccccuguacggcgugaucgacacccccugcuggaagcugcacaccagcccccugugcaccaccaacaccaaggagggcagcaacaucugccugaccagaaccgacagaggcugguacugcgacaacgccggcagcgugagcuucuucccccaggccgagaccugcaaggugcagagcaacagaguguucugcgacaccaugaacagccugacccugcccagcgaggugaaccugugcaacaucgacaucuucaaccccaaguacgacugcaagaucaugaccagcaagaccgacgugagcagcagcgugaucaccagccugggcgccaucgugagcugcuacggcaagaccaagugcaccgccagcaacaagaacagaggcaucaucaagaccuucagcaacggcugcgacuacgugagcaacaagggcguggacaccgugagcgugggcaacacccuguacugcgugaacaagcaggagggccagagccuguacgugaagggcgagcccaucaucaacuucuacgacccccugguguuccccagcgacgaguucgacgccagcaucagccaggugaacgagaagaucaaccagagccuggccuucaucagaaagagcgacgagcugcugcacaacgugaacgugggcaagagcaccaccaacaucaugaucaccaccaucaucaucgugaucaucgugauccugcugcugcugaucgccgugggccuguuccuguacugcaaggccagaagcacccccgugacccugagcaaggaccagcugagcggcaucaacaacaucgccuucagcaacugaggacuagucccuguucccagagcccacuuuuuuuucuuuuuuugaaauaaaauagccugucuuucagaucuaaaaaaaaaaaaaaaaaaaaaaaaaaaaaaaaaaaaaaaaaaaaaaaaaaaaaaaaaaaaaaaaugcaucccccccccccccccccccccccccccccccaaaggcucuuuucagagccaccagaauu

SEQ ID NO: 15462 - RNA, 1876 nt, Artificial Sequence
  mRNA product Design a-5 comprising derived and/or modified sequence from HRSV(Memphis-37)__AIY60640.1__F_DSCav1_mut3 (opt5)
gggagacuuucccauucuguagcagaauuugguguugccuguggucuuggucccgcggagaagcuuaccauggagcugcccauccucaagaccaacgccauuacaacgauccuggcugccgugacccuuugcuucgcgagcucccagaauauuacagaagaguuuuaccaaucuaccuguagcgcugucuccaaaggcuaucugggggcccucagaacaggaugguacaccucuguuaucacaauugaacugagcaacaucaaggagaucaaaugcaauggcaccgacgccaaggugaaacuuauuaagcaggaacuggauaaguauaaaaacgcugugacggaccuccagcugcugaugcaguccaccccugccgcugggucuggaagcgccaucuguuccggcauugcggucugcaaggugcuccaccuggagggggagguuaauaaaaucaagaacgcccuucugagcacaaauaaagcuguggucucucucuccaacggagugagcguucugaccuucaaggugcuugaucugaagaauuacauugacaaacaacuccugccgauccugaacaagcagucuuguuccauucccaauaucgaaacagucaucgaguuucagcagaaaaacaaucggcuccuggaaauuacccgcgaguucagcgugaacgccggcgugacgacaccugucucuaccuauaugcuuacaaauuccgagcugcucagccugaucaacgauaugcccauuaccaacgaccaaaagaaacuuauguccaauaacguucagaucgugagacagcagucuuacagcauuaugugcaucaucaaggaagaggugcuggcuuaugucgugcaacucccucuguacggcguuauugauacccccuguuggaaacugcauacauccccucucugcacgaccaauacaaaggaagggagcaacaucugucugacccggacagaccgcggaugguacugcgauaaugccggcucuguguccuuuuucccgcaggcggagaccuguaagguccagagcaacagaguguuuugcgacacgaugaacucucuuacacugcccagcgaaguuaaucucugcaauauugauaucuucaacccuaaauaugacuguaagauuaugaccuccaaaaccgaugugucuagcuccgucaucacaagccugggggccaucgugucuugcuacggaaagaccaaauguacagcuuccaauaagaaccggggcauuaucaagacguuuagcaaugggugcgacuaugucucuaacaaaggaguggacaccguuuccgugggcaauacacuuuacugugucaacaagcaagagggccagagccuguaugugaaaggggagcccauuaucaacuucuacgauccucucguuuuucccuccgacgaguucgaugccucuauuagccaggugaaugaaaagaucaaccagucccuggcuuuuauucgcaaaucugacgaacugcuccacaaugucaacgugggaaagagcaccacaaauaucaugaucaccacgauuaucauugugaucauuguuauccugcuucugcucaucgccgucggccuguuccuguauugcaaggccagauccaccccggugacacuuagcaaagaucaacucucugggauuaacaauaucgcuuucuccaacugaggacuagucccuguucccagagcccacuuuuuuuucuuuuuuugaaauaaaauagccugucuuucagaucuaaaaaaaaaaaaaaaaaaaaaaaaaaaaaaaaaaaaaaaaaaaaaaaaaaaaaaaaaaaaaaaaugcaucccccccccccccccccccccccccccccccaaaggcucuuuucagagccaccagaauu

SEQ ID NO: 15463 - RNA, 1876 nt, Artificial Sequence
  mRNA product Design a-5 comprising derived and/or modified sequence from HRSV(Memphis-37)__AIY60640.1__F_DSCav1_mut3 (opt6)
gggagacuuucccauucuguagcagaauuugguguugccuguggucuuggucccgcggagaagcuuaccauggaauuaccaauacuaaaaacaaaugccaucaccaccauccuggccgccguaacauuaugcuucgcaaguucacaaaauauaacagaagaauuuuaucaaucaacuugcagcgccguaucaaaaggcuacuuaggcgcacuacguacaggaugguacacaucaguaauaaccauagaacuauccaauauuaaagaaauaaaaugcaauggaacagacgcaaaaguuaaacuaauaaaacaagaauuagacaaauacaaaaacgcaguaaccgaccuucaauuacuaaugcaaucuacccccgcugcagguuccggaucagcaauauguucaggaauugcaguaugcaaaguccuacacuuagaaggagaaguaaacaaaauaaaaaacgcacuauuaagcaccaauaaagcagucguaucauuauccaacggcguuucaguacuaacauuuaaaguacuugaccuaaaaaacuauauagacaaacaacuacuucccauccuuaacaaacaaagcugcucaauaccuaauaucgaaacaguaauagaauuucaacaaaaaaacaaucgauuauuagaaaucacacgagaauuuucugucaacgcaggagucaccacacccguaucuacuuauauguuaaccaacucugaauuauuaucacuaaucaaugacaugccaauaacaaacgaucaaaaaaaauuaaugucaaauaacguacaaauaguaagacaacaaucauacucaauaaugugcauuauaaaagaagaaguacuagccuauguuguacaacucccacucuacggcguaauagacacaccaugcuggaaauuacacacuucaccacuaugcacaacaaacacaaaagaaggaucaaacaucugccuaaccagaaccgauagaggaugguauugcgacaaugccggaucaguuucauucuucccacaagcagaaacaugcaaaguacaauccaacagaguuuucugugacacaaugaacucgcuaacauuacccagcgaaguaaaccucugcaacauagacauauucaacccaaaauacgauugcaaaauaaugacuucuaaaacagauguuuccucaagcgucauaacgaguuuaggagcaauaguaagcuguuacggaaaaaccaaauguaccgcaucaaacaaaaaccgaggaauaauaaaaaccuuuucaaacggaugcgauuacgucuccaacaaaggagucgacacaguaucaguuggcaauacucuuuacugcguaaauaaacaagaaggacaaucacuauacguaaaaggcgaaccaauaauaaacuucuacgacccccucgucuucccuucagaugaauuugacgcaagcaucucacaaguuaaugaaaaaauaaaucaauccuuagcauucauacgaaaaucagacgaacuauuacacaacguaaacguaggaaaaucaacgacaaacauaaugauaacaacuaucauuauagucauaauagucauacuacuacuauuaauagccguaggcuuauuccuauacugcaaagcaagaucuacuccaguaacacucucaaaagaccaauuaucuggaauaaauaacauagcauucucuaauuaaggacuagucccuguucccagagcccacuuuuuuuucuuuuuuugaaauaaaauagccugucuuucagaucuaaaaaaaaaaaaaaaaaaaaaaaaaaaaaaaaaaaaaaaaaaaaaaaaaaaaaaaaaaaaaaaaugcaucccccccccccccccccccccccccccccccaaaggcucuuuucagagccaccagaauu

SEQ ID NO: 15464 - RNA, 1876 nt, Artificial Sequence
  mRNA product Design a-5 comprising derived and/or modified sequence from HRSV(Memphis-37)__AIY60640.1__F_DSCav1_mut3 (opt11)
gggagacuuucccauucuguagcagaauuugguguugccuguggucuuggucccgcggagaagcuuaccauggaacuccccauccucaaaaccaacgccauuaccacgauccucgccgcagucacccucugcuucgccuccucacaaaacaucacagaagaauuuuaccaaaguaccugcuccgccgucagcaaaggauaccucggcgcccuccgcaccggcugguacacauccgucauaaccaucgaacucagcaacaucaaagaaaucaaauguaacggaaccgacgccaaaguaaaacuaauaaaacaagaacucgacaaauacaagaacgccgucaccgaccuccaacuccucaugcaaucuacccccgccgccggcucagguagcgccaucugcagcgguauugccgucugcaaaguacuccaccuagaaggagaagucaauaaaaucaaaaacgcccuacucuccaccaacaaggcagucgucagccucuccaacggcgucucagucuuaaccuucaaagugcucgaccucaaaaauuacauagacaaacaacuacuccccauucucaacaaacaauccugcuccauacccaacauagaaaccgucauugaauuucaacagaaaaacaaccgccuccucgaaaucacgcgcgaguucagugucaacgccggcgucaccaccccagucucgacauacaugcucacaaacucagaacuccucucguuaaucaacgacaugccaauaaccaacgaccaaaagaaacuaauguccaacaacguucaaauaguucgccaacaaucauacuccauaaugugcaucaucaaagaagaaguccucgccuacguuguacaauuaccccucuacggcgucaucgacacaccaugcuggaaacuccacacaucgccccucugcaccaccaacaccaaagaaggcagcaacauuugccucacccggacagaccgcggcugguacugcgacaaugcaggcagcgucucauucuucccacaagccgaaaccugcaaaguccaaagcaaccgugucuucugcgacacaaugaacucccuuacccucccaagcgaaguaaaccucugcaauauugacaucuucaaccccaaauacgacugcaaaaucaugaccuccaaaaccgacgucuccucaucagucaucaccucccuuggcgccauugucuccuguuacgguaaaaccaaaugcaccgccuccaacaaaaaccgcggcaucaucaaaaccuucucuaacggcugcgacuacgucucaaacaaaggcgucgacacugucuccgucggcaacacccuauacugcgucaacaagcaagaaggacagucccuauacguaaaaggugaaccaauuaucaacuucuacgacccccuagucuucccauccgacgaguucgaugccuccaucucccaaguaaaugaaaagaucaaucaaagccuggccuucauccgcaaauccgacgaacuacuccacaaugucaacgucggaaaaucaacaacaaacaucaugaucaccaccaucaucaucgucaucauaguaauccuccuacugcucaucgccgucggucucuuccuauacugcaaagcccguucuacuccagucacccucuccaaagaccaacuaucaggaaucaacaacaucgccuucagcaacuaaggacuagucccuguucccagagcccacuuuuuuuucuuuuuuugaaauaaaauagccugucuuucagaucuaaaaaaaaaaaaaaaaaaaaaaaaaaaaaaaaaaaaaaaaaaaaaaaaaaaaaaaaaaaaaaaaugcaucccccccccccccccccccccccccccccccaaaggcucuuuucagagccaccagaauu

SEQ ID NO: 15465 - RNA, 2057 nt, Artificial Sequence
  mRNA product Design b-1 comprising derived and/or modified sequence from HRSV(Memphis-37)__AIY60640.1__F_DSCav1_mut3 (opt1)
gggagacggagacggccugcaggaccugcucucucagcccucagccgaggccuacgccgagccgagugcgcagccgacgaccgggaggagccgcagccuucaacucugagguacugugauccgcgcugcccgccgggccgccccaguccgcugcugcggcaccuccuucccucgcgcccucuucgcucgccagcgccuucccugugagccugcgucaccgcggccgccaagcuuaccauggagcugcccauccucaagaccaacgccaucaccacgauccuggccgcggugacccugugcuucgccagcucccagaacaucaccgaggaguucuaccagagcacgugcuccgccgucagcaagggcuaccucggcgcccugcgcaccgggugguacaccagcgugaucaccaucgagcuguccaacaucaaggagaucaagugcaacggcaccgacgccaaggugaagcucaucaagcaggagcuggacaaguacaagaacgcggucacggaccugcagcuccugaugcagagcaccccggccgccggcuccgggagcgcgaucugcuccggcaucgccgucugcaaggugcugcaccucgagggcgaggugaacaagaucaagaacgcccugcuguccaccaacaaggccgucgugagccucuccaacggggugagcguccugaccuucaaggugcuggaccucaagaacuacaucgacaagcagcugcugcccauccugaacaagcagagcugcuccauccccaacaucgagaccgucaucgaguuccagcagaagaacaaccgccuccuggagaucacgcgggaguucagcgugaacgcgggcgugaccacccccgucuccaccuacaugcugacgaacagcgagcuccugucccugaucaacgacaugccgaucaccaacgaccagaagaagcucaugagcaacaacgugcagaucgugcgccagcaguccuacagcaucaugugcaucaucaaggaggagguccuggccuacguggugcagcugccccucuacggggucaucgacacccccugcuggaagcugcacaccagcccccugugcacgaccaacaccaaggagggcuccaacaucugccucacccggacggaccgcgggugguacugcgacaacgccggcagcguguccuucuucccgcaggccgagaccugcaagguccagagcaaccggguguucugcgacaccaugaacucccugacccugcccagcgaggugaaccucugcaacaucgacaucuucaaccccaaguacgacugcaagaucaugacguccaagaccgacgucagcuccagcgugaucaccucccugggcgccaucgugagcugcuacgggaagaccaagugcacggcgagcaacaagaaccgcggcaucaucaagaccuucuccaacgggugcgacuacgucagcaacaagggcguggacaccguguccgucggcaacacccuguacugcgugaacaagcaggagggccagagccucuacgugaagggggagcccaucaucaacuucuacgacccgcuggucuuccccuccgacgaguucgacgccagcaucucccaggugaacgagaagaucaaccagagccuggccuucauccggaaguccgacgagcuccugcacaacgugaacgucggcaagagcaccacgaacaucaugaucaccaccaucaucaucgugaucaucgugauccugcugcuccugaucgccgucgggcuguuccucuacugcaaggcccgcuccacccccgugacgcugagcaaggaccagcuguccgggaucaacaacaucgcguucagcaacugaggacuaguguccaccugucccuccugggcugcuggauugucucguuuuccugccaaauaaacaggaucagcgcuuuacagaucuaaaaaaaaaaaaaaaaaaaaaaaaaaaaaaaaaaaaaaaaaaaaaaaaaaaaaaaaaaaaaaaaugcaucccccccccccccccccccccccccccccccaaaggcucuuuucagagccaccagaauu

SEQ ID NO: 15466 - RNA, 2057 nt, Artificial Sequence
  mRNA product Design b-1 comprising derived and/or modified sequence from HRSV(Memphis-37)__AIY60640.1__F_DSCav1_mut3 (opt1)
gggagacggagacggccugcaggaccugcucucucagcccucagccgaggccuacgccgagccgagugcgcagccgacgaccgggaggagccgcagccuucaacucugagguacugugauccgcgcugcccgccgggccgccccaguccgcugcugcggcaccuccuucccucgcgcccucuucgcucgccagcgccuucccugugagccugcgucaccgcggccgccaagcuuaccauggagcugcccauccucaagaccaacgccaucaccacgauccuggccgcggugacccugugcuucgccagcucccagaacaucaccgaggaguucuaccagagcacgugcuccgccgucagcaagggcuaccucggggcccugcgcaccggcugguacaccuccgugaucaccaucgagcugagcaacaucaaggagaucaagugcaacgggaccgacgccaaggugaagcucaucaagcaggagcuggacaaguacaagaacgcggucacggaccugcagcuccugaugcaguccaccccggccgccggcagcggguccgccaucugcagcggcaucgcggugugcaaggugcugcaccucgagggcgaggucaacaagaucaagaacgcccugcuguccaccaacaaggccguggugagccucuccaacggggucagcgugcugaccuucaaggugcuggaccucaagaacuacaucgacaagcagcugcugcccauccucaacaagcaguccugcagcauccccaacaucgagacggucaucgaguuccagcagaagaacaaccggcugcuggagaucacccgcgaguucuccgugaacgccggcgugaccacccccgucagcacguacaugcucaccaacuccgagcugcugagccucaucaacgacaugccgaucaccaacgaccagaagaagcugaugagcaacaacgugcagaucgugcggcagcaguccuacagcaucaugugcaucaucaaggaggagguccuggccuacguggugcagcucccccuguacggggucaucgacacccccugcuggaagcugcacacgagcccccucugcaccaccaacaccaaggagggcuccaacaucugccugacgcgcaccgaccgggggugguacugcgacaacgcgggcuccgugagcuucuucccgcaggccgagaccugcaaggugcaguccaaccgcgucuucugcgacaccaugaacagccugacgcuccccuccgaggugaaccugugcaacaucgacaucuucaaccccaaguacgacugcaagaucaugaccagcaagaccgacgucuccagcuccgugaucaccagccugggcgccaucguguccugcuacgggaagacgaagugcaccgccagcaacaagaaccggggcaucaucaagaccuucuccaacgggugcgacuacgucagcaacaagggcguggacaccguguccgucggcaacacgcucuacugcgugaacaagcaggaggggcagagccuguacgugaagggcgagcccaucaucaacuucuacgacccgcuggucuuccccagcgacgaguucgacgccuccaucagccaggugaacgagaagaucaaccagucccucgcguucauccgcaagagcgacgagcugcugcacaacgugaacgucgggaaguccaccaccaacaucaugaucaccaccaucaucaucgugaucaucgugauccuccugcugcucaucgccgucggccuguuccuguacugcaaggcccggagcacgcccgugacccuguccaaggaccagcucagcgggaucaacaacaucgccuucuccaacugaggacuaguguccaccugucccuccugggcugcuggauugucucguuuuccugccaaauaaacaggaucagcgcuuuacagaucuaaaaaaaaaaaaaaaaaaaaaaaaaaaaaaaaaaaaaaaaaaaaaaaaaaaaaaaaaaaaaaaaugcaucccccccccccccccccccccccccccccccaaaggcucuuuucagagccaccagaauu

SEQ ID NO: 15467 - RNA, 2057 nt, Artificial Sequence
  mRNA product Design b-1 comprising derived and/or modified sequence from HRSV(Memphis-37)__AIY60640.1__F_DSCav1_mut3 (opt2)
gggagacggagacggccugcaggaccugcucucucagcccucagccgaggccuacgccgagccgagugcgcagccgacgaccgggaggagccgcagccuucaacucugagguacugugauccgcgcugcccgccgggccgccccaguccgcugcugcggcaccuccuucccucgcgcccucuucgcucgccagcgccuucccugugagccugcgucaccgcggccgccaagcuuaccauggagcuccccauccucaagaccaacgccaucaccaccauccucgccgccgucacccucugcuucgccuccucccagaacaucaccgaggaguucuaccaguccaccugcuccgccgucuccaagggcuaccucggcgcccuccgcaccggcugguacaccuccgucaucaccaucgagcucuccaacaucaaggagaucaagugcaacggcaccgacgccaaggucaagcucaucaagcaggagcucgacaaguacaagaacgccgucaccgaccuccagcuccucaugcaguccacccccgccgccggcuccggcuccgccaucugcuccggcaucgccgucugcaagguccuccaccucgagggcgaggucaacaagaucaagaacgcccuccucuccaccaacaaggccgucgucucccucuccaacggcgucuccguccucaccuucaagguccucgaccucaagaacuacaucgacaagcagcuccuccccauccucaacaagcaguccugcuccauccccaacaucgagaccgucaucgaguuccagcagaagaacaaccgccuccucgagaucacccgcgaguucuccgucaacgccggcgucaccacccccgucuccaccuacaugcucaccaacuccgagcuccucucccucaucaacgacaugcccaucaccaacgaccagaagaagcucauguccaacaacguccagaucguccgccagcaguccuacuccaucaugugcaucaucaaggaggagguccucgccuacgucguccagcucccccucuacggcgucaucgacacccccugcuggaagcuccacaccuccccccucugcaccaccaacaccaaggagggcuccaacaucugccucacccgcaccgaccgcggcugguacugcgacaacgccggcuccgucuccuucuucccccaggccgagaccugcaagguccaguccaaccgcgucuucugcgacaccaugaacucccucacccuccccuccgaggucaaccucugcaacaucgacaucuucaaccccaaguacgacugcaagaucaugaccuccaagaccgacgucuccuccuccgucaucaccucccucggcgccaucgucuccugcuacggcaagaccaagugcaccgccuccaacaagaaccgcggcaucaucaagaccuucuccaacggcugcgacuacgucuccaacaagggcgucgacaccgucuccgucggcaacacccucuacugcgucaacaagcaggagggccagucccucuacgucaagggcgagcccaucaucaacuucuacgacccccucgucuuccccuccgacgaguucgacgccuccaucucccaggucaacgagaagaucaaccagucccucgccuucauccgcaaguccgacgagcuccuccacaacgucaacgucggcaaguccaccaccaacaucaugaucaccaccaucaucaucgucaucaucgucauccuccuccuccucaucgccgucggccucuuccucuacugcaaggcccgcuccacccccgucacccucuccaaggaccagcucuccggcaucaacaacaucgccuucuccaacugaggacuaguguccaccugucccuccugggcugcuggauugucucguuuuccugccaaauaaacaggaucagcgcuuuacagaucuaaaaaaaaaaaaaaaaaaaaaaaaaaaaaaaaaaaaaaaaaaaaaaaaaaaaaaaaaaaaaaaaugcaucccccccccccccccccccccccccccccccaaaggcucuuuucagagccaccagaauu

SEQ ID NO: 15468 - RNA, 2057 nt, Artificial Sequence
  mRNA product Design b-1 comprising derived and/or modified sequence from HRSV(Memphis-37)__AIY60640.1__F_DSCav1_mut3 (opt3)
gggagacggagacggccugcaggaccugcucucucagcccucagccgaggccuacgccgagccgagugcgcagccgacgaccgggaggagccgcagccuucaacucugagguacugugauccgcgcugcccgccgggccgccccaguccgcugcugcggcaccuccuucccucgcgcccucuucgcucgccagcgccuucccugugagccugcgucaccgcggccgccaagcuuaccauggagcugcccauccucaagaccaacgccauuacaacuauacuugcugcagugacgcugugcuucgccagcucccagaauaucaccgaagaguuuuaccaaucuacauguucagcggucaguaaaggcuauuugggggcuuuaagaacuggaugguacaccagcguuauuacaaucgaacuguccaacauuaaggagaucaaaugcaaugguaccgacgccaaggugaaacuaauaaagcaggaacucgauaaguauaaaaacgcaguaacugaccugcagcuucugaugcagucuacuccugccgcuggcucggggucagcaaucuguagcggaauugccgugugcaaggucuugcaccucgagggcgaggugaauaaaaucaagaacgcucugcugaguaccaauaaagccguugugucccucucuaacggugucagcguguuaacguucaagguacuggaucuuaagaauuacauugacaaacaauugcugccaauccuaaacaagcaguccuguucaauaccgaauauugaaacuguuaucgaguuucagcagaaaaacaauaggcuccuggaaauuacccgggaguucagugugaacgcgggggucacaacucccgugagcaccuauaugcuuacaaauucugagcuguugucccucaucaacgauaugccuaucaccaacgaccaaaagaaacugaugucaaauaacgugcagauuguccgccagcagagcuacaguauaaugugcaucauuaaggaagagguuuuagcauaugugguacaacugccacucuacggagugaucgauacgcccuguuggaaacuucauacuucuccucugugcacaaccaauacuaaggaaggcuccaacauauguuugacacgaaccgaccguggcugguacugcgauaaugccgggagcgucucguuuuucccacaggcugagacguguaaggugcagucuaacagaguuuucugcgacaccaugaacucccuaacacugcccucagaagugaaucucugcaauauugauaucuucaacccuaaauaugacuguaagaucaugacaaguaaaaccgaugucagcuccucugugauuacaagccugggagccaucguaucaugcuacgguaagacuaaauguaccgcaaguaauaagaacaggggcauuauaaagacauuuuccaaugggugcgacuauguuagcaacaaaggaguggacaccgucucugugggcaauacucuuuacugugucaacaagcaagagggucagucacuguaugugaaaggggagccaaucauuaacuucuacgauccguugguuuuucccagugacgaauuugaugcuagcaucucccaggugaaugagaagaucaaccagucucucgccuuuauucggaaaucggacgaacuguuacacaauguaaacgucggaaagagcacgacaaauauaaugaucaccacuauuaucauugugaucauaguuauccugcuacuccugauugcggugggccuuuucuuguauugcaaggcccgcuccaccccugucacacugucaaaagaucaacucaguggcaucaacaauauugcauucucuaacugaggacuaguguccaccugucccuccugggcugcuggauugucucguuuuccugccaaauaaacaggaucagcgcuuuacagaucuaaaaaaaaaaaaaaaaaaaaaaaaaaaaaaaaaaaaaaaaaaaaaaaaaaaaaaaaaaaaaaaaugcaucccccccccccccccccccccccccccccccaaaggcucuuuucagagccaccagaauu

SEQ ID NO: 15469 - RNA, 2057 nt, Artificial Sequence
  mRNA product Design b-1 comprising derived and/or modified sequence from HRSV(Memphis-37)__AIY60640.1__F_DSCav1_mut3 (opt4)
gggagacggagacggccugcaggaccugcucucucagcccucagccgaggccuacgccgagccgagugcgcagccgacgaccgggaggagccgcagccuucaacucugagguacugugauccgcgcugcccgccgggccgccccaguccgcugcugcggcaccuccuucccucgcgcccucuucgcucgccagcgccuucccugugagccugcgucaccgcggccgccaagcuuaccauggagcugcccauccugaagaccaacgccaucaccaccauccuggccgccgugacccugugcuucgccagcagccagaacaucaccgaggaguucuaccagagcaccugcagcgccgugagcaagggcuaccugggcgcccugagaaccggcugguacaccagcgugaucaccaucgagcugagcaacaucaaggagaucaagugcaacggcaccgacgccaaggugaagcugaucaagcaggagcuggacaaguacaagaacgccgugaccgaccugcagcugcugaugcagagcacccccgccgccggcagcggcagcgccaucugcagcggcaucgccgugugcaaggugcugcaccuggagggcgaggugaacaagaucaagaacgcccugcugagcaccaacaaggccguggugagccugagcaacggcgugagcgugcugaccuucaaggugcuggaccugaagaacuacaucgacaagcagcugcugcccauccugaacaagcagagcugcagcauccccaacaucgagaccgugaucgaguuccagcagaagaacaacagacugcuggagaucaccagagaguucagcgugaacgccggcgugaccacccccgugagcaccuacaugcugaccaacagcgagcugcugagccugaucaacgacaugcccaucaccaacgaccagaagaagcugaugagcaacaacgugcagaucgugagacagcagagcuacagcaucaugugcaucaucaaggaggaggugcuggccuacguggugcagcugccccuguacggcgugaucgacacccccugcuggaagcugcacaccagcccccugugcaccaccaacaccaaggagggcagcaacaucugccugaccagaaccgacagaggcugguacugcgacaacgccggcagcgugagcuucuucccccaggccgagaccugcaaggugcagagcaacagaguguucugcgacaccaugaacagccugacccugcccagcgaggugaaccugugcaacaucgacaucuucaaccccaaguacgacugcaagaucaugaccagcaagaccgacgugagcagcagcgugaucaccagccugggcgccaucgugagcugcuacggcaagaccaagugcaccgccagcaacaagaacagaggcaucaucaagaccuucagcaacggcugcgacuacgugagcaacaagggcguggacaccgugagcgugggcaacacccuguacugcgugaacaagcaggagggccagagccuguacgugaagggcgagcccaucaucaacuucuacgacccccugguguuccccagcgacgaguucgacgccagcaucagccaggugaacgagaagaucaaccagagccuggccuucaucagaaagagcgacgagcugcugcacaacgugaacgugggcaagagcaccaccaacaucaugaucaccaccaucaucaucgugaucaucgugauccugcugcugcugaucgccgugggccuguuccuguacugcaaggccagaagcacccccgugacccugagcaaggaccagcugagcggcaucaacaacaucgccuucagcaacugaggacuaguguccaccugucccuccugggcugcuggauugucucguuuuccugccaaauaaacaggaucagcgcuuuacagaucuaaaaaaaaaaaaaaaaaaaaaaaaaaaaaaaaaaaaaaaaaaaaaaaaaaaaaaaaaaaaaaaaugcaucccccccccccccccccccccccccccccccaaaggcucuuuucagagccaccagaauu

SEQ ID NO: 15470 - RNA, 2057 nt, Artificial Sequence
  mRNA product Design b-1 comprising derived and/or modified sequence from HRSV(Memphis-37)__AIY60640.1__F_DSCav1_mut3 (opt5)
gggagacggagacggccugcaggaccugcucucucagcccucagccgaggccuacgccgagccgagugcgcagccgacgaccgggaggagccgcagccuucaacucugagguacugugauccgcgcugcccgccgggccgccccaguccgcugcugcggcaccuccuucccucgcgcccucuucgcucgccagcgccuucccugugagccugcgucaccgcggccgccaagcuuaccauggagcugcccauccucaagaccaacgccauuacaacgauccuggcugccgugacccuuugcuucgcgagcucccagaauauuacagaagaguuuuaccaaucuaccuguagcgcugucuccaaaggcuaucugggggcccucagaacaggaugguacaccucuguuaucacaauugaacugagcaacaucaaggagaucaaaugcaauggcaccgacgccaaggugaaacuuauuaagcaggaacuggauaaguauaaaaacgcugugacggaccuccagcugcugaugcaguccaccccugccgcugggucuggaagcgccaucuguuccggcauugcggucugcaaggugcuccaccuggagggggagguuaauaaaaucaagaacgcccuucugagcacaaauaaagcuguggucucucucuccaacggagugagcguucugaccuucaaggugcuugaucugaagaauuacauugacaaacaacuccugccgauccugaacaagcagucuuguuccauucccaauaucgaaacagucaucgaguuucagcagaaaaacaaucggcuccuggaaauuacccgcgaguucagcgugaacgccggcgugacgacaccugucucuaccuauaugcuuacaaauuccgagcugcucagccugaucaacgauaugcccauuaccaacgaccaaaagaaacuuauguccaauaacguucagaucgugagacagcagucuuacagcauuaugugcaucaucaaggaagaggugcuggcuuaugucgugcaacucccucuguacggcguuauugauacccccuguuggaaacugcauacauccccucucugcacgaccaauacaaaggaagggagcaacaucugucugacccggacagaccgcggaugguacugcgauaaugccggcucuguguccuuuuucccgcaggcggagaccuguaagguccagagcaacagaguguuuugcgacacgaugaacucucuuacacugcccagcgaaguuaaucucugcaauauugauaucuucaacccuaaauaugacuguaagauuaugaccuccaaaaccgaugugucuagcuccgucaucacaagccugggggccaucgugucuugcuacggaaagaccaaauguacagcuuccaauaagaaccggggcauuaucaagacguuuagcaaugggugcgacuaugucucuaacaaaggaguggacaccguuuccgugggcaauacacuuuacugugucaacaagcaagagggccagagccuguaugugaaaggggagcccauuaucaacuucuacgauccucucguuuuucccuccgacgaguucgaugccucuauuagccaggugaaugaaaagaucaaccagucccuggcuuuuauucgcaaaucugacgaacugcuccacaaugucaacgugggaaagagcaccacaaauaucaugaucaccacgauuaucauugugaucauuguuauccugcuucugcucaucgccgucggccuguuccuguauugcaaggccagauccaccccggugacacuuagcaaagaucaacucucugggauuaacaauaucgcuuucuccaacugaggacuaguguccaccugucccuccugggcugcuggauugucucguuuuccugccaaauaaacaggaucagcgcuuuacagaucuaaaaaaaaaaaaaaaaaaaaaaaaaaaaaaaaaaaaaaaaaaaaaaaaaaaaaaaaaaaaaaaaugcaucccccccccccccccccccccccccccccccaaaggcucuuuucagagccaccagaauu

SEQ ID NO: 15471 - RNA, 2057 nt, Artificial Sequence
  mRNA product Design b-1 comprising derived and/or modified sequence from HRSV(Memphis-37)__AIY60640.1__F_DSCav1_mut3 (opt6)
gggagacggagacggccugcaggaccugcucucucagcccucagccgaggccuacgccgagccgagugcgcagccgacgaccgggaggagccgcagccuucaacucugagguacugugauccgcgcugcccgccgggccgccccaguccgcugcugcggcaccuccuucccucgcgcccucuucgcucgccagcgccuucccugugagccugcgucaccgcggccgccaagcuuaccauggaauuaccaauacuaaaaacaaaugccaucaccaccauccuggccgccguaacauuaugcuucgcaaguucacaaaauauaacagaagaauuuuaucaaucaacuugcagcgccguaucaaaaggcuacuuaggcgcacuacguacaggaugguacacaucaguaauaaccauagaacuauccaauauuaaagaaauaaaaugcaauggaacagacgcaaaaguuaaacuaauaaaacaagaauuagacaaauacaaaaacgcaguaaccgaccuucaauuacuaaugcaaucuacccccgcugcagguuccggaucagcaauauguucaggaauugcaguaugcaaaguccuacacuuagaaggagaaguaaacaaaauaaaaaacgcacuauuaagcaccaauaaagcagucguaucauuauccaacggcguuucaguacuaacauuuaaaguacuugaccuaaaaaacuauauagacaaacaacuacuucccauccuuaacaaacaaagcugcucaauaccuaauaucgaaacaguaauagaauuucaacaaaaaaacaaucgauuauuagaaaucacacgagaauuuucugucaacgcaggagucaccacacccguaucuacuuauauguuaaccaacucugaauuauuaucacuaaucaaugacaugccaauaacaaacgaucaaaaaaaauuaaugucaaauaacguacaaauaguaagacaacaaucauacucaauaaugugcauuauaaaagaagaaguacuagccuauguuguacaacucccacucuacggcguaauagacacaccaugcuggaaauuacacacuucaccacuaugcacaacaaacacaaaagaaggaucaaacaucugccuaaccagaaccgauagaggaugguauugcgacaaugccggaucaguuucauucuucccacaagcagaaacaugcaaaguacaauccaacagaguuuucugugacacaaugaacucgcuaacauuacccagcgaaguaaaccucugcaacauagacauauucaacccaaaauacgauugcaaaauaaugacuucuaaaacagauguuuccucaagcgucauaacgaguuuaggagcaauaguaagcuguuacggaaaaaccaaauguaccgcaucaaacaaaaaccgaggaauaauaaaaaccuuuucaaacggaugcgauuacgucuccaacaaaggagucgacacaguaucaguuggcaauacucuuuacugcguaaauaaacaagaaggacaaucacuauacguaaaaggcgaaccaauaauaaacuucuacgacccccucgucuucccuucagaugaauuugacgcaagcaucucacaaguuaaugaaaaaauaaaucaauccuuagcauucauacgaaaaucagacgaacuauuacacaacguaaacguaggaaaaucaacgacaaacauaaugauaacaacuaucauuauagucauaauagucauacuacuacuauuaauagccguaggcuuauuccuauacugcaaagcaagaucuacuccaguaacacucucaaaagaccaauuaucuggaauaaauaacauagcauucucuaauuaaggacuaguguccaccugucccuccugggcugcuggauugucucguuuuccugccaaauaaacaggaucagcgcuuuacagaucuaaaaaaaaaaaaaaaaaaaaaaaaaaaaaaaaaaaaaaaaaaaaaaaaaaaaaaaaaaaaaaaaugcaucccccccccccccccccccccccccccccccaaaggcucuuuucagagccaccagaauu

SEQ ID NO: 15472 - RNA, 2057 nt, Artificial Sequence
  mRNA product Design b-1 comprising derived and/or modified sequence from HRSV(Memphis-37)__AIY60640.1__F_DSCav1_mut3 (opt11)
gggagacggagacggccugcaggaccugcucucucagcccucagccgaggccuacgccgagccgagugcgcagccgacgaccgggaggagccgcagccuucaacucugagguacugugauccgcgcugcccgccgggccgccccaguccgcugcugcggcaccuccuucccucgcgcccucuucgcucgccagcgccuucccugugagccugcgucaccgcggccgccaagcuuaccauggaacuccccauccucaaaaccaacgccauuaccacgauccucgccgcagucacccucugcuucgccuccucacaaaacaucacagaagaauuuuaccaaaguaccugcuccgccgucagcaaaggauaccucggcgcccuccgcaccggcugguacacauccgucauaaccaucgaacucagcaacaucaaagaaaucaaauguaacggaaccgacgccaaaguaaaacuaauaaaacaagaacucgacaaauacaagaacgccgucaccgaccuccaacuccucaugcaaucuacccccgccgccggcucagguagcgccaucugcagcgguauugccgucugcaaaguacuccaccuagaaggagaagucaauaaaaucaaaaacgcccuacucuccaccaacaaggcagucgucagccucuccaacggcgucucagucuuaaccuucaaagugcucgaccucaaaaauuacauagacaaacaacuacuccccauucucaacaaacaauccugcuccauacccaacauagaaaccgucauugaauuucaacagaaaaacaaccgccuccucgaaaucacgcgcgaguucagugucaacgccggcgucaccaccccagucucgacauacaugcucacaaacucagaacuccucucguuaaucaacgacaugccaauaaccaacgaccaaaagaaacuaauguccaacaacguucaaauaguucgccaacaaucauacuccauaaugugcaucaucaaagaagaaguccucgccuacguuguacaauuaccccucuacggcgucaucgacacaccaugcuggaaacuccacacaucgccccucugcaccaccaacaccaaagaaggcagcaacauuugccucacccggacagaccgcggcugguacugcgacaaugcaggcagcgucucauucuucccacaagccgaaaccugcaaaguccaaagcaaccgugucuucugcgacacaaugaacucccuuacccucccaagcgaaguaaaccucugcaauauugacaucuucaaccccaaauacgacugcaaaaucaugaccuccaaaaccgacgucuccucaucagucaucaccucccuuggcgccauugucuccuguuacgguaaaaccaaaugcaccgccuccaacaaaaaccgcggcaucaucaaaaccuucucuaacggcugcgacuacgucucaaacaaaggcgucgacacugucuccgucggcaacacccuauacugcgucaacaagcaagaaggacagucccuauacguaaaaggugaaccaauuaucaacuucuacgacccccuagucuucccauccgacgaguucgaugccuccaucucccaaguaaaugaaaagaucaaucaaagccuggccuucauccgcaaauccgacgaacuacuccacaaugucaacgucggaaaaucaacaacaaacaucaugaucaccaccaucaucaucgucaucauaguaauccuccuacugcucaucgccgucggucucuuccuauacugcaaagcccguucuacuccagucacccucuccaaagaccaacuaucaggaaucaacaacaucgccuucagcaacuaaggacuaguguccaccugucccuccugggcugcuggauugucucguuuuccugccaaauaaacaggaucagcgcuuuacagaucuaaaaaaaaaaaaaaaaaaaaaaaaaaaaaaaaaaaaaaaaaaaaaaaaaaaaaaaaaaaaaaaaugcaucccccccccccccccccccccccccccccccaaaggcucuuuucagagccaccagaauu

SEQ ID NO: 15473 - RNA, 1877 nt, Artificial Sequence
  mRNA product Design b-2 comprising derived and/or modified sequence from HRSV(Memphis-37)__AIY60640.1__F_DSCav1_mut3 (opt1)
gggagagccucugcuggaguccggggaguggcguuggcugcuagagcgaagcuuaccauggagcugcccauccucaagaccaacgccaucaccacgauccuggccgcggugacccugugcuucgccagcucccagaacaucaccgaggaguucuaccagagcacgugcuccgccgucagcaagggcuaccucggcgcccugcgcaccgggugguacaccagcgugaucaccaucgagcuguccaacaucaaggagaucaagugcaacggcaccgacgccaaggugaagcucaucaagcaggagcuggacaaguacaagaacgcggucacggaccugcagcuccugaugcagagcaccccggccgccggcuccgggagcgcgaucugcuccggcaucgccgucugcaaggugcugcaccucgagggcgaggugaacaagaucaagaacgcccugcuguccaccaacaaggccgucgugagccucuccaacggggugagcguccugaccuucaaggugcuggaccucaagaacuacaucgacaagcagcugcugcccauccugaacaagcagagcugcuccauccccaacaucgagaccgucaucgaguuccagcagaagaacaaccgccuccuggagaucacgcgggaguucagcgugaacgcgggcgugaccacccccgucuccaccuacaugcugacgaacagcgagcuccugucccugaucaacgacaugccgaucaccaacgaccagaagaagcucaugagcaacaacgugcagaucgugcgccagcaguccuacagcaucaugugcaucaucaaggaggagguccuggccuacguggugcagcugccccucuacggggucaucgacacccccugcuggaagcugcacaccagcccccugugcacgaccaacaccaaggagggcuccaacaucugccucacccggacggaccgcgggugguacugcgacaacgccggcagcguguccuucuucccgcaggccgagaccugcaagguccagagcaaccggguguucugcgacaccaugaacucccugacccugcccagcgaggugaaccucugcaacaucgacaucuucaaccccaaguacgacugcaagaucaugacguccaagaccgacgucagcuccagcgugaucaccucccugggcgccaucgugagcugcuacgggaagaccaagugcacggcgagcaacaagaaccgcggcaucaucaagaccuucuccaacgggugcgacuacgucagcaacaagggcguggacaccguguccgucggcaacacccuguacugcgugaacaagcaggagggccagagccucuacgugaagggggagcccaucaucaacuucuacgacccgcuggucuuccccuccgacgaguucgacgccagcaucucccaggugaacgagaagaucaaccagagccuggccuucauccggaaguccgacgagcuccugcacaacgugaacgucggcaagagcaccacgaacaucaugaucaccaccaucaucaucgugaucaucgugauccugcugcuccugaucgccgucgggcuguuccucuacugcaaggcccgcuccacccccgugacgcugagcaaggaccagcuguccgggaucaacaacaucgcguucagcaacugaggacuaguguccaccugucccuccugggcugcuggauugucucguuuuccugccaaauaaacaggaucagcgcuuuacagaucuaaaaaaaaaaaaaaaaaaaaaaaaaaaaaaaaaaaaaaaaaaaaaaaaaaaaaaaaaaaaaaaaugcaucccccccccccccccccccccccccccccccaaaggcucuuuucagagccaccagaauu

SEQ ID NO: 15474 - RNA, 1877 nt, Artificial Sequence
  mRNA product Design b-2 comprising derived and/or modified sequence from HRSV(Memphis-37)__AIY60640.1__F_DSCav1_mut3 (opt1)
gggagagccucugcuggaguccggggaguggcguuggcugcuagagcgaagcuuaccauggagcugcccauccucaagaccaacgccaucaccacgauccuggccgcggugacccugugcuucgccagcucccagaacaucaccgaggaguucuaccagagcacgugcuccgccgucagcaagggcuaccucggggcccugcgcaccggcugguacaccuccgugaucaccaucgagcugagcaacaucaaggagaucaagugcaacgggaccgacgccaaggugaagcucaucaagcaggagcuggacaaguacaagaacgcggucacggaccugcagcuccugaugcaguccaccccggccgccggcagcggguccgccaucugcagcggcaucgcggugugcaaggugcugcaccucgagggcgaggucaacaagaucaagaacgcccugcuguccaccaacaaggccguggugagccucuccaacggggucagcgugcugaccuucaaggugcuggaccucaagaacuacaucgacaagcagcugcugcccauccucaacaagcaguccugcagcauccccaacaucgagacggucaucgaguuccagcagaagaacaaccggcugcuggagaucacccgcgaguucuccgugaacgccggcgugaccacccccgucagcacguacaugcucaccaacuccgagcugcugagccucaucaacgacaugccgaucaccaacgaccagaagaagcugaugagcaacaacgugcagaucgugcggcagcaguccuacagcaucaugugcaucaucaaggaggagguccuggccuacguggugcagcucccccuguacggggucaucgacacccccugcuggaagcugcacacgagcccccucugcaccaccaacaccaaggagggcuccaacaucugccugacgcgcaccgaccgggggugguacugcgacaacgcgggcuccgugagcuucuucccgcaggccgagaccugcaaggugcaguccaaccgcgucuucugcgacaccaugaacagccugacgcuccccuccgaggugaaccugugcaacaucgacaucuucaaccccaaguacgacugcaagaucaugaccagcaagaccgacgucuccagcuccgugaucaccagccugggcgccaucguguccugcuacgggaagacgaagugcaccgccagcaacaagaaccggggcaucaucaagaccuucuccaacgggugcgacuacgucagcaacaagggcguggacaccguguccgucggcaacacgcucuacugcgugaacaagcaggaggggcagagccuguacgugaagggcgagcccaucaucaacuucuacgacccgcuggucuuccccagcgacgaguucgacgccuccaucagccaggugaacgagaagaucaaccagucccucgcguucauccgcaagagcgacgagcugcugcacaacgugaacgucgggaaguccaccaccaacaucaugaucaccaccaucaucaucgugaucaucgugauccuccugcugcucaucgccgucggccuguuccuguacugcaaggcccggagcacgcccgugacccuguccaaggaccagcucagcgggaucaacaacaucgccuucuccaacugaggacuaguguccaccugucccuccugggcugcuggauugucucguuuuccugccaaauaaacaggaucagcgcuuuacagaucuaaaaaaaaaaaaaaaaaaaaaaaaaaaaaaaaaaaaaaaaaaaaaaaaaaaaaaaaaaaaaaaaugcaucccccccccccccccccccccccccccccccaaaggcucuuuucagagccaccagaauu

SEQ ID NO: 15475 - RNA, 1877 nt, Artificial Sequence
  mRNA product Design b-2 comprising derived and/or modified sequence from HRSV(Memphis-37)__AIY60640.1__F_DSCav1_mut3 (opt2)
gggagagccucugcuggaguccggggaguggcguuggcugcuagagcgaagcuuaccauggagcuccccauccucaagaccaacgccaucaccaccauccucgccgccgucacccucugcuucgccuccucccagaacaucaccgaggaguucuaccaguccaccugcuccgccgucuccaagggcuaccucggcgcccuccgcaccggcugguacaccuccgucaucaccaucgagcucuccaacaucaaggagaucaagugcaacggcaccgacgccaaggucaagcucaucaagcaggagcucgacaaguacaagaacgccgucaccgaccuccagcuccucaugcaguccacccccgccgccggcuccggcuccgccaucugcuccggcaucgccgucugcaagguccuccaccucgagggcgaggucaacaagaucaagaacgcccuccucuccaccaacaaggccgucgucucccucuccaacggcgucuccguccucaccuucaagguccucgaccucaagaacuacaucgacaagcagcuccuccccauccucaacaagcaguccugcuccauccccaacaucgagaccgucaucgaguuccagcagaagaacaaccgccuccucgagaucacccgcgaguucuccgucaacgccggcgucaccacccccgucuccaccuacaugcucaccaacuccgagcuccucucccucaucaacgacaugcccaucaccaacgaccagaagaagcucauguccaacaacguccagaucguccgccagcaguccuacuccaucaugugcaucaucaaggaggagguccucgccuacgucguccagcucccccucuacggcgucaucgacacccccugcuggaagcuccacaccuccccccucugcaccaccaacaccaaggagggcuccaacaucugccucacccgcaccgaccgcggcugguacugcgacaacgccggcuccgucuccuucuucccccaggccgagaccugcaagguccaguccaaccgcgucuucugcgacaccaugaacucccucacccuccccuccgaggucaaccucugcaacaucgacaucuucaaccccaaguacgacugcaagaucaugaccuccaagaccgacgucuccuccuccgucaucaccucccucggcgccaucgucuccugcuacggcaagaccaagugcaccgccuccaacaagaaccgcggcaucaucaagaccuucuccaacggcugcgacuacgucuccaacaagggcgucgacaccgucuccgucggcaacacccucuacugcgucaacaagcaggagggccagucccucuacgucaagggcgagcccaucaucaacuucuacgacccccucgucuuccccuccgacgaguucgacgccuccaucucccaggucaacgagaagaucaaccagucccucgccuucauccgcaaguccgacgagcuccuccacaacgucaacgucggcaaguccaccaccaacaucaugaucaccaccaucaucaucgucaucaucgucauccuccuccuccucaucgccgucggccucuuccucuacugcaaggcccgcuccacccccgucacccucuccaaggaccagcucuccggcaucaacaacaucgccuucuccaacugaggacuaguguccaccugucccuccugggcugcuggauugucucguuuuccugccaaauaaacaggaucagcgcuuuacagaucuaaaaaaaaaaaaaaaaaaaaaaaaaaaaaaaaaaaaaaaaaaaaaaaaaaaaaaaaaaaaaaaaugcaucccccccccccccccccccccccccccccccaaaggcucuuuucagagccaccagaauu
